United States Patent Application Publication US 2018/0126003 A1 - sequence listing, part 138

SEQ ID NO: 241692 - DNA, 1290 bp, Artificial Sequence
  derived and/or modified sequence
atggctgccactgacatcgcccgccaagtcggagagggctgcagaaccgtcccactggccggacacgtgggcttcgactctttgccagaccagttagtgaacaagtccgtgtcacaaggtttctgctttaatattctgtgtgtgggggaaaccggtctcggcaaaagcactctgatggacacgttgttcaatacaaaattcgaaggagagcctgccactcacactcagcccggcgtgcagctgcagtctaacacttacgacctgcaggagtcaaacgtccgactgaaattgaccatagtttcgactgtcgggttcggggaccaaatcaataaagaggattcttataaacccattgtggaattcatcgatgcccagtttgaagcctacctgcaggaggagctaaaaatcaggcgcgtactccacacttatcacgacagcagaattcatgtgtgcctgtacttcatcgctccaactggtcatagcctcaagtcactggatctggtgacaatgaagaaactcgacagcaaggtcaatattattccaattatcgccaaagctgatgccatatcgaaatctgagcttacaaaatttaagattaaaattactagtgaactcgtctcaaacggcgtgcagatttatcaattccctaccgacgatgagagcgtcgctgaaatcaatggaaccatgaacgcgcacctaccgtttgcggttatcgggagtacggaagagctgaagattggaaataagatgatgagagccagacagtacccctggggtactgtccaggtggagaatgaggcacattgtgacttcgtgaaactgagggaaatgcttatccgggttaatatggaggacctcagagaacagacacacacgagacattacgaactataccggcggtgcaagctcgaggagatgggtttcaaagacactgatccggatagtaagcccttttctctacaggagacctacgaggctaagcgaaatgaatttctgggcgagcttcagaaaaaggaggaagaaatgagacagatgttcgtgcaacgcgtgaaggagaaagaagctgagctgaaagaggccgaaaaggaactccatgaaaaatttgaccgactgaaaaaactccaccaggacgagaaaaaaaaactggaagataagaaaaaatctttagatgatgaggttaacgcctttaagcagcgaaaaacggctgcggaacttctgcagagccaaggaagtcaggccggagggagccagaccctgaagagagacaaagaaaaaaaaaacttcttctag

SEQ ID NO: 241693 - DNA, 1290 bp, Artificial Sequence
  derived and/or modified sequence
atggccgccacagacatcgcccggcaggtgggggagggctgcaggacagtgcccctggccggccacgtgggctttgacagcctgcctgaccagctggtgaacaagtctgtgtcccagggcttctgcttcaacatcctgtgtgtgggggagaccggcctgggcaagagcaccctgatggacaccctcttcaacaccaagtttgaaggagagcccgccacccacacccagcccggggtgcagctgcagagcaacacctatgacctgcaggagagcaatgtgcggctgaagctgaccatcgtgtccacagtgggctttggagaccagatcaacaaggaggacagctacaagcccatcgtggagttcattgatgcccagtttgaggcctacctgcaggaggagctgaagatcagaagagtgctgcacacctaccatgacagccgcatccacgtgtgcctgtacttcatcgcccccaccggccacagcctgaagagcctggacctggtgaccatgaagaagctggacagcaaggtgaacatcatccccatcatcgccaaggcagatgccatcagcaagtctgagctgaccaagttcaagatcaagatcaccagcgagctggtgtccaatggagtgcagatctaccagttccccacagatgatgaatctgtggccgagatcaatggcaccatgaatgcccacctgccctttgctgtgattggcagcacagaggagctgaagattggcaacaagatgatgagggcccggcagtacccctggggcaccgtgcaggtggagaatgaggcccactgtgactttgtgaagctgcgggagatgctgatccgggtgaacatggaggacctgcgggagcagacccacaccaggcactatgagctgtaccgccgctgcaagctggaggagatgggcttcaaggacacagatcctgacagcaagcccttcagcctgcaggagacctatgaggccaagagaaatgagttcctgggggagctgcagaagaaggaggaggagatgaggcagatgtttgtgcagagggtgaaggagaaggaggccgagctgaaggaggccgagaaggagctgcacgagaagtttgaccggctgaagaagctgcaccaggatgagaagaagaagctggaggacaagaagaagagcctggatgatgaggtgaatgccttcaagcagaggaagacagctgctgagctgctgcagagccagggcagccaggccggcggcagccagaccctgaagagggacaaggagaagaagaacttcttctag

SEQ ID NO: 241694 - DNA, 1290 bp, Artificial Sequence
  derived and/or modified sequence
atggccgccaccgacatcgcccggcaggtgggcgagggctgccggacggtccctcttgcagggcatgtgggttttgatagccttcctgaccagttggttaacaagtccgtttcccaagggttctgtttcaacatcttgtgcgtgggtgaaaccgggctcggaaagtccaccttgatggataccctgtttaataccaagtttgaaggggaaccggcaacacacacacagcccggagttcaactccagtccaacacctacgacctgcaggagtcaaatgtgagactgaagctgactatagttagcacagtcggttttggcgaccagattaataaggaggattcttacaaacccatcgtggagtttattgatgcacaattcgaagcctatctgcaagaggaactgaagattcgtagagtcctgcacacgtatcatgattcacgcattcacgtctgcttatacttcattgcccccacaggtcattcccttaaaagcctcgacttagtgactatgaagaaattagatagtaaagtaaacatcattcccattatcgccaaagccgacgccatctctaagtcagagctgacgaagttcaagatcaagataaccagtgagctggtcagcaacggtgtgcaaatttaccagtttccgacagatgatgagtccgtcgccgagattaatggaacaatgaatgcacacctccccttcgccgtaataggctcaacagaggaactgaaaattggaaataagatgatgagagcgcgtcagtacccctgggggacagttcaggtggagaatgaggcgcattgtgattttgtcaaattaagggagatgctgattagagtcaacatggaagatctgcgtgaacagactcatacccgacactatgaactgtatcggaggtgtaagctggaggagatgggattcaaagacactgaccctgattcaaaaccattcagtctgcaggaaacatatgaggcaaaacgaaacgagtttctaggagagctccaaaaaaaagaagaggagatgagacagatgtttgttcagagggtcaaagagaaggaagcggagctgaaagaagcagagaaggagcttcacgagaagttcgatcgcctgaagaagctgcaccaggacgaaaagaagaagctcgaggacaagaagaaaagtctggacgatgaggttaatgcatttaaacagaggaaaacagccgccgaacttctacaaagccaaggcagtcaggctgggggtagccagacattgaaacgtgataaagagaaaaagaatttcttttag

SEQ ID NO: 241695 - DNA, 1290 bp, Artificial Sequence
  derived and/or modified sequence
atggcagccacagatattgccagacaggtgggcgaaggctgtcgcactgttcccctagccggacacgtcgggttcgatagtttgcctgatcagctggtgaacaagtccgtgtcgcaaggcttttgtttcaatatcttgtgtgtaggagagactggtctgggaaaatcaacgctgatggatactctgttcaacacaaaattcgaaggcgaacctgccacccacacgcagcccggagtacaactgcagtccaatacctacgaccttcaggaatccaacgtcaggctgaaacttaccatcgtgagtaccgtggggttcggcgaccaaataaacaaagaagatagttacaagccgatagtggaattcatagacgctcagttcgaggcctatttacaggaggaactgaagatcaggagagttctccacacttaccacgatagccggattcatgtgtgtctgtattttatagcccctaccgggcattcactcaaatcactggacctggtcaccatgaagaagttggacagcaaagtgaacattattcctattatcgcaaaagccgatgccattagtaaaagcgaacttaccaagttcaagatcaagattacaagtgaattagtcagtaacggtgtgcaaatctatcaattcccaacggatgatgagagtgttgccgagatcaatggcaccatgaacgcccaccttccctttgccgttattggcagcacggaggagcttaagatcgggaacaaaatgatgagggccagacaatacccctggggaaccgtccaggtcgagaatgaggcccactgtgactttgttaaacttagggaaatgctgattagggtgaacatggaggatttaagagaacagacgcatacccgtcactatgagctctatagaagatgtaagctggaggagatgggattcaaggacacagatccggatagcaagcctttttccttgcaggagacctacgaggccaaacggaatgagtttctgggcgagttgcagaaaaaggaggaggagatgcgccagatgttcgtccaacgggtgaaggaaaaagaggccgagctgaaggaggccgagaaggagctgcacgaaaagtttgatcgacttaaaaaactgcaccaagacgagaaaaagaagctggaggataaaaagaaaagcttagacgacgaagtaaatgcctttaagcaaaggaaaaccgcagcggagctcctccaatcccagggatctcaggcaggagggtctcagactctaaagcgtgacaaagagaagaagaattttttttag

SEQ ID NO: 241696 - DNA, 1576 bp, Artificial Sequence
  derived and/or modified sequence
gaagaactggaactggtctggccatagggggaagcggcgcgttaaatccgccccctctccataccctactttcaaggggtgggcggtagaggggaggttggggttggagcagcggcgagggggcccctcccttgcacctccccccaccggacttggtcgcgcccgaagtgtaacactttctctttgtcggaggagctcctctgtttcctgtgcagtagctcccgttgcggcggcacccgtggcagccctggcggacgcaggagcgatggcagcgaccgatatagctcgccaggtgggtgaaggttgccgaactgtccccctggctggacatgtggggtttgacagcttgcctgaccagctggtgaataagtccgtcagccagggcttctgcttcaacatcctgtgcgtgggagagacaggtttgggcaagtccaccctcatggacaccctgttcaacaccaaattcgaaggggagccagccacccacacacagccgggtgtccagctccagtctaatacctatgacctccaagagagcaacgtgaggctaaagctcacgatcgttagcacagttggctttggggaccagatcaacaaagaggacagctacaagcctatcgtggaattcatcgatgcacaattcgaggcctacctgcaggaagagctaaagatccgaagagtgctacacacctaccatgactcccgaatccatgtctgcttgtatttcattgcccccacgggtcattccctgaagtctctggacctagtgactatgaagaagctggacagtaaggtgaacatcatccccatcattgccaaagcagatgccatttcgaagagtgagctaacaaagttcaaaatcaaaatcaccagcgagcttgtcagcaacggagtccagatctatcagtttcctacagatgatgagtcggtggcagagatcaatggaaccatgaacgcccacctgccgtttgctgtcattggcagcacagaagaactgaagataggcaacaagatgatgagggcgcggcagtatccttggggcactgtgcaggttgaaaacgaggcccactgcgactttgtgaagctgcgggagatgctgattcgggtcaacatggaggatctgcgggagcagacccacacccggcactatgagctgtatcgccgctgtaagctggaggagatgggcttcaaggacaccgaccctgacagcaaacccttcagtttacaggagacatatgaggccaaaaggaacgagttcctaggggaactccagaaaaaagaagaggagatgagacagatgttcgtccagcgagtcaaagagaaagaagcggagctcaaagaggcagagaaagagctgcacgagaagtttgaccgtctgaagaaactgcaccaggacgagaagaagaaactggaggataagaagaaatccctggatgatgaagtgaatgctttcaagcaaagaaagacggcggctgagctgctccagtcccagggctcccaggctggaggctcacagactctgaagagagacaaagagaagaaaaactttttttaatcttgtcttcagcagctgcac

SEQ ID NO: 241697 - DNA, 1290 bp, Artificial Sequence
  derived and/or modified sequence
atggccgccaccgacatcgccagacaggtgggcgagggctgcagaaccgtgcccctggccggccacgtgggcttcgacagcctgcccgaccagctggtgaacaagagcgtgagccagggcttctgcttcaacatcctgtgcgtgggcgagaccggcctgggcaagagcaccctgatggacaccctgttcaacaccaagttcgagggcgagcccgccacccacacccagcccggcgtgcagctgcagagcaacacctacgacctgcaggagagcaacgtgagactgaagctgaccatcgtgagcaccgtgggcttcggcgaccagatcaacaaggaggacagctacaagcccatcgtggagttcatcgacgcccagttcgaggcctacctgcaggaggagctgaagatcagaagagtgctgcacacctaccacgacagcagaatccacgtgtgcctgtacttcatcgcccccaccggccacagcctgaagagcctggacctggtgaccatgaagaagctggacagcaaggtgaacatcatccccatcatcgccaaggccgacgccatcagcaagagcgagctgaccaagttcaagatcaagatcaccagcgagctggtgagcaacggcgtgcagatctaccagttccccaccgacgacgagagcgtggccgagatcaacggcaccatgaacgcccacctgcccttcgccgtgatcggcagcaccgaggagctgaagatcggcaacaagatgatgagagccagacagtacccctggggcaccgtgcaggtggagaacgaggcccactgcgacttcgtgaagctgagagagatgctgatcagagtgaacatggaggacctgagagagcagacccacaccagacactacgagctgtacagaagatgcaagctggaggagatgggcttcaaggacaccgaccccgacagcaagcccttcagcctgcaggagacctacgaggccaagagaaacgagttcctgggcgagctgcagaagaaggaggaggagatgagacagatgttcgtgcagagagtgaaggagaaggaggccgagctgaaggaggccgagaaggagctgcacgagaagttcgacagactgaagaagctgcaccaggacgagaagaagaagctggaggacaagaagaagagcctggacgacgaggtgaacgccttcaagcagagaaagaccgccgccgagctgctgcagagccagggcagccaggccggcggcagccagaccctgaagagagacaaggagaagaagaacttcttctag

SEQ ID NO: 241698 - protein, 522 aa, Artificial Sequence
  derived and/or modified sequence
MSLLNCENSCGSSQSESDCCVAMASSCSAVTKDDSVGGTASTGNLSSSFMEEIQGYDVEFDPPLESKYECPICLMALREAVQTPCGHRFCKACIIKSIRDAGHKCPVDNEILLENQLFPDNFAKREILSLMVKCPNEGCLHKMELRHLEDHQAHCEFALMDCPQCQRPFQKFHINIHILKDCPRRQVSCDNCAASMAFEDKEIHDQNCPLANVICEYCNTILIREQMPNHYDLDCPTAPIPCTFSTFGCHEKMQRNHLARHLQENTQSHMRMLAQAVHSLSVIPDSGYISEVRNFQETIHQLEGRLVRQDHQIRELTAKMETQSMYVSELKRTIRTLEDKVAEIEAQQCNGIYIWKIGNFGMHLKCQEEEKPVVIHSPGFYTGKPGYKLCMRLHLQLPTAQRCANYISLFVHTMQGEYDSHLPWPFQGTIRLTILDQSEAPVRQNHEEIMDAKPELLAFQRPTIPRNPKGFGYVTFMHLEALRQRTFIKDDTLLVRCEVSTRFDMGSLRREGFQPRSTDAGV

SEQ ID NO: 241699 - DNA, 1569 bp, Artificial Sequence
  derived and/or modified sequence
atgagcctgctgaactgcgagaacagctgcggcagcagccagagcgagagcgactgctgcgtggccatggccagcagctgcagcgccgtgaccaaggacgacagcgtgggcggcaccgccagcaccggcaacctgagcagcagcttcatggaggagatccagggctacgacgtggagttcgacccccccctggagagcaagtacgagtgccccatctgcctgatggccctgagagaggccgtgcagaccccctgcggccacagattctgcaaggcctgcatcatcaagagcatcagagacgccggccacaagtgccccgtggacaacgagatcctgctggagaaccagctgttccccgacaacttcgccaagagagagatcctgagcctgatggtgaagtgccccaacgagggctgcctgcacaagatggagctgagacacctggaggaccaccaggcccactgcgagttcgccctgatggactgcccccagtgccagagacccttccagaagttccacatcaacatccacatcctgaaggactgccccagaagacaggtgagctgcgacaactgcgccgccagcatggccttcgaggacaaggagatccacgaccagaactgccccctggccaacgtgatctgcgagtactgcaacaccatcctgatcagagagcagatgcccaaccactacgacctggactgccccaccgcccccatcccctgcaccttcagcaccttcggctgccacgagaagatgcagagaaaccacctggccagacacctgcaggagaacacccagagccacatgagaatgctggcccaggccgtgcacagcctgagcgtgatccccgacagcggctacatcagcgaggtgagaaacttccaggagaccatccaccagctggagggcagactggtgagacaggaccaccagatcagagagctgaccgccaagatggagacccagagcatgtacgtgagcgagctgaagagaaccatcagaaccctggaggacaaggtggccgagatcgaggcccagcagtgcaacggcatctacatctggaagatcggcaacttcggcatgcacctgaagtgccaggaggaggagaagcccgtggtgatccacagccccggcttctacaccggcaagcccggctacaagctgtgcatgagactgcacctgcagctgcccaccgcccagagatgcgccaactacatcagcctgttcgtgcacaccatgcagggcgagtacgacagccacctgccctggcccttccagggcaccatcagactgaccatcctggaccagagcgaggcccccgtgagacagaaccacgaggagatcatggacgccaagcccgagctgctggccttccagagacccaccatccccagaaaccccaagggcttcggctacgtgaccttcatgcacctggaggccctgagacagagaaccttcatcaaggacgacaccctgctggtgagatgcgaggtgagcaccagattcgacatgggcagcctgagaagagagggcttccagcccagaagcaccgacgccggcgtgtag

SEQ ID NO: 241700 - DNA, 1569 bp, Artificial Sequence
  derived and/or modified sequence
atgtccttgctgaactgtgaaaatagctgtggctccagccagtccgaatctgactgctgcgtcgcgatggcgagttcttgcagcgcagtgaccaaggatgactccgtcggagggactgcctccacaggtaacctgtcttcttcatttatggaagagatccagggctacgatgtcgaattcgatccccctctggagagcaaatacgagtgccctatctgcctgatggccctccgcgaagctgtgcagacaccttgcggacaccggttttgcaaggcatgtattatcaaatctatcagggacgctgggcacaaatgtcctgtggataacgagatactgctggaaaaccagctatttccagacaacttcgccaaaagggagatcttatctttgatggtcaagtgtcccaacgagggctgtctgcacaagatggagctgagacatctggaagatcatcaggcacactgtgaattcgcccttatggactgcccccagtgtcagaggccattccaaaagttccacattaatatccacattcttaaagactgccccaggagacaggtttcctgtgacaattgcgccgcaagcatggccttcgaggacaaagaaattcatgaccagaattgccctctggcaaacgtcatatgcgaatattgtaacaccattctgatccgtgagcagatgccaaatcattatgacctggattgtccaacggcccccattccttgtaccttcagtactttcggctgtcatgagaaaatgcagagaaaccacctagcacggcacttacaagaaaatacacaatcccacatgagaatgttagcccaggcggtgcactcccttagcgtgatacctgattcgggatatataagcgaggtgcggaatttccaggagaccattcatcaacttgaagggaggcttgtccggcaggatcaccagatccgtgagcttaccgccaagatggaaactcagtctatgtacgtctccgagctcaagagaaccatccgcactctggaggataaagtggctgaaattgaggcccagcagtgcaacggaatctacatctggaaaatcggcaactttggcatgcatctcaagtgtcaggaagaggaaaagcctgtagtgattcatagtccggggttctatacaggcaaacctggatataaactctgcatgcggctgcatctgcagctgcctaccgcacagcgctgcgcaaactatatttctctgtttgtgcataccatgcaaggagaatacgatagtcatctcccttggcctttccaggggaccattagactgacgattctggaccaatcagaggcccccgtgcgacagaatcacgaggaaatcatggacgcgaaaccggaactgctcgcgtttcagcgtcctacaattcccaggaaccccaaaggctttgggtatgtcactttcatgcacttggaggcactcaggcagcgcacattcattaaggacgatacactgctggtgcgatgcgaagttagtacgcgtttcgacatgggtagcctgagaagggagggcttccagccacgttctacagatgccggcgtgtag

SEQ ID NO: 241701 - DNA, 1569 bp, Artificial Sequence
  derived and/or modified sequence
atgagcttgttaaattgcgagaatagctgcgggagcagccaatctgagagtgattgctgcgtggctatggcctcaagctgttccgctgttacaaaagacgacagtgtcggcgggaccgctagcacagggaatctcagctccagtttcatggaggaaatccagggatatgatgtggagtttgaccccccacttgagtctaaatacgaatgtcccatttgtctcatggctctgcgggaagcagtgcagactccatgcggacacaggttctgtaaagcttgtattatcaaatcaataagggatgcgggtcataagtgtccagtggataatgagatcctgctagaaaatcaattattcccagacaactttgctaagagggagattctgtccctcatggtgaagtgcccaaacgagggctgtctccataaaatggagctccggcatctggaagaccatcaggcgcactgtgaattcgctctcatggactgcccacaatgtcagagaccattccagaagttccacatcaatatacacatcctgaaggattgcccacgcagacaggtgtcctgtgataactgtgccgcctcaatggctttcgaagacaaggagatccacgatcaaaactgtcctctggccaatgtgatctgcgagtattgtaacactattttaatccgagagcagatgccaaatcactatgacttggactgtccaacagccccgatcccatgtactttttcgacattcggttgccacgagaagatgcaacggaatcacctcgcccggcatctgcaggagaacacacagagccatatgcgcatgctggcgcaggccgtgcacagcctttccgtcatcccagattccggctacatctccgaggttaggaactttcaggagaccatccaccagctggagggtcgtctagtccgacaggatcaccaaatacgggagcttaccgccaaaatggaaacccaaagcatgtatgtctcagagttaaaacgaacaatacgtactttagaggataaggtggccgagatagaggcacaacagtgtaatggcatatacatttggaagattggcaactttgggatgcacctcaagtgtcaggaagaagaaaaacccgtggtcattcatagcccaggtttctacactgggaagccaggatataagctctgtatgcgactgcacctgcagcttcctacagcccagcggtgcgccaattacatctctctgtttgtacataccatgcagggagagtatgatagccatctaccctggccctttcagggaacgattagacttaccatcctggaccagagcgaggctcccgtgagacaaaatcatgaggagattatggacgctaaaccagagcttctggcatttcagcgaccaacaatcccaaggaatccgaaagggttcgggtacgtgacttttatgcacctcgaggccctgcgacagcggacattcatcaaggatgataccctgttagtgagatgtgaagtgagtactcggttcgatatggggtcacttcgaagagaggggttccagccacggtctaccgatgcgggtgtgtag

SEQ ID NO: 241702 - DNA, 1569 bp, Artificial Sequence
  derived and/or modified sequence
atgagcctgctgaactgtgagaacagctgtggcagcagccagagcgagagtgactgctgcgtggccatggccagcagctgcagcgctgtgaccaaggatgattctgtgggcggcacagccagcacaggcaacctgagcagcagcttcatggaggagatccagggctatgatgtggagtttgacccccccctggagagcaaatatgaatgtcccatctgcctgatggccctgcgggaggccgtgcagaccccctgtggccaccgcttctgcaaggcctgcatcatcaagagcatcagagatgctggccacaagtgccctgtggacaatgagatcctgctggagaaccagctgttcccagacaactttgccaagcgggagatcctgagcctgatggtgaagtgccccaatgaaggctgcctgcacaagatggagctgcggcacctggaggaccaccaggcccactgtgaatttgccctgatggactgcccccagtgccagaggcccttccagaagttccacatcaacatccacatcctgaaggactgcccccggcggcaggtgtcctgtgacaactgtgccgcctccatggcctttgaggacaaggagatccatgaccagaactgccccctggccaacgtcatctgtgagtactgcaacaccatcctgatccgggagcagatgcccaaccactatgacctggactgccccacagcccccatcccctgcaccttcagcaccttcggctgccacgagaagatgcagaggaaccacctggcccggcacctgcaggagaacacccagagccacatgaggatgctggcccaggccgtgcacagcctgagcgtcatcccagacagcggctacatcagcgaggtgaggaacttccaggagaccatccaccagctggagggccgcctggtgcggcaggaccaccagatccgggagctgacagccaagatggagacccagagcatgtatgtgtctgagctgaagaggaccatccgcaccctggaggacaaggtggccgagattgaggcccagcagtgcaatggcatctacatctggaagattggcaactttggcatgcacctgaagtgccaggaggaggagaagcctgtggtgatccacagccctggcttctacaccgggaagccaggctacaagctgtgcatgaggctgcacctgcagctgcccacagcccagagatgtgccaactacatcagcctgtttgtgcacaccatgcagggcgagtatgacagccacctgccctggcccttccagggcaccatccggctgaccatcctggaccagagcgaggcccctgtgcggcagaaccacgaggagatcatggatgccaagccagagctgctggccttccagaggcccaccatccccaggaaccccaagggcttcggctacgtgaccttcatgcacctggaggccctgcggcagaggaccttcatcaaggatgacaccctgctggtgcgctgtgaggtgtccaccaggtttgacatgggcagcctgcggcgggagggcttccagcccaggagcacagatgctggggtgtag

SEQ ID NO: 241703 - DNA, 1569 bp, Artificial Sequence
  derived and/or modified sequence
atgagcctgctgaactgcgagaacagctgcggcagcagccagagcgaatcagactgttgtgtggccatggctagttcatgctccgcagtaaccaaagacgacagcgtaggcggcacggccagcacaggaaacctgtcatcaagtttcatggaggagattcagggctacgatgttgagttcgacccacccctggaaagtaaatacgaatgccccatatgcctcatggccctgcgtgaagccgtgcaaacaccttgcggtcatcggttctgcaaggcctgcattatcaaaagtatcagggacgctggacataaatgtcctgttgacaatgaaattctgttggaaaaccagttgtttcctgacaactttgctaagcgagagatcttgtctctcatggttaagtgtccaaacgaaggctgtctccacaaaatggaactccgccacctggaggaccaccaggcccactgtgaatttgcgctgatggattgtccccagtgtcaaaggccgtttcagaagttccatatcaacatccacattcttaaggactgcccgaggcgacaagtcagctgcgataattgcgccgcgagcatggcctttgaggataaagaaattcatgaccagaactgtccactagccaatgtgatttgcgagtactgcaacaccatcctaatcagggaacagatgcccaatcattacgatctggactgtcccacagctcctatcccttgtacatttagtacctttgggtgtcacgagaaaatgcagaggaatcacctcgctagacacctgcaggagaacacacagtctcatatgcgtatgttggcgcaagccgtgcactctttatccgtgatcccagattcaggctacatctcggaggtcagaaatttccaggaaactatccatcagctcgaagggcgtcttgtcagacaggaccaccagatcagagagctcaccgccaagatggaaacacagtcaatgtatgttagcgaactcaaacgaactattcgtacgctggaggataaggttgcagagatcgaggctcagcagtgtaacggaatctacatttggaaaatcggaaatttcggcatgcacttgaagtgccaggaagaggagaagcccgttgttatacacagccccggcttctatactggcaaacccggttacaagctatgtatgcgcctccacttgcaattgcctacagcccagcgctgtgccaattatatatccttgtttgtgcacactatgcagggggaatacgactcgcacctcccctggcccttccagggtacaatccggctgactatcctggatcagagcgaggcgccagtacggcagaaccacgaggagatcatggacgctaaacctgaattgctcgccttccagagacctacaatacctcggaatcccaaaggttttggatatgtaactttcatgcatctcgaagccctccgccagcggacgttcataaaagacgatacccttctggtccgttgtgaagtcagcacccgctttgatatgggatcattgcgtcgggagggattccaaccacggtctaccgacgccggcgtttag

SEQ ID NO: 241704 - DNA, 1569 bp, Artificial Sequence
  derived and/or modified sequence
atgagcctgctgaactgcgagaacagctgcggcagcagccagagcgaaagcgactgttgtgtggccatggcatcctcttgctccgccgtcacaaaggacgattcagtgggcggtaccgcaagcactggcaatctctcctcttcttttatggaagagatccaaggttatgatgtagaattcgacccaccacttgagtccaagtacgagtgtccaatttgcctgatggcccttagggaagctgtgcagacgccttgcggacatcgcttttgtaaggcgtgtattattaagagcattagggatgccggacacaagtgtccggtcgacaacgaaatactactggaaaaccagttatttccggataatttcgcgaaaagggaaattctgtctctgatggtgaaatgcccaaatgagggctgtcttcataaaatggaactccggcacctcgaggaccaccaggcgcactgcgaattcgccctgatggattgccctcagtgtcagcgtccctttcagaagttccacattaacattcatattttgaaggactgccctagacgccaggtgtcttgcgacaattgtgccgcctccatggcctttgaggacaaagaaattcatgaccagaattgccctttggctaatgtgatttgcgaatactgcaacaccattctaatccgcgaacaaatgcccaaccactacgatctagactgtcctacagcccccatcccctgcactttcagtacctttggttgtcacgagaagatgcagcggaatcatctcgcacggcatttgcaggaaaacactcagtcacacatgcggatgctggcccaggccgtgcacagcctgtctgttataccagattcgggttacatctccgaagtacgaaattttcaggaaactattcaccagctcgaaggacgtttggtcaggcaggaccaccagatcagggaactaacagcgaaaatggagacccagtctatgtatgtatcagaactcaaacgtaccattaggactttagaagataaagtggctgagattgaagcacagcagtgtaacggtatctacatctggaaaatcggcaacttcgggatgcatttgaaatgtcaggaggaagaaaagccagttgtcatccattccccaggcttttacaccggcaaacctggatacaagctgtgcatgcgattacacttgcagctaccaaccgcgcagaggtgtgccaattacatttcgcttttcgtgcatactatgcagggcgaatacgacagtcatctcccctggccgttccaaggcacgatacggttgacaatcctcgatcagagtgaagctcctgtgcgacaaaatcacgaggaaatcatggatgcaaagcccgagctactggcatttcaaaggcccacaatcccccgtaatcccaaggggtttggctacgttacgtttatgcatcttgaggccctgaggcagaggaccttcatcaaggacgacactctcctcgttagatgcgaagtttctacacgatttgatatggggagcttacgccgagagggcttccaacctagatccaccgacgcaggcgtctag

SEQ ID NO: 241705 - DNA, 1569 bp, Artificial Sequence
  derived and/or modified sequence
atgtctctgctcaactgtgagaattcttgtgggtccagtcaaagcgagtccgactgctgtgttgcgatggccagtagctgtagcgcagtgactaaggacgacagtgtgggtggaaccgcttcgaccgggaacctgagcagtagctttatggaggaaatacagggatatgacgtagaattcgatcctccactggagtccaaatacgagtgcccaatctgtctgatggctctgcgagaagccgtacagaccccctgtggccatcggttctgcaaggcatgtattatcaagtctatacgagacgccggtcataaatgccccgtggataacgaaatcctcctcgagaaccagctcttcccggacaacttcgccaagagggagattttgagcttaatggtaaaatgtcccaacgaaggatgtttgcataaaatggaattaaggcatctggaggatcaccaggcgcactgtgagttcgcactgatggattgcccacaatgtcagcgaccttttcagaagttccatattaacatccatatcttgaaagactgccccaggcgccaggtgtcttgcgacaattgcgccgcaagcatggcgtttgaagataaagagatacacgatcagaactgccctctggccaatgtgatctgtgagtactgcaatactatccttataagggagcagatgcctaaccattatgatctagactgtccaactgccccaatcccatgcactttctcaacatttggctgccacgagaaaatgcagaggaatcacttggctagacatctacaggagaatacccaatcccacatgcgtatgttggcccaggctgtgcacagcctgtctgtcattcccgattctggatacatctctgaagtgcgcaattttcaggaaacaattcaccagcttgagggaagactcgtcaggcaggatcatcagattcgcgagctaactgccaagatggagacccaatcaatgtatgtaagtgagctcaaacgtacaatcagaactctggaggacaaggttgcagaaatcgaggcacagcaatgcaacgggatctatatttggaaaattggaaattttggcatgcacttgaagtgtcaggaagaagaaaaaccggtcgtcattcatagtcctggattttatacggggaagcctggatacaaactttgtatgagattacacctgcagctcccaactgctcaaaggtgcgcaaattacattagcctatttgtccatactatgcaaggagagtacgattcccacctgccatggccttttcaggggaccatccgcctgacaatactggatcagtcggaggcgccagtgagacaaaatcatgaggagataatggatgcgaaaccagaactgctggcattccagcgtccaacaatcccccgtaatccgaagggttttggatatgtgactttcatgcacctggaggcgctgcgccaaagaacgtttataaaagatgacacacttctcgtgagatgtgaggttagtacaaggtttgacatgggatcgctccgacgagaggggttccagcctcgcagcaccgacgcgggagtctag

SEQ ID NO: 241706 - DNA, 1569 bp, Artificial Sequence
  derived and/or modified sequence
atgagcctactgaattgtgaaaatagctgcggatctagtcagtctgaatccgactgctgtgtggcaatggcttcatcgtgttcagctgtgactaaggacgactctgtcggtgggacggcttccacggggaatctctcctcttccttcatggaggagatccagggatacgacgtggaattcgacccaccactggagagcaaatatgagtgtcccatatgcttgatggctctgcgcgaggcagtgcagacgccatgtggccatcgattttgcaaagcctgcattatcaaatccatcagagatgcaggccataagtgcccagtggacaacgagatccttctggaaaatcaactgttcccagacaacttcgctaagagggagattctaagcctgatggtgaagtgccccaacgaaggctgcttgcacaagatggaactgcgacacttagaagaccaccaagctcactgtgagttcgctcttatggactgcccgcaatgtcagcgaccttttcagaagttccacattaacatccacattttaaaggattgtcccagaaggcaggtaagctgtgataactgtgccgctagcatggctttcgaagataaagaaatccatgatcaaaactgccccctggccaacgtgatttgcgagtactgtaacaccattttaataagagagcagatgccgaaccactatgatctagattgtcctacagctccaatcccttgcaccttttcaactttcggctgccatgaaaaaatgcaacggaaccacctggcccgacatctgcaggagaatacacagtcccacatgcggatgctggcccaagctgtgcacagcctgtccgtaattccagattctgggtacatttctgaggtgcgtaacttccaggagaccatccatcagcttgaggggcgacttgtgagacaagaccaccaaatacgagaactaaccgcaaagatggagactcaatcaatgtatgtgagcgagctcaaaagaactattaggaccttagaagacaaagtagcagagatagaggctcagcaatgtaacggtatatacatctggaaaatcggcaatttcggaatgcatctaaagtgtcaagaagaggagaagcccgttgtcatccactcccctgggttttacacaggcaagcctggctacaagctctgcatgcgactgcatcttcagcttccaactgcgcaacgctgtgccaactatatcagcttattcgtgcatacaatgcaaggggagtatgacagtcatctgccctggccgttccaggggactatacgtttgactatcctggaccagagcgaggcaccagttagacaaaaccacgaggagattatggacgcaaagcctgagctgctggccttccaacggcctactatacctcggaatccaaagggattcggatacgtgacctttatgcacttggaagccctaaggcaacgtacctttatcaaggatgacaccttgctggtgagatgtgaagtcagcacacggttcgatatgggaagtttgaggagggagggatttcaaccccgaagtacggacgccggagtgtag

SEQ ID NO: 241707 - DNA, 2558 bp, Artificial Sequence
  derived and/or modified sequence
gcagtggcgtccgcagctggggcttggcctgcgggcggccagcgaaggtggcgaaggctcccactggatccagagtttgccgtccaagcagcctcgtctcggcgcgcagtgtctgtgtccgtcctctaccagcgccttggctgagcggagtcgtgcggttggtgggggagccctgccctcctggttcggcctccccgcgcactagaacgatcatgaacttctgaagggacccagctttctttgtgtgctccaagtgatttgcacaaataataatatatatatttattgaaggagagaatcagagcaagtgataatcaagttactatgagtctgctaaactgtgaaaacagctgtggatccagccagtctgaaagtgactgctgtgtggccatggccagctcctgtagcgctgtaacaaaagatgatagtgtgggtggaactgccagcacggggaacctctccagctcatttatggaggagatccagggatatgatgtagagtttgacccacccctggaaagcaagtatgaatgccccatctgcttgatggcattacgagaagcagtgcaaacgccatgcggccataggttctgcaaagcctgcatcataaaatcaataagggatgcaggtcacaaatgtccagttgacaatgaaatactgctggaaaatcaactatttccagacaattttgcaaaacgtgagattctttctctgatggtgaaatgtccaaatgaaggttgtttgcacaagatggaactgagacatcttgaggatcatcaagcacattgtgagtttgctcttatggattgtccccaatgccagcgtcccttccaaaaattccatattaatattcacattctgaaggattgtccaaggagacaggtttcttgtgacaactgtgctgcatcaatggcatttgaagataaagagatccatgaccagaactgtcctttggcaaatgtcatctgtgaatactgcaatactatactcatcagagaacagatgcctaatcattatgatctagactgccctacagccccaattccatgcacattcagtacttttggttgccatgaaaagatgcagaggaatcacttggcacgccacctacaagagaacacccagtcacacatgagaatgttggcccaggctgttcatagtttgagcgttatacccgactctgggtatatctcagaggtccggaatttccaggaaactattcaccagttagagggtcgccttgtaagacaagaccatcaaatccgggagctgactgctaaaatggaaactcagagtatgtatgtaagtgagctcaaacgaaccattcgaacccttgaggacaaagttgctgaaatcgaagcacagcagtgcaatggaatttatatttggaagattggcaactttggaatgcatttgaaatgtcaagaagaggagaaacctgttgtgattcatagccctggattctacactggcaaacccgggtacaaactgtgcatgcgcttgcaccttcagttaccgactgctcagcgctgtgcaaactatatatccctttttgtccacacaatgcaaggagaatatgacagccacctcccttggcccttccagggtacaatacgccttacaattcttgatcagtctgaagcacctgtaaggcaaaaccacgaagagataatggatgccaaaccagagctgcttgctttccagcgacccacaatcccacggaacccaaaaggttttggctatgtaacttttatgcatctggaagccctaagacaaagaactttcattaaggatgacacattattagtgcgctgtgaggtctccacccgctttgacatgggtagccttcggagggagggttttcagccacgaagtactgatgcaggggtatagcttgccctcacttgctcaaaaacaactacctggagaaaacagtgcctttccttgccctgttctcaataacatgcaaacaaacaagccacgggaaatatgtaatatctactagtgagtgttgttagagaggtcacttactatttcttcctgttacaaatgatctgaggcagttttttcctgggaatccacacgttccatgctttttcagaaatgttaggcctgaagtgcctgtggcatgttgcagcagctattttgccagttagtatacctctttgttgtactttcttgggcttttgctctggtgtattttattgtcagaaagtccagactcaagagtactaaacttttaataataatggattttccttaaaacttcagtctttttgtagtattatatgtaatatattaaaagtgaaaatcactaccgccttgtgctagtgccctcgagaagagttattgctctagaaagttgagttctcatttttttaacctgttatagatttcagaggatttgaaccataatccttggaaaacttaagttctcattcaccccagtttttcctccaggttgttactaaggatattcagggatgagtttaaaccctaaatataaccttaattatttagtgtaaacatgtctgttgaataatacttgtttaagtgtt

SEQ ID NO: 241708 - DNA, 4627 bp, Artificial Sequence
  derived and/or modified sequence
agcagagaaggcggaagcagtggcgtccgcagctggggcttggcctgcgggcggccagcgaaggtggcgaaggctcccactggatccagagtttgccgtccaagcagcctcgtctcggcgcgcagtgtctgtgtccgtcctctaccagcgccttggctgagcggagtcgtgcggttggtgggggagccctgccctcctggttcggcctccccgcgcactagaacgagcaagtgataatcaagttactatgagtctgctaaactgtgaaaacagctgtggatccagccagtctgaaagtgactgctgtgtggccatggccagctcctgtagcgctgtaacaaaagatgatagtgtgggtggaactgccagcacggggaacctctccagctcatttatggaggagatccagggatatgatgtagagtttgacccacccctggaaagcaagtatgaatgccccatctgcttgatggcattacgagaagcagtgcaaacgccatgcggccataggttctgcaaagcctgcatcataaaatcaataagggatgcaggtcacaaatgtccagttgacaatgaaatactgctggaaaatcaactatttccagacaattttgcaaaacgtgagattctttctctgatggtgaaatgtccaaatgaaggttgtttgcacaagatggaactgagacatcttgaggatcatcaagcacattgtgagtttgctcttatggattgtccccaatgccagcgtcccttccaaaaattccatattaatattcacattctgaaggattgtccaaggagacaggtttcttgtgacaactgtgctgcatcaatggcatttgaagataaagagatccatgaccagaactgtcctttggcaaatgtcatctgtgaatactgcaatactatactcatcagagaacagatgcctaatcattatgatctagactgccctacagccccaattccatgcacattcagtacttttggttgccatgaaaagatgcagaggaatcacttggcacgccacctacaagagaacacccagtcacacatgagaatgttggcccaggctgttcatagtttgagcgttatacccgactctgggtatatctcagaggtccggaatttccaggaaactattcaccagttagagggtcgccttgtaagacaagaccatcaaatccgggagctgactgctaaaatggaaactcagagtatgtatgtaagtgagctcaaacgaaccattcgaacccttgaggacaaagttgctgaaatcgaagcacagcagtgcaatggaatttatatttggaagattggcaactttggaatgcatttgaaatgtcaagaagaggagaaacctgttgtgattcatagccctggattctacactggcaaacccgggtacaaactgtgcatgcgcttgcaccttcagttaccgactgctcagcgctgtgcaaactatatatccctttttgtccacacaatgcaaggagaatatgacagccacctcccttggcccttccagggtacaatacgccttacaattcttgatcagtctgaagcacctgtaaggcaaaaccacgaagagataatggatgccaaaccagagctgcttgctttccagcgacccacaatcccacggaacccaaaaggttttggctatgtaacttttatgcatctggaagccctaagacaaagaactttcattaaggatgacacattattagtgcgctgtgaggtctccacccgctttgacatgggtagccttcggagggagggttttcagccacgaagtactgatgcaggggtatagcttgccctcacttgctcaaaaacaactacctggagaaaacagtgcctttccttgccctgttctcaataacatgcaaacaaacaagccacgggaaatatgtaatatctactagtgagtgttgttagagaggtcacttactatttcttcctgttacaaatgatctgaggcagttttttcctgggaatccacacgttccatgctttttcagaaatgttaggcctgaagtgcctgtggcatgttgcagcagctattttgccagttagtatacctctttgttgtactttcttgggcttttgctctggtgtattttattgtcagaaagtccagactcaagagtactaaacttttaataataatggattttccttaaaacttcagtctttttgtagtattatatgtaatatattaaaagtgaaaatcactaccgccttgtgctagtgccctcgagaagagttattgctctagaaagttgagttctcatttttttaacctgttatagatttcagaggatttgaaccataatccttggaaaacttaagttctcattcaccccagtttttcctccaggttgttactaaggatattcagggatgagtttaaaccctaaatataaccttaattatttagtgtaaacatgtctgttgaataatacttgtttaagtgttccttctgccttgcttacttatttccttgaggttacgaagtagcatcttccccagagtttataatgctgagaaccacgtggataccaactgctcattgttatgctatgtaaccctttttgtctattcagtgcagagtgaatttcacagctctgcatatgtcttcatttgtttaatgcttacaagacaggagatgcacacatacaatcagcaacataaaaattaaaagtgacccaagtagtcagcgcatgtggcatctcattggtggtgacagaagctatgtgagccagaagttttcagctcttttgaataccctctggtttatttcgattaaaaagaacaaaattgatttcctaaaatcagaattttttaaaacttgggagatgattggagatacctaggaggtcaccaaactaggattagaagtcacagtggttgtatcacaacttagcttgagtatgttgctgtagcctaacaactgcaggttctgagaaggatcctgtagaatcctggaagtaaccagattttcctaatagggagatgatttttttgtgtgccatcatgtatttgttaaaggcctatatatagatataaaatatcgtggaatctagttctcagggagacccgcaactagtataagcttataaaggatctaaagatccatccaccatttaaagttgtctggtaatgagagatgacattgtatcccccagagaggccaaatcagagtcgccagccagcgttctagatcagccttaatttcaagagaaagccaaggacctcatctgcaggggagtgtggttttcagccccagcgagtgtcactttgaactttccctttgcttttttctctcttctccctccccacccacccttaggctcctgatctggtgagtttgttatggagtgaaaataaaagtcaagcagagaccttgtttcccgtgccaccattagtaccacaagctcatggctagttaccacattacttcctggcagtttgtgtccctcagctgtgccttccaaccagcgcctgagaatcactgcataccaccctctaggtagggaaacctacactgctgctgttcctgtgattattttacaatgaataaataattgtcaagttccatttaaaaactgaacagtagtatttttgtatttgcgtagaaaaagcctgaaggaaatatactaaactttttgttggcttattttcctttgcgcttgcttatattttttacattttctacaataaatgtgtacttttatcggagaaaaaaattaaatgttgccacaaaacatttaatctccacgcccccagctcaaaaaaggaaatgatatttaaaagcttcctggtcagatttctattaaaagcactggctgtgcattagatacaaagaggagtcatttcctgccttggtgatactatttttttctactaactcaagagtctttattaaaaaaaaaagttgttttgcctaatttcagcttttagcaagcttcccatctgtaaaatgatttggaccagatatttctagagtcccctccagccataacattctgtctcaaattaagttccaaccagcagaacaatgacaatacttaggaaagtattttgccagtataaaatgtctttaacttactctttgctgacactgatactttcctctaatttagtgtctatcagctgggtcacatcttaagtaaaatgagcaattttaacccccaacatttggcattttgtcataaaccagccagttattttatgctggtcattcatcttgactacaaagtagaatagtcaagctgtcattccaaatagaaaactttttacttcaatcagaattaagccttaacctggaaagttggtttcttccttacattttcccaatctcctactctattcttaaacatgctagtttcactcagttgggtatacaagcctttgggctttatgttgtatgttactaaccaccttttaccatatttatcttttggcatcattctgggacattgctaaattaaaaaagaaattgtttccacttttttctggagatgttcaactaaaggttgttttgttttgttttttgttttgagacagtctcaccctgacgctcaggctggagtgcagtggtgcaacctcggctcactgcaac

SEQ ID NO: 241709 - protein, 118 aa, Artificial Sequence
  derived and/or modified sequence
MCDKEFMWALKNGDLDEVKDYVAKGEDVNRTLEGGRKPLHYAADCGQLEILEFLLLKGADINAPDKHHITPLLSAVYEGHVSCVKLLLSKGADKTVKGPDGLTAFEATDNQAIKALLQ

SEQ ID NO: 241710 - DNA, 357 bp, Artificial Sequence
  derived and/or modified sequence
atgtgtgataaagaatttatgtgggcgctgaagaatggagacttagatgaggtgaaggattatgttgccaagggagaggacgtgaaccggacactcgagggaggtcgcaagccactgcactacgccgcggactgtggacaattagagattcttgaattcctcctgttaaaaggcgctgacatcaacgctcctgacaagcatcacataacacccctgctgtccgccgtgtatgagggtcatgttagctgtgttaaattgctattatcaaagggggctgataagaccgttaaggggccggatggactaaccgcattcgaggcaacagacaatcaggcaattaaagctctgcttcagtag

SEQ ID NO: 241711 - DNA, 357 bp, Artificial Sequence
  derived and/or modified sequence
atgtgtgacaaggagttcatgtgggccctgaagaatggagacctggatgaggtgaaggactatgtggccaagggggaggatgtgaacagaaccctggagggcggcaggaagcccctgcactacgccgctgactgtggccagctggagatcctggagttcctgctgctgaagggagctgacatcaatgccccagacaagcaccacatcacccccctgctgtctgctgtgtatgagggccacgtgtcctgtgtgaagctgctgctgagcaaaggagctgacaagacagtgaagggcccagatggcctgacagcctttgaggccacagacaaccaggccatcaaggccctgctgcagtag

SEQ ID NO: 241712 - DNA, 3738 bp, Artificial Sequence
  derived and/or modified sequence
ctgctgggcccggtggccgcaaaagaactttctttctcccgcccgaacggtcgccgcggccaactgcctcgcccgcctggcagcctaaccctccttctcttcttctcctctccggcttcgcgcggccctgcctccctctcgcccggcggcatccgcttgctgctgccaccgcctcctcatcttctgcccggccaaccggcctgccccgctgcagtgatgtgcgacaaggagttcatgtgggccctgaaaaacggagacttggatgaggtgaaagactatgtggccaagggagaagatgtcaaccggacactagaaggtggaaggaaacctcttcattatgcagcagattgtgggcagcttgaaatcctggaatttctgctgctgaaaggagcagatattaatgctccagataaacatcatattactcctcttctgtctgctgtctatgagggtcatgtttcctgtgtgaaattgcttctgtcaaagggtgctgataagactgtgaaaggcccagatggactgaccgcctttgaagccactgacaaccaggcaatcaaagctcttctccagtgatggatggatggactgataactccggaagaatgactctcctgtggcctcacactgctgcctgtctgtctgtcactctctatctgccagcttcttcagctaaatactttaagaggggtgaggggagagagaaattcataacaaatccgactaccagaaaaaaaaaattgttttggaggaggggcaaaaggaaccatgatcaggcttttactgggattcctgatcaagtaagcctcttccctttctaataaaatatacaccttatacccaagggagagcaaagacaaaatacaccagtaacatttgaccttttcagctccctagctaatttattagattgtgttgaaggtctgattctacaaaggccaactctacatatttggtagccctaactgtctgagcagtagtggctgctgtgatgtaaacttagggtgctgagataagcaattagctctagccttctgccttaagaatgcactctactggggatttcctggcatagttaagagcgctgcctataaggttggtgaccaaatctttcctcggtgactttaagctttatgtgaaagcttagttaaggtgaggaggggcacactcctaaattgctggatgactgaactttggattttctctcccctttcacatggatttcatgtctctttagataaaactgactagttttatttataaaatcttaagttttggaagtctaaaggagaaaccattccagtatgcatatttttttctcctctagattcatacatttatatagcattgaaacactttcaaactcctgctggtagtaaaaggggatttaaaaatagaatcatagccataagcctgttagtatcatatgaagagagaacagttatcttagtacctatggattttctttatttgctgtttgaatggattgaccttggttatgtgttgagaattaaggaacattctttgaaatgcctctctcagacccatcttggaggctgattacttactgcaccaaagctatcactggggtgagatttactgtttggacaaatttagccccatcccttcaaaaatacacttgtaaccaggtttcccagagttgttgataggcttctgctgaacatatgccaacccacctgcataatatatttttgttgcttttataaatcatgcattacataaagtgtgacaacttcaaaatgtattctctgttcttggaatacagtgccctaaaatggtgttcttatgacctgcagaaaatatttacacatatttccaaatatttatttcatgagcagtacagctaattaaaatatataagcttaaattttatatcttacatttaaaatattaagattcctttgacttgccatccatataagcttgctaaaaatattaagaccaagtcatgcaataattgaatgtacctcaaatttttaggggagggtgggttagggactgatactcagattgtggataataattgaattggtttttaaaggcaacatagcattctacagcagggttaatctattatcaagaacagtcaccctggttaataacaagttttactgatcagttgctggttggttggttggttggcatgtgggtgtgtgggtgtataggtgtgtgtgggtgtgtgtgtgtatttttccccatgagtcctttttttaatcctgtggctttttcacttacaactagcctaaccctgtaattttcctacatccaagaaaacaatcacaaagtagtggtttaaatactttgttgtatttggctaattttgctgtcttaatgcagcctattaagagttgggttaaaaatcagtaatcagtactttattacatcactgaactaaaatatggagacatcctcattgaaaatggagggcactctatcagtctataactatcaacgtagtgcaacagggtgttttgatacctttgttttcacctcttgacataatgctatttaaaggcttgaatttttccctttatataattttcacctttactttcaaagtgttttgttgtagttggctattgcagagagtgcattgtcctatcattcctaaacctggtctgctttctacattcatggtatggaaaccatgtgattctttgtacagtttatcctgatgttgcttgtaatgcagtagaggctatttcgccttcgcttttctttctcgacctttttgtaaaccctataattatgaagcgattgcttgagaaaataacatataaacatagaatagaatagactgaccaagatggttcacagtttctttttttaactaggttatttataatgtatttctgaaccacttggcagacaaattcacaacacttaatgttcatattttgagtaaaggaagctaaaaccatgtttgctttctggtactacatgcattagcgaaaggttaagtaagttttgttctccactgaagtaatacttaacatctcagaaaaaattttgcatgttctgtagttttgtattaaatcagtcatttcatatgcactatatcaagtacaaacaggtagtttacctgtttatagtagtgtactaacaaagtctcccttgcagcttcagactgttatctataggcttatcgttcaaatacagcacttgaatatcccaagtagttcttctacgcatagctcacctttctaaacccagttaagcatggaagagaggtagtaggtaggtgcagtgtgtggaagctgcaaacaagtaggccttttattcattgatatcttttcccaagtactggattttaaatctgtatgtatctgtttgatttttttttctaatatttcagttgagctgctgttttcttccatgcaatattgtatactcaattgtgtatagaagaagctggtgagagtgccctcctacataaataagcaattgcagtgttttgcatgcaaaatataaaaaatttaaattgtcctgattctattttgtaaatggagaaacaatcatatctttctaagcggtaatggaggaagactagtgctttgtgcattttgatatatttgagttcattttttccacaatgtcatacttttgacgcagttgggtttctcataagtatcctagttcatgtacatccgaatgctaaataatactgtgttttaagttttgtgttgcaagaacaaatggaataaacttgaattgtgctac

SEQ ID NO: 241713 - DNA, 357 bp, Artificial Sequence
  derived and/or modified sequence
atgtgcgacaaggagttcatgtgggccctgaagaacggcgacctggacgaggtcaaggattatgtggctaagggagaagacgttaatcgcaccctggagggaggccggaagcctcttcactacgctgccgactgcggtcaactcgagattcttgagttccttctgctgaaaggcgccgacatcaacgcccccgataaacaccacataacgcccctgctcagcgccgtgtatgaaggtcatgtgtcctgtgtaaaactcctgttaagtaagggagccgacaaaactgtgaagggcccagatgggctgactgcgttcgaggcaactgacaaccaggcaattaaagcccttctccaatag

SEQ ID NO: 241714 - DNA, 357 bp, Artificial Sequence
  derived and/or modified sequence
atgtgcgacaaggaattcatgtgggctctgaagaatggcgatcttgacgaggtgaaggattacgtcgcgaagggggaggacgttaatcgaaccttggaaggaggaagaaagccactgcactacgctgccgattgtggccagttagagattctagagtttttgctgctgaaaggggcagacattaatgcaccagacaagcaccatataacccctctactcagcgccgtgtatgaaggccatgtgtcctgcgtgaaactactactgtctaaaggggcagacaagacagtgaagggtccagacgggctaaccgcctttgaggccacggacaatcaggccatcaaagccctgctgcagtag

SEQ ID NO: 241715 - DNA, 357 bp, Artificial Sequence
  derived and/or modified sequence
atgtgcgacaaggagttcatgtgggccctgaagaacggcgacctggacgaggtgaaggactacgtggccaagggcgaggacgtgaacagaaccctggagggcggcagaaagcccctgcactacgccgccgactgcggccagctggagatcctggagttcctgctgctgaagggcgccgacatcaacgcccccgacaagcaccacatcacccccctgctgagcgccgtgtacgagggccacgtgagctgcgtgaagctgctgctgagcaagggcgccgacaagaccgtgaagggccccgacggcctgaccgccttcgaggccaccgacaaccaggccatcaaggccctgctgcagtag

SEQ ID NO: 241716 - protein, 371 aa, Artificial Sequence
  derived and/or modified sequence
MDARRVPQKDLRVKKNLKKFRYVKLISMETSSSSDDSCDSFASDNFANTRLQSVREGCRTRSQCRHSGPLRVAMKFPARSTRGATNKKAESRQPSENSVTDSNSDSEDESGMNFLEKRALNIKQNKAMLAKLMSELESFPGSFRGRHPLPGSDSQSRRPRRRTFPGVASRRNPERRARPLTRSRSRILGSLDALPMEEEEEEDKYMLVRKRKTVDGYMNEDDLPRSRRSRSSVTLPHIIRPVEEITEEELENVCSNSREKIYNRSLGSTCHQCRQKTIDTKTNCRNPDCWGVRGQFCGPCLRNRYGEEVRDALLDPNWHCPPCRGICNCSFCRQRDGRCATGVLVYLAKYHGFGNVHAYLKSLKQEFEMQA

SEQ ID NO: 241717 - protein, 321 aa, Artificial Sequence
  derived and/or modified sequence
MDARRVPQKDLRVKKNLKKFRYVKLISMETSSSSDDSCDSFASDNFANTRLQSVREGCRTRSQCRHSGPLRVAMKFPARSTRGATNKKAESRQPSENSVTDSNSDSEDESGMNFLEKRALNIKQNKAMLAKLMSELESFPGSFRGRHPLPGSDSQSRRPRRRTFPGVASRRNPERRARPLTRSRSRILGSLDALPMEEEEEEDKYMLVRKRKTVDGYMNEDDLPRSRRSRSSVTLPHIIRPVEEITEEELENVCSNSREKIYNRSLNWHCPPCRGICNCSFCRQRDGRCATGVLVYLAKYHGFGNVHAYLKSLKQEFEMQA

SEQ ID NO: 241718 - DNA, 1116 bp, Artificial Sequence
  derived and/or modified sequence
atggatgctaggcgcgtaccccaaaaggacttgagagtcaagaaaaacctgaaaaagttcagatatgtcaaactaatcagcatggagacctcgtcaagcagcgacgattcatgtgatagtttcgcatccgacaatttcgctaacacaagactgcagagtgtccgggagggttgtagaacccggagccagtgccggcacagtggccctctcagggtggctatgaaattccctgcgcggtctacgagaggggccaccaacaaaaaggccgaatcgaggcaaccaagtgagaatagtgtgactgattccaattccgacagtgaagatgagagcgggatgaacttcttggaaaagagggccctcaacatcaagcagaataaggcgatgctcgcgaagctgatgtccgaactcgagagcttccctggttcattcagagggaggcaccccttgccgggaagtgatagtcaaagtaggcgcccacgacgccgtacatttcctggagtagcaagccgtagaaatcccgaaaggcgagcacgtccactaacaaggagcaggagccgcattttgggctcacttgatgcactccccatggaggaagaggaggaagaggacaaatatatgcttgtgcggaagcggaaaacggttgacggctatatgaacgaagatgacttaccacggagtcgccgttctagaagcagcgtaacacttccccatatcattcggcccgttgaggaaatcacagaagaagaactggagaatgtgtgcagtaatagccgcgagaagatttataaccggagcctcgggtccacatgccaccaatgtagacaaaaaacgatcgatacaaaaaccaactgcaggaatcccgattgttggggagtccgaggtcagttctgtgggccttgcctgcgaaaccggtatggcgaggaggtgcgcgatgccttactcgatccaaattggcactgtcctccttgtaggggcatatgcaactgctccttttgtagacagcgcgatggccgctgcgccaccggtgttttggtataccttgccaagtaccatggctttgggaacgttcacgcctatctgaagagcctgaaacaggagttcgaaatgcaggcatag

SEQ ID NO: 241719 - DNA, 966 bp, Artificial Sequence
  derived and/or modified sequence
atggacgctaggcgggtcccccagaaggaccttcgcgtcaagaaaaacctcaagaaatttcgttacgtaaagctcatatcaatggagaccagttcctcctccgatgactcttgcgactcctttgcttccgataatttcgcaaacacaagactgcagtcggtccgcgaaggctgcagaacccgatcacagtgccggcacagcggccccctccgggtggctatgaaatttcctgcccggtccacacggggggcaactaacaaaaaagcagaatcaaggcagccatctgaaaactccgttaccgactctaacagcgactcagaagatgagtccggtatgaatttcttagagaagagggccctgaacattaagcagaataaagctatgttagcaaagctcatgtccgagcttgagtcgttccccgggtcatttaggggacgtcatcctctccccggttctgactcccaatcccggcgtccacgcagacggactttccctggcgtcgcttccaggaggaatccagagaggcgggctcggccactgacgaggagtcggtcccgcatcctggggtcactggatgctctgccaatggaggaagaagaagaggaagataagtacatgctggtgcggaaacggaagaccgtggacggatacatgaacgaggatgatctcccacggagccggcggtctcggagcagtgtgacactccctcatataattcggccggtggaggagatcaccgaggaggaacttgaaaatgtctgcagcaattccagagaaaagatctataatagatccctcaactggcactgtccaccatgtcgtggcatctgtaactgtagcttctgccggcagcgggatggaaggtgcgcaactggcgtgctcgtttacctggcaaagtatcacgggtttgggaacgtgcacgcttatctcaagagcctcaagcaggagtttgaaatgcaggcctag

SEQ ID NO: 241720 - DNA, 1116 bp, Artificial Sequence
  derived and/or modified sequence
atggatgcccggcgggtgccccagaaggacctgcgggtgaagaagaacctgaagaagttccgctacgtgaagctgatctccatggagaccagcagcagcagtgatgacagctgtgacagctttgccagtgacaactttgccaacacccggctgcagagcgtgcgggagggctgcaggaccaggagccagtgccgccacagcggccccctgcgggtggccatgaagtttcctgcccggagcaccaggggggccaccaacaagaaggccgagagccggcagcccagcgagaacagcgtgacagacagcaacagcgacagtgaagatgagagcggcatgaacttcctggagaagagggccctgaacatcaagcagaacaaggccatgctggccaagctgatgtctgagctggagagcttccctggcagcttccggggccgccaccccctgcccggcagtgacagccagagcagaagacccaggaggaggaccttccctggggtggccagcagaagaaatcctgagcggcgggcccggcccctgaccaggagccgcagccgcatcctgggcagcctggatgccctgcccatggaggaggaggaggaggaggacaagtacatgctggtgaggaagaggaagacagtggatggctacatgaatgaagatgacctgcccaggagcagaagaagccgcagctctgtgaccctgccccacatcatccggcctgtggaggagatcacagaggaggagctggagaatgtgtgcagcaacagccgggagaagatctacaacagaagcctgggcagcacctgccaccagtgccggcagaagaccatcgacaccaagaccaactgcagaaatccagactgctggggcgtgcggggccagttctgtggcccctgcctgaggaacagatatggagaggaggtgagagatgccctgctggaccccaactggcactgccccccctgccggggcatctgcaactgcagcttctgccggcagagagatggccgctgtgccactggagtgctggtgtacctggccaagtaccacggctttggaaatgtgcacgcctacctgaagagcctgaagcaggagtttgagatgcaggcctag

SEQ ID NO: 241721 - DNA, 966 bp, Artificial Sequence
  derived and/or modified sequence
atggatgcccggcgggtgccccagaaggacctgcgggtgaagaagaacctgaagaagttccgctacgtgaagctgatctccatggagaccagcagcagcagtgatgacagctgtgacagctttgccagtgacaactttgccaacacccggctgcagagcgtgcgggagggctgcaggaccaggagccagtgccgccacagcggccccctgcgggtggccatgaagtttcctgcccggagcaccaggggggccaccaacaagaaggccgagagccggcagcccagcgagaacagcgtgacagacagcaacagcgacagtgaagatgagagcggcatgaacttcctggagaagagggccctgaacatcaagcagaacaaggccatgctggccaagctgatgtctgagctggagagcttccctggcagcttccggggccgccaccccctgcccggcagtgacagccagagcagaagacccaggaggaggaccttccctggggtggccagcagaagaaatcctgagcggcgggcccggcccctgaccaggagccgcagccgcatcctgggcagcctggatgccctgcccatggaggaggaggaggaggaggacaagtacatgctggtgaggaagaggaagacagtggatggctacatgaatgaagatgacctgcccaggagcagaagaagccgcagctctgtgaccctgccccacatcatccggcctgtggaggagatcacagaggaggagctggagaatgtgtgcagcaacagccgggagaagatctacaacagaagcctgaactggcactgccccccctgccggggcatctgcaactgcagcttctgccggcagagagatggccgctgtgccactggagtgctggtgtacctggccaagtaccacggctttggaaatgtgcacgcctacctgaagagcctgaagcaggagtttgagatgcaggcctag

SEQ ID NO: 241722 - DNA, 1116 bp, Artificial Sequence
  derived and/or modified sequence
atggacgcccggcgggtgccccagaaggacctgcgggtgaagaagaatctgaaaaagttcaggtacgttaagctgatctcaatggagaccagcagtagctcagacgacagttgcgactccttcgcatcggacaattttgctaacactagacttcagtctgtgcgagagggctgtcgtactaggtctcagtgccgccactccgggcctctgcgggttgctatgaagtttcctgcgcgctctaccaggggggccaccaataagaaggcggagagcaggcaaccatctgaaaatagtgtgaccgactcaaactctgactctgaagacgaaagtggcatgaacttcctggaaaaaagggcgctgaatataaagcagaataaggctatgctggctaagttgatgagcgagttggagagctttccgggctcatttcgtggtcggcacccactccccgggagcgactctcaatctcgaaggccccgccgacgcacctttcccggagtggcaagcaggcgcaaccccgagcgccgggcccgacctctaaccagatccaggtctcgaatactgggctccctggacgcccttcctatggaggaagaagaggaagaggacaaatatatgctggtgagaaaaaggaagaccgtggatggctacatgaatgaggacgatcttcctagaagtcgcagaagtagatcctccgttacactcccccacatcattcggccagtcgaagagataacagaggaggaactggagaacgtttgtagcaatagcagagagaaaatttacaatcggtcactaggaagtacctgtcaccagtgtaggcagaagacaatagatacgaaaactaattgcagaaaccccgattgctggggtgttcgggggcagttctgtgggccctgcctgagaaaccggtacggtgaggaggttagagatgctctgttagatcccaattggcactgcccaccctgccggggaatctgcaattgcagcttctgcagacagagagacggacggtgtgcaacaggagtcctagtgtatctggccaagtatcacggcttcggaaatgttcatgcatatctcaagtccctgaagcaggagttcgagatgcaggcttag

SEQ ID NO: 241723 - DNA, 966 bp, Artificial Sequence
  derived and/or modified sequence
atggacgcccggcgggtgccccagaaggacctgcgggtgaagaagaatctgaaaaagtttcgatatgtcaagctcatcagcatggagacctcctcatctagcgacgattcctgcgactccttcgcctccgataattttgccaacacacggctgcagagcgttagggaggggtgtaggactcgctcacagtgtagacactccgggcccctccgcgtggctatgaaatttccggccagatctaccagaggcgcaaccaataagaaggccgagagcagacagccctccgaaaattctgtgactgactctaatagcgatagcgaagacgaatccggcatgaatttccttgagaagcgcgcactgaacataaagcagaacaaggccatgctagcaaagttaatgagtgaactggaatcctttccaggatcttttcgcggccggcatcccctgcctgggtccgacagtcagtctcggcggcctagacggaggacctttccaggggtggctagccggcgcaatcccgagcgtcgggcccgcccactcaccaggtcgaggtctcggatcctgggctctctcgacgcgctgcctatggaagaggaggaagaggaggataaatatatgttggtgagaaagaggaagaccgtggatggctatatgaacgaggatgacttgccacgttctaggaggtcgcgcagcagcgttacccttcctcacattattagaccagtggaagagattacagaggaggaacttgagaacgtatgtagcaattcaagggaaaagatctataatcgctctcttaactggcactgtccaccatgtcgagggatctgcaattgtagcttctgtaggcaacgagatggtcggtgcgcaactggtgtcctcgtgtacctggccaaataccacggtttcggaaatgtccatgcgtatctcaaatccctcaaacaggaattcgaaatgcaagcgtag

SEQ ID NO: 241724 - DNA, 1116 bp, Artificial Sequence
  derived and/or modified sequence
atggatgccagaagggtccctcagaaggacctgcgcgttaagaagaacctgaagaagttccggtatgtgaagcttatatccatggagacaagtagctcatcagacgattcctgcgacagttttgcatcagataactttgccaacacccgtctccaaagcgtgcgggaagggtgtcggacgcggagtcagtgcaggcattccggcccactgcgcgttgccatgaaatttcctgccaggtcaaccagaggcgctacaaacaagaaggcagaatcccgccagccatctgaaaactcagtgaccgactccaacagtgacagtgaggatgagtcgggaatgaacttcctcgagaagcgtgcactcaacatcaagcaaaataaggccatgctcgccaaactaatgtccgagctggaatcatttcctggctcatttagagggaggcatcctctgcccggttccgacagccagagtagacgccctcggagacggaccttcccaggcgttgcctcccgtcgcaaccccgagaggcgggctcgtcccctaaccagatcccggtctcgcattttaggaagccttgacgcgttgcctatggaagaggaggaggaggaggataagtacatgttggtacgcaagagaaagacggttgacggctatatgaatgaggacgatctgccccgaagtcgtagatctcggtcttccgtcactctgcctcacatcattcggcctgtggaggaaataacagaagaagaactggaaaacgtgtgtagtaatagtagagagaaaatatataatcgctctttgggctccacatgccatcagtgccggcagaaaactattgacacaaagactaactgtagaaaccctgattgctggggtgtccggggtcagttctgcggtccttgtctaaggaatcggtatggggaggaggtccgtgatgcacttctggacccaaattggcattgtccgccatgccgcggaatttgtaactgctcattctgcagacagcgcgatgggcgttgtgccaccggcgtgctggtgtacctggcaaagtatcacggttttggaaacgtccatgcctacttaaaatctctcaagcaggagttcgagatgcaagcctag

SEQ ID NO: 241725 - DNA, 966 bp, Artificial Sequence
  derived and/or modified sequence
atggatgcgcgtagggtgccacaaaaggatcttagagtgaaaaaaaatttgaaaaagttccggtacgtcaagctgatttcaatggagacatccagctcctccgacgactcctgtgattcttttgccagtgacaatttcgccaatactcgattgcaatcggtgcgcgagggatgtcgcacccgctctcaatgtaggcatagcgggccactgcgtgtcgcaatgaagtttcccgcacgtagtacaagaggagcaacaaataagaaagcagaatcacggcagccctcagagaatagcgtaactgactccaatagtgactctgaagatgagtccggcatgaacttcctggagaaacgggcacttaacatcaaacaaaataaagccatgctagccaagttaatgtctgagctcgagagtttcccgggaagttttcggggtagacatcctctacccggaagcgacagccaaagtagacggccaagaagacgcacctttcccggtgtggcaagtcgacgtaatcccgaaagacgcgctcggcctctgacacgctcccgttcacgcatcctaggcagcctagacgctcttcctatggaagaggaggaggaggaagacaagtatatgctggtgcggaagagaaaaactgtggatggctacatgaacgaagatgatctaccaagaagccgtcgatcccgaagctcagtaaccctgccgcatattatacggccagtcgaagaaatcaccgaggaagagttggaaaacgtgtgcagtaattcaagagagaaaatctataaccggtctctgaattggcactgccccccttgcagagggatctgtaattgtagtttttgccgccagcgcgacggccgatgcgctaccggcgtgctggtctacctagccaagtaccatggctttggcaacgtgcatgcttaccttaagtctctcaaacaagaatttgagatgcaggcatag

SEQ ID NO: 241726 - DNA, 2500 bp, Artificial Sequence
  derived and/or modified sequence
cccgagccccgcccctccgggcccgggtcggcgcgcccagcctgccagccgcgctgctgctgctcctcctgctgtgggaccgctgaccgcgcggctgctccgctctccccgctccaagcgccgatctgggcacccgccaccagcatggacgctcgccgcgtgccgcagaaagatctcagagtaaagaagaacttaaagaaattcagatatgtgaagttgatttccatggaaacctcgtcatcctctgatgacagttgtgacagctttgcttctgataattttgcaaacacgaggctgcagtcagttcgggaaggctgtaggacccgcagccagtgcaggcactctggacctctcagggtggcgatgaagtttccagcgcggagtaccaggggagcaaccaacaaaaaagcagagtcccgccagccctcagagaattctgtgactgattccaactccgattcagaagatgaaagtggaatgaattttttggagaaaagggctttaaatataaagcaaaacaaagcaatgcttgcaaaactcatgtctgaattagaaagcttccctggctcgttccgtggaagacatcccctcccaggctccgactcacaatcaaggagaccgcgaaggcgtacattcccgggtgttgcttccaggagaaaccctgaacggagagctcgtcctcttaccaggtcaaggtcccggatcctcgggtcccttgacgctctacccatggaggaggaggaggaagaggataagtacatgttggtgagaaagaggaagaccgtggatggctacatgaatgaagatgacctgcccagaagccgtcgctccagatcatccgtgacccttccgcatataattcgcccagtggaagaaattacagaggaggagttggagaacgtctgcagcaattctcgagagaagatatataaccgttcactgggctctacttgtcatcaatgccgtcagaagactattgataccaaaacaaactgcagaaacccagactgctggggcgttcgaggccagttctgtggcccctgccttcgaaaccgttatggtgaagaggtcagggatgctctgctggatccgaactggcattgcccgccttgtcgaggaatctgcaactgcagtttctgccggcagcgagatggacggtgtgcgactggggtccttgtgtatttagccaaatatcatggctttgggaatgtgcatgcctacttgaaaagcctgaaacaggaatttgaaatgcaagcataatatctggaaaatttgctgcctgccttctacttctcaaatctttcttgtaaaagtttccaattttttcactgaaacctgagttaaaaatcttgatgatcagcctgtttcataagaaactccaatcaagttaatcttagcagacatgtgtttctggagcatcacagaaggtatattgctagttacactttgccctcctgcagtttcttctctgctcccaacccccatctcacagcatccccctctatttccaatgctcctctccaaccgcttagtttctgaatttcttttaaattacagttttatgaaagcatattttatttacttggtgttgaaatagccctcataaaacctaagcacttggaaacacaataatagtattaactaactagatctattgaatttcagagaagagccttctaacttgtttacacaaaaacgagtatgatttagcattcatactagttgaaatttttaatagaatcaaggcacaaaagtcttaaaaccatgtggaaaaattaggtaattattgcagattgatgtctctcaatcccatgtattgcgcttatgttacaagttgttgtcacagttgagacttaatttctcctaatttcttctgcccgaagggtaagtggtgcgtccagcttacacaatcataattcaaaggttggtgggcaatgtaatacttaattaaaataatgatggaagagctatctggagattatgagtaagctgatttgaattttcagtataaaactttagtataattgtagtttgcaaagtttatttcagttcacatgtaaggtattgcaaataaattcttggacaattttgtatggaaacttgatattaaaaactagtctgtggttctttgcagtttcttgtaaatttataaaccaggcacaaggttcaagtttagattttaagcacttttataacaatgataagtgcctttttggagatgtaacttttagcagtttgttaacctgacatctctgccagtctagtttctgggcaggtttcctgtgtcagtattccccctcctctttgcattaatcaaggtatttggtagaggtggaatctaagtgtttgtatgtccaatttacttgcatatgtaaaccattgctgtgccattcaatgtttgatgcataattggaccttgaatcgataagtgtaaatacagcttttgatctgtaatgcttttatacaaaagtttattttaataataaaatgtttgttctaa

SEQ ID NO: 241727 - DNA, 2405 bp, Artificial Sequence
  derived and/or modified sequence
gcgcccagcctgccagccgcgctgctgctgctcctcctgctgtgggaccgctgaccgcgcggctgctccgctctccccgctccaagcgccgatctgggcacccgccaccagcatggacgctcgccgcgtgccgcagaaagatctcagagtaaagaagaacttaaagaaattcagatatgtgaagttgatttccatggaaacctcgtcatcctctgatgacagttgtgacagctttgcttctgataattttgcaaacacgaggctgcagtcagttcgggaaggctgtaggacccgcagccagtgcaggcactctggacctctcagggtggcgatgaagtttccagcgcggagtaccaggggagcaaccaacaaaaaagcagagtcccgccagccctcagagaattctgtgactgattccaactccgattcagaagatgaaagtggaatgaattttttggagaaaagggctttaaatataaagcaaaacaaagcaatgcttgcaaaactcatgtctgaattagaaagcttccctggctcgttccgtggaagacatcccctcccaggctccgactcacaatcaaggagaccgcgaaggcgtacattcccgggtgttgcttccaggagaaaccctgaacggagagctcgtcctcttaccaggtcaaggtcccggatcctcgggtcccttgacgctctacccatggaggaggaggaggaagaggataagtacatgttggtgagaaagaggaagaccgtggatggctacatgaatgaagatgacctgcccagaagccgtcgctccagatcatccgtgacccttccgcatataattcgcccagtggaagaaattacagaggaggagttggagaacgtctgcagcaattctcgagagaagatatataaccgttcactgaactggcattgcccgccttgtcgaggaatctgcaactgcagtttctgccggcagcgagatggacggtgtgcgactggggtccttgtgtatttagccaaatatcatggctttgggaatgtgcatgcctacttgaaaagcctgaaacaggaatttgaaatgcaagcataatatctggaaaatttgctgcctgccttctacttctcaaatctttcttgtaaaagtttccaattttttcactgaaacctgagttaaaaatcttgatgatcagcctgtttcataagaaactccaatcaagttaatcttagcagacatgtgtttctggagcatcacagaaggtatattgctagttacactttgccctcctgcagtttcttctctgctcccaacccccatctcacagcatccccctctatttccaatgctcctctccaaccgcttagtttctgaatttcttttaaattacagttttatgaaagcatattttatttacttggtgttgaaatagccctcataaaacctaagcacttggaaacacaataatagtattaactaactagatctattgaatttcagagaagagccttctaacttgtttacacaaaaacgagtatgatttagcattcatactagttgaaatttttaatagaatcaaggcacaaaagtcttaaaaccatgtggaaaaattaggtaattattgcagattgatgtctctcaatcccatgtattgcgcttatgttacaagttgttgtcacagttgagacttaatttctcctaatttcttctgcccgaagggtaagtggtgcgtccagcttacacaatcataattcaaaggttggtgggcaatgtaatacttaattaaaataatgatggaagagctatctggagattatgagtaagctgatttgaattttcagtataaaactttagtataattgtagtttgcaaagtttatttcagttcacatgtaaggtattgcaaataaattcttggacaattttgtatggaaacttgatattaaaaactagtctgtggttctttgcagtttcttgtaaatttataaaccaggcacaaggttcaagtttagattttaagcacttttataacaatgataagtgcctttttggagatgtaacttttagcagtttgttaacctgacatctctgccagtctagtttctgggcaggtttcctgtgtcagtattccccctcctctttgcattaatcaaggtatttggtagaggtggaatctaagtgtttgtatgtccaatttacttgcatatgtaaaccattgctgtgccattcaatgtttgatgcataattggaccttgaatcgataagtgtaaatacagcttttgatctgtaatgcttttatacaaaagtttattttaataataaaatgtttgttctaacttgtctgcttttttaaaaataatcttactgtacttaattctaattttttcctcatatttaaataaaaggccatttccaccttttct

SEQ ID NO: 241728 - DNA, 1116 bp, Artificial Sequence
  derived and/or modified sequence
atggacgccagaagagtgccccagaaggacctgagagtgaagaagaacctgaagaagttcagatacgtgaagctgatcagcatggagaccagcagcagcagcgacgacagctgcgacagcttcgccagcgacaacttcgccaacaccagactgcagagcgtgagagagggctgcagaaccagaagccagtgcagacacagcggccccctgagagtggccatgaagttccccgccagaagcaccagaggcgccaccaacaagaaggccgagagcagacagcccagcgagaacagcgtgaccgacagcaacagcgacagcgaggacgagagcggcatgaacttcctggagaagagagccctgaacatcaagcagaacaaggccatgctggccaagctgatgagcgagctggagagcttccccggcagcttcagaggcagacaccccctgcccggcagcgacagccagagcagaagacccagaagaagaaccttccccggcgtggccagcagaagaaaccccgagagaagagccagacccctgaccagaagcagaagcagaatcctgggcagcctggacgccctgcccatggaggaggaggaggaggaggacaagtacatgctggtgagaaagagaaagaccgtggacggctacatgaacgaggacgacctgcccagaagcagaagaagcagaagcagcgtgaccctgccccacatcatcagacccgtggaggagatcaccgaggaggagctggagaacgtgtgcagcaacagcagagagaagatctacaacagaagcctgggcagcacctgccaccagtgcagacagaagaccatcgacaccaagaccaactgcagaaaccccgactgctggggcgtgagaggccagttctgcggcccctgcctgagaaacagatacggcgaggaggtgagagacgccctgctggaccccaactggcactgccccccctgcagaggcatctgcaactgcagcttctgcagacagagagacggcagatgcgccaccggcgtgctggtgtacctggccaagtaccacggcttcggcaacgtgcacgcctacctgaagagcctgaagcaggagttcgagatgcaggcctag

SEQ ID NO: 241729 - DNA, 966 bp, Artificial Sequence
  derived and/or modified sequence
atggacgccagaagagtgccccagaaggacctgagagtgaagaagaacctgaagaagttcagatacgtgaagctgatcagcatggagaccagcagcagcagcgacgacagctgcgacagcttcgccagcgacaacttcgccaacaccagactgcagagcgtgagagagggctgcagaaccagaagccagtgcagacacagcggccccctgagagtggccatgaagttccccgccagaagcaccagaggcgccaccaacaagaaggccgagagcagacagcccagcgagaacagcgtgaccgacagcaacagcgacagcgaggacgagagcggcatgaacttcctggagaagagagccctgaacatcaagcagaacaaggccatgctggccaagctgatgagcgagctggagagcttccccggcagcttcagaggcagacaccccctgcccggcagcgacagccagagcagaagacccagaagaagaaccttccccggcgtggccagcagaagaaaccccgagagaagagccagacccctgaccagaagcagaagcagaatcctgggcagcctggacgccctgcccatggaggaggaggaggaggaggacaagtacatgctggtgagaaagagaaagaccgtggacggctacatgaacgaggacgacctgcccagaagcagaagaagcagaagcagcgtgaccctgccccacatcatcagacccgtggaggagatcaccgaggaggagctggagaacgtgtgcagcaacagcagagagaagatctacaacagaagcctgaactggcactgccccccctgcagaggcatctgcaactgcagcttctgcagacagagagacggcagatgcgccaccggcgtgctggtgtacctggccaagtaccacggcttcggcaacgtgcacgcctacctgaagagcctgaagcaggagttcgagatgcaggcctag

SEQ ID NO: 241730 - protein, 609 aa, Artificial Sequence
  derived and/or modified sequence
MFRCGGLAAGALKQKLVPLVRTVCVRSPRQRNRLPVVQSHHLGSPSRSLASTGASGKDGSNLVYFLIVGATVTGAGVYYAYKTMKEDEKRYNERISGLGLTPEQKQKKAALSASEGEEVPQDKAPSHVPFLLIGGGTAAFAAARSIRARDPGARVLIVSEDPELPYMRPPLSKELWFSDDPNVTKTLRFKQWNGKERSIYFQPPSFYVSAQDLPHIENGGVAVLTGKKVVQLDVRDNMVKLNDGSQITYEKCLIATGGTPRSLSAIDRAGAEVKSRTTLFRKIGDFRSLEKISREVKSITIIGGGFLGSELACALGRKARALGTEVIQLFPEKGNMGKILPEYLSNWTMEKVRREGVKVMPNAIVQSVGVSSGKLLIKLKDGRKVETDHIVAAVGLEPNVELAKTGGLEIDSDFGGFRVNAELQARSNIWVAGDAACFYDIKLGRRRVEHHDHAVVSGRLAGENMTGAAKPYWHQSMFWSDLGPDVGYEAIGLVDSSLPTVGVFAKATAQDNPKSATEQSGTGIRSESETESEASEITIPPSTPAVPQAPVQGEDYGKGVIFYLRDKVVVGIVLWNIFNRMPIARKIIKDGEQHEDLNEVAKLFNIHED

SEQ ID NO: 241731 - protein, 326 aa, Artificial Sequence
  derived and/or modified sequence
MFRCGGLAAGALKQKLVPLVRTVCVRSPRQRNRLPARALGTEVIQLFPEKGNMGKILPEYLSNWTMEKVRREGVKVMPNAIVQSVGVSSGKLLIKLKDGRKVETDHIVAAVGLEPNVELAKTGGLEIDSDFGGFRVNAELQARSNIWVAGDAACFYDIKLGRRRVEHHDHAVVSGRLAGENMTGAAKPYWHQSMFWSDLGPDVGYEAIGLVDSSLPTVGVFAKATAQDNPKSATEQSGTGIRSESETESEASEITIPPSTPAVPQAPVQGEDYGKGVIFYLRDKVVVGIVLWNIFNRMPIARKIIKDGEQHEDLNEVAKLFNIHED

SEQ ID NO: 241732 - protein, 261 aa, Artificial Sequence
  derived and/or modified sequence
MEKVRREGVKVMPNAIVQSVGVSSGKLLIKLKDGRKVETDHIVAAVGLEPNVELAKTGGLEIDSDFGGFRVNAELQARSNIWVAGDAACFYDIKLGRRRVEHHDHAVVSGRLAGENMTGAAKPYWHQSMFWSDLGPDVGYEAIGLVDSSLPTVGVFAKATAQDNPKSATEQSGTGIRSESETESEASEITIPPSTPAVPQAPVQGEDYGKGVIFYLRDKVVVGIVLWNIFNRMPIARKIIKDGEQHEDLNEVAKLFNIHED

SEQ ID NO: 241733 - protein, 13 aa, Artificial Sequence
  derived and/or modified sequence
DGEQHEDLNEVAK

SEQ ID NO: 241734 - DNA, 1830 bp, Artificial Sequence
  derived and/or modified sequence
atgttcagatgcggcggcctggccgctggcgcgctaaagcagaagttagtaccattagtaaggactgtttgtgtcagatctccaaggcagcgtaacagattaccagtggtccagtctcatcacctgggatcacccagccggtcactggcatctactggagcgtccggcaaagacggctctaatctggtctactttctgatcgttggggccaccgttaccggcgccggggtgtactacgcatataagacaatgaaggaggacgagaaaaggtacaatgaaagaatatctggtttggggctgactcccgagcagaagcagaagaaagccgctttgagtgcctccgagggcgaagaggtcccccaggataaggccccctctcacgtgccgttcctgcttataggcgggggcacagcggcctttgccgccgctcgatctattagagctcgcgatccaggtgcccgggtcctgatcgttagcgaggacccggaattaccttacatgcgtcccccattgagcaaggaactgtggttcagcgatgaccctaacgtgactaagaccttgcgatttaagcagtggaacggcaaagagaggtctatatactttcagccaccctctttctacgtgagtgcccaggacctgccgcacatcgaaaacggaggagtcgcagtccttacaggcaaaaaggtggtgcaactggacgtccgcgataacatggttaaacttaacgatggcagtcagatcacatacgagaagtgccttatagctacgggggggacccctagaagcctctctgccatcgacagggccggagccgaagtgaagtctcgcacgaccctgttcagaaagatcggagattttcgctctctcgagaaaatatcccgtgaggttaaatcaataacaataatcggggggggatttttgggatctgagttggcctgtgccctgggccggaaagctcgggctctgggtacagaggtgatccaactgttccctgaaaagggcaacatgggaaagatcctgccagagtacctgagtaattggaccatggaaaaagtgcgaagagaaggcgtaaaggtcatgcccaacgcgatcgttcagagcgtaggagtttcctccgggaaactccttatcaagttaaaggacgggcggaaggtagagaccgaccacatcgtggctgccgtcgggctcgaacccaacgtggaactggccaagaccggaggtctggagatcgactctgactttggaggctttcgagttaacgctgagctccaggctaggagtaacatttgggtagccggtgatgcggcctgtttttacgacatcaaactggggcgtcggcgtgtcgagcatcacgaccacgccgtggtgtctggacgtctggcaggcgaaaatatgaccggagctgccaagccatattggcatcagagtatgttttggtctgacttgggaccagacgtcggttacgaggctattggcttggtggatagtagcctgcccactgtcggagtatttgctaaggccacagcccaggacaaccctaagtccgccacagaacagagcggcacaggtataaggtccgagagtgaaacggagagtgaagctagtgagataacgatccctccgagcacgccggccgttccccaagcccctgtgcagggggaggattatggaaagggcgtgatcttctacctgagggacaaggttgtggtgggtattgtgctgtggaacatcttcaaccgcatgccaatagcccgtaaaattatcaaggacggcgagcaacacgaagacttaaatgaggttgcaaagcttttcaatatccacgaggactag

SEQ ID NO: 241735 - DNA, 981 bp, Artificial Sequence
  derived and/or modified sequence
atgttcagatgtggtggccttgctgccggcgcactaaaacagaagcttgttcccctggtccggactgtatgcgtgagaagcccacgacagaggaacagacttcctgctagggccttagggaccgaagtgattcagctcttccccgagaaggggaacatggggaagatactcccagagtatctgtctaactggacaatggaaaaggtccggcgtgagggggtcaaggtcatgccaaacgcaatcgtgcagtccgtgggagtgtcttcaggaaaacttcttatcaagctgaaggacgggagaaaagtggagactgatcatatagtcgcagccgtaggacttgagcctaacgtggaattggcgaagactggcggactcgaaatcgacagtgattttgggggatttcgggtgaatgccgagttgcaggcccgcagtaatatatgggtggccggggacgccgcatgcttctacgatatcaagctcggcagaaggcgtgtggaacaccacgaccacgccgtggtctcaggaaggctggccggcgaaaacatgactggcgctgcaaagccctattggcatcaatcaatgttttggtcagatcttgggccagatgtcggatatgaggctattggcctggtggattcttctctgcctaccgtgggtgtgttcgccaaagctaccgcccaggacaatcctaagtctgctactgaacaatcaggcaccggcatccggtctgaaagcgaaacagagagcgaggcgtcggaaatcaccatcccacccagcactcctgcagtcccacaggctcccgtgcagggagaagactatggcaaaggagtcattttctacttacgggacaaggtggtcgtgggaatcgttctgtggaatatcttcaaccgaatgccgatcgctcgcaaaatcatcaaggatggggaacagcatgaggacctgaacgaagtcgcgaagcttttcaacatccacgaagattag

SEQ ID NO: 241736 - DNA, 1830 bp, Artificial Sequence
  derived and/or modified sequence
atgttccgctgtggcggcctggccgccggggccctgaagcagaagctggtgcccctggtgaggacagtgtgtgtgcgcagcccccggcagaggaaccggctgcctgtggtgcagagccaccacctgggcagccccagccgcagcctggccagcactggagccagcggcaaggatggcagcaacctggtgtacttcctgattgtgggcgccaccgtgactggagctggggtgtactatgcctacaagaccatgaaggaggatgagaagcgctacaatgaaagaatcagcggcctgggcctgaccccagagcagaagcagaagaaggccgccctgagcgccagcgagggggaggaggtgccccaggacaaggcccccagccacgtgcccttcctgctgattggaggcggcacagctgcctttgctgctgcccggagcatccgggcccgggaccccggggcccgggtgctgattgtgtctgaggaccctgagctgccctacatgaggcctcccctgagcaaggagctgtggttcagtgatgaccccaacgtgaccaagaccctgcgcttcaagcagtggaatggcaaggagaggagcatctacttccagcccccatccttctacgtgtctgcccaggacctgccccacattgaaaatggaggagtggccgtgctgaccgggaagaaggtggtgcagctggatgtgcgggacaacatggtgaagctgaatgatggcagccagatcacctatgaaaaatgtctcatcgccaccggcggcacccccaggagcctgagcgccatcgacagagctggagctgaggtgaagagcaggaccaccctcttcaggaagattggagacttccgcagcctggagaagatcagccgggaggtgaagagcatcaccatcatcggcggcggcttcctgggcagcgagctggcctgtgccctgggcaggaaggcccgggccctgggcacagaggtgatccagctgtttcctgagaagggcaacatgggcaagatcctgcctgagtacctgagcaactggaccatggagaaggtgagaagagagggcgtgaaggtgatgcccaatgccatcgtgcagagcgtgggcgtgagcagcggcaagctgctgatcaagctgaaggatggcaggaaggtggagacagaccacatcgtggccgctgtgggcctggagcccaacgtggagctggccaagacaggaggcctggagattgacagcgactttggaggcttccgggtgaatgctgagctgcaggcccggagcaacatctgggtggccggagatgctgcctgcttctatgacatcaagctgggcagaagaagagtggagcaccacgaccatgctgtggtgtctggccgcctggccggggagaacatgaccggggccgccaagccctactggcaccagagcatgttctggagcgacctgggcccagatgtgggctatgaggccatcggcctggtggacagcagcctgcccaccgtgggcgtgtttgccaaggccacagcccaggacaaccccaagagcgccacagagcagagcggcaccggcatccgctctgagagcgagacagagagcgaggccagcgagatcaccatcccccccagcaccccagctgtgccccaggcccctgtgcagggcgaggactatggcaagggcgtcatcttctacctgcgggacaaggtggtggtgggcatcgtgctgtggaacatcttcaacaggatgcccatcgccaggaagatcatcaaggatggagagcagcacgaggacctgaatgaggtggccaagctgttcaacatccacgaggactag

SEQ ID NO: 241737 - DNA, 981 bp, Artificial Sequence
  derived and/or modified sequence
atgttccgctgtggcggcctggccgccggggccctgaagcagaagctggtgcccctggtgaggacagtgtgtgtgcgcagcccccggcagaggaaccggctgcctgcccgggccctgggcacagaggtgatccagctgtttcctgagaagggcaacatgggcaagatcctgcctgagtacctgagcaactggaccatggagaaggtgcggcgggagggcgtgaaggtgatgcccaatgccatcgtgcagagcgtgggcgtgtcctctgggaagctgctgatcaagctgaaggatggcaggaaggtggagacagaccacatcgtggccgctgtgggcctggagcccaacgtggagctggccaagacaggaggcctggagattgacagcgactttggaggcttccgggtgaatgctgagctgcaggcccggagcaacatctgggtggccggagatgctgcctgcttctatgacatcaagctgggcagaagaagagtggagcaccacgaccatgctgtggtgtctggccgcctggccggggagaacatgactggagctgccaagccctactggcaccagagcatgttctggagcgacctgggcccagatgtgggctatgaggccatcggcctggtggacagcagcctgcccaccgtgggcgtgtttgccaaggccacagcccaggacaaccccaagagcgccacagagcagagcggcaccggcatccgctctgagagcgagacagaaagtgaggccagcgagatcaccatcccccccagcaccccagctgtgccccaggcccctgtgcagggagaagattatggaaaaggagtcatcttctacctgcgggacaaggtggtggtgggcatcgtgctgtggaacatcttcaacaggatgcccatcgccaggaagatcatcaaggatggagagcagcacgaggacctgaatgaggtggccaagctgttcaacatccatgaagattag

SEQ ID NO: 241738 - DNA, 1830 bp, Artificial Sequence
  derived and/or modified sequence
atgttccggtgcggcggcctggccgccggcgccctgaagcagaagctggttcctttggtgaggaccgtttgtgttaggagccctagacagcgcaatcgcctgcctgtggtacagtcccatcacttaggctctcctagcaggtcactcgctagcaccggggcatctggtaaggatgggtcaaacctggtgtacttcctgatcgtaggcgctactgtgacgggcgccggcgtgtattacgcatataagactatgaaagaagatgaaaaacgttataacgagcgtatctctggcctcggactgaccccggagcaaaaacagaagaaggcagcacttagcgctagcgaaggggaggaagttcctcaggacaaagccccatcacatgtcccattccttctgataggcggaggcacagccgcctttgcagctgcccgctccatccgggctcgtgacccaggcgccagggtcctaattgtcagtgaggatcctgagctcccctatatgcgcccgcccttgtctaaagaactgtggttcagcgatgacccaaacgtgaccaaaacactgcgcttcaaacaatggaatggaaaggaacggtccatttacttccaacccccaagcttctatgtgtctgcccaggatcttcctcatatcgagaacggcggagtggctgtcttaaccggcaaaaaagtggtacaacttgacgtgcgcgacaacatggtcaaattgaatgacggatctcagataacctacgagaagtgcctcatagctacaggtgggactcctcggtctttgagtgctatcgacagagctggcgcagaggtcaagagtcgaacaacactctttcggaagatcggggatttccgaagtcttgaaaagatctcccgggaagttaagtctataacgatcattggcggaggcttcctggggagtgagcttgcctgtgcgctcggtcgaaaagcccgagctctgggcaccgaggtaatccaacttttccccgagaaaggtaacatgggcaagatcctgcctgagtacctgtcaaattggacaatggaaaaagtgcgcagagagggcgtcaaagttatgcctaatgcaattgtacagagcgtcggagtcagctctggaaagctgcttattaagctgaaggatggccggaaggtggaaacggaccatatcgtggctgccgtgggtttggagcctaatgtggaactcgctaagacgggcggattggaaatcgattccgactttggggggtttagggttaatgccgagctgcaggcgagatccaatatatgggtggccggcgatgctgcctgcttctatgacatcaagctcggtagaagacgagttgagcatcacgaccacgccgtcgtgtcaggccgactggctggtgagaacatgacaggcgccgcaaagccatactggcaccagtccatgttttggtccgatttgggaccagacgtgggctatgaggcaattgggcttgttgactcatctctgccaacagttggggtgttcgccaaggctacagctcaggacaatcccaaatctgccacggagcaaagtggtacgggaattaggagtgaatccgagactgagtcggaggcctcagaaataactatcccaccgtccacgccagccgtgcctcaagcacccgtgcagggggaggactatggcaagggagtcattttctatctgagagataaggtcgtcgtgggtatcgtcctgtggaatattttcaaccgaatgccaatcgctcgcaagataattaaggacggcgaacagcacgaggatctgaacgaggtcgcaaaactgtttaatattcacgaggactag

SEQ ID NO: 241739 - DNA, 981 bp, Artificial Sequence
  derived and/or modified sequence
atgttccggtgcggcggcctggccgccggcgccctgaagcagaagctcgtgcctttagtccggactgtttgtgtgcgatccccccgccagcgtaacaggctaccggcacgcgctcttggaaccgaagtgatccaactcttcccggagaaaggcaacatgggtaagatacttcctgagtatctttctaattggactatggagaaggtgcgaagggagggagttaaagttatgccgaatgccattgtacagagtgtgggggtttcctccggaaagctcctgatcaaactgaaagatggacgcaaggttgagaccgatcacatagtggcagcggttgggttagaacccaacgtggaactggcgaaaacaggagggctggagatcgactctgactttggaggtttcagagtgaacgctgagcttcaggcccgttcgaacatatgggtggccggagatgcagcctgtttctacgatattaaacttggacggcgaagggtggagcatcacgaccacgccgtggtatccggtcgcctagctggagagaacatgacgggagccgctaaaccctactggcaccagagcatgttctggagcgacttggggccagacgttggctacgaggcaattgggttggtggatagctctctccccaccgtgggagtgtttgctaaggccactgcccaggacaaccccaagtctgcaaccgaacagagcggcacagggatacggtccgaatcagagactgagagcgaggcctctgagattacaatacccccctccactcctgccgtcccacaagcacccgtacagggcgaagattacgggaaaggtgtaatcttttacctgcgcgataaggtggtagttggaatcgtgttgtggaacatattcaatcgtatgccgattgctcggaaaatcatcaaagatggagagcagcacgaggatctaaacgaagtggccaagttgttcaatatccacgaagactag

SEQ ID NO: 241740 - DNA, 1830 bp, Artificial Sequence
  derived and/or modified sequence
atgtttcggtgtggtggacttgctgcaggagcgttgaagcaaaagctggtacccctcgtgcgcacggtctgtgtgcggtctccccgacaaagaaaccgactgcccgtggtacagagccaccacctgggcagcccttccaggagcttggcctctacgggtgcctctggtaaggacggcagcaatttggtgtacttcctcattgtgggcgctacagtgactggggctggcgtgtactacgcctataagactatgaaggaagatgagaagcggtacaacgaacggatttctggcctggggctcactccggagcagaaacaaaagaaagcagcactttccgccagcgagggcgaagaggtgccgcaagacaaggccccaagtcacgtgcctttccttcttattggtggaggtaccgccgcatttgccgcagccagaagcattagggctagagatcccggtgccagagtcctgattgtgtctgaagatcctgaattaccctatatgaggccacccctcagcaaggaactgtggttctcagacgatcctaacgtaaccaagaccctgcgatttaagcaatggaatgggaaagagcggtcaatctacttccaacctcctagtttctatgtgtccgcacaagatctgccccacattgagaacggaggggtggcagtgctcacaggtaagaaggtcgtccaactggatgttagggacaatatggttaaactcaatgatggctcgcagattacatatgagaagtgcttgatcgccacgggtggaactcccagatcactttctgcgattgatcgggctggcgctgaggtgaaatcccgaacgacactcttcaggaaaattggagactttcgatcactggagaagattagcagagaggttaagtcaatcacgatcatagggggagggtttctgggaagtgagctcgcctgcgcgctcggacgcaaggcccgagctctggggacggaagtgatacagctgtttccggagaaaggcaatatgggtaagatcctcccggaatatctgtcaaactggacaatggaaaaagtccggagggagggtgttaaagtgatgccgaatgccatcgtgcaaagtgtgggggtttctagtggcaaattactgattaagctcaaggacggaaggaaggtggagacagatcacatcgtggctgctgttggcctagagcccaacgtagaactggctaagacaggtggcctcgagattgactctgactttggtgggttcagagttaatgccgagctgcaggctcggagtaatatctgggtcgcaggcgacgctgcctgcttttacgacatcaaacttgggcgtcgcagggtcgaacatcacgatcatgccgtggtgtcaggcagactggccggagaaaacatgaccggtgccgctaagccgtactggcaccagtctatgttctggtctgacttgggacctgacgtcggatacgaggcaatcggattggtcgattcctccctgcctaccgttggggtttttgctaaggccactgcccaggataatcccaagagcgccactgagcagtccgggactggcattcgcagcgagagcgaaacagagagcgaagcatccgaaattacaatccctcctagtacaccggctgttccacaagccccagtgcagggagaggactacgggaagggggtcattttctatttacgagacaaggtggtcgtcggcattgtgctctggaacatctttaataggatgcctatcgctcgtaaaataatcaaggacggagagcaacatgaggaccttaacgaggtcgcaaaactgttcaacatccacgaggattag

SEQ ID NO: 241741 - DNA, 981 bp, Artificial Sequence
  derived and/or modified sequence
atgttccgctgcggcggactcgctgccggtgccctcaagcagaaattggtcccactcgttaggaccgtatgcgtacggagtccacgccagcgaaaccgcttacctgcccgtgcactcgggaccgaggtcatacagttgtttcctgagaagggaaatatgggcaagatcttgcctgaatacttgagtaattggaccatggagaaggtacggagggaaggagttaaggtgatgcccaatgctattgtccagtccgtaggtgtgtcttctggcaagcttctgatcaaactgaaggatggacgtaaagtcgagactgatcacatcgtggctgccgtgggcctagagcctaatgtggaactcgcaaagacagggggtttggaaatagactcagatttcggcggatttcgcgttaatgcagaactccaggcaagaagcaacatttgggttgccggagacgccgcttgtttctacgatataaagctgggtagacggcgtgtggagcaccacgaccacgccgtggtgtccgggaggctggcaggagagaacatgactggagcagctaagccctattggcaccagagcatgttctggtccgaccttggtccagacgtcggttatgaagcaatcggactcgtggacagctccctgccaaccgtgggcgtgtttgcgaaagccacagcacaagataatccaaaaagcgctacggagcagtctgggactggtatccggagtgagtctgagactgagtcagaggcgtcggagatcaccattccaccatctacccctgccgtcccacaggccccagttcagggggaagactacggcaaaggggtgattttctaccttagagacaaagtggtagtgggcattgtgctgtggaatattttcaatcgcatgccaattgccagaaagatcatcaaggatggcgaacagcatgaggatcttaacgaagtggctaaactgttcaacattcacgaggactag

SEQ ID NO: 241742 - DNA, 2248 bp, Artificial Sequence
  derived and/or modified sequence
agcgagtgctacgcctgcgcagtaggcctccggtcgccgttccccttccccggctctagcaggccggcttctctgtccaatgcccacccggagctgggaggaggagtctgcgtaatgtgcgtgtgaagagactgggggagctggccggggctcacggtgtttgacccgtcggtcgtgcgtgagaggaaagggaaggaggaggtcccgaatagcggtcgccgaaatgttccggtgtggaggcctggcggcgggtgctttgaagcagaagctggtgcccttggtgcggaccgtgtgcgtccgaagcccgaggcagaggaaccggctcccagttgtgcagtctcatcacctaggatccccttctagatcactagcatctacaggtgcttctgggaaagatggcagcaacctagtgtacttcttaattgtaggagcaacagtcactggggcaggagtttattatgcctacaagactatgaaagaggatgaaaaaagatacaatgaaagaatttcagggttagggctgacaccagaacagaaacagaaaaaggccgcgttatctgcttcagaaggagaggaagttcctcaagacaaggcgccaagtcatgttcctttcctgctaattggtggaggcacagctgcttttgctgcagccagatccatccgggctcgggatcctggggccagggtactgattgtatctgaagatcctgagctgccgtacatgcgacctcctctttcaaaagaactgtggttttcagatgacccaaatgtcacaaagacactgcgattcaaacagtggaatggaaaagagagaagcatatatttccagccaccttctttctatgtctctgctcaggacctgcctcatattgagaatggtggtgtggctgtcctcactgggaagaaggtagtacagctggatgtgagagacaacatggtgaaacttaatgatggctctcaaataacctatgaaaagtgcttgattgcaacaggaggtactccaagaagtctgtctgccattgatagggctggagcagaggtgaagagtagaacaacgcttttcagaaagattggagactttagaagcttggagaagatttcacgggaagtcaaatcaattacgattatcggtgggggcttccttggtagcgaactggcctgtgctcttggcagaaaggctcgagccttgggcacagaagtgattcaactcttccccgagaaaggaaatatgggaaagatcctccccgaatacctcagcaactggaccatggaaaaagtcagacgagagggggttaaggtgatgcccaatgctattgtgcaatccgttggagtcagcagtggcaagttacttatcaagctgaaagacggcaggaaggtagaaactgaccacatagtggcagctgtgggcctggagcccaatgttgagttggccaagactggtggcctggaaatagactcagattttggtggcttccgggtaaatgcagagctacaagcacgctctaacatctgggtggcaggagatgctgcatgcttctacgatataaagttgggaaggaggcgggtagagcaccatgatcacgctgttgtgagtggaagattggctggagaaaatatgactggagctgctaagccgtactggcatcagtcaatgttctggagtgatttgggccccgatgttggctatgaagctattggtcttgtggacagtagtttgcccacagttggtgtttttgcaaaagcaactgcacaagacaaccccaaatctgccacagagcagtcaggaactggtatccgatcagagagtgagacagagtccgaggcctcagaaattactattcctcccagcaccccggcagttccacaggctcccgtccagggggaggactacggcaaaggtgtcatcttctacctcagggacaaagtggtcgtggggattgtgctatggaacatctttaaccgaatgccaatagcaaggaagatcattaaggacggtgagcagcatgaagatctcaatgaagtagccaaactattcaacattcatgaagactgaagccccacagtggaattggcaaacccactgcagcccctgagaggaggtcgaatgggtaaaggagcatttttttattcagcagactttctctgtgtatgagtgtgaatgatcaagtcctttgtgaatattttcaactatgtaggtaaattcttaatgttcacatagtgaaataaattctgattcttctaaattaaa

SEQ ID NO: 241743 - DNA, 1200 bp, Artificial Sequence
  derived and/or modified sequence
aggtcccgaatagcggtcgccgaaatgttccggtgtggaggcctggcggcgggtgctttgaagcagaagctggtgcccttggtgcggaccgtgtgcgtccgaagcccgaggcagaggaaccggctcccagctcgagccttgggcacagaagtgattcaactcttccccgagaaaggaaatatgggaaagatcctccccgaatacctcagcaactggaccatggaaaaagtcagacgagagggggttaaggtgatgcccaatgctattgtgcaatccgttggagtcagcagtggcaagttacttatcaagctgaaagacggcaggaaggtagaaactgaccacatagtggcagctgtgggcctggagcccaatgttgagttggccaagactggtggcctggaaatagactcagattttggtggcttccgggtaaatgcagagctacaagcacgctctaacatctgggtggcaggagatgctgcatgcttctacgatataaagttgggaaggaggcgggtagagcaccatgatcacgctgttgtgagtggaagattggctggagaaaatatgactggagctgctaagccgtactggcatcagtcaatgttctggagtgatttgggccccgatgttggctatgaagctattggtcttgtggacagtagtttgcccacagttggtgtttttgcaaaagcaactgcacaagacaaccccaaatctgccacagagcagtcaggaactggtatccgatcagagagtgagacagagtccgaggcctcagaaattactattcctcccagcaccccggcagttccacaggctcccgtccagggggaggactacggcaaaggtgtcatcttctacctcagggacaaagtggtcgtggggattgtgctatggaacatctttaaccgaatgccaatagcaaggaagatcattaaggacggtgagcagcatgaagatctcaatgaagtagccaaactattcaacattcatgaagactgaagccccacagtggaattggcaaacccactgcagcccctgagaggaggtcgaatgggtaaaggagcatttttttattcagcagactttctctgtgtatgagtgtgaatgatcaagtcctttgtgaatattttcaactatgtaggtaaattcttaatgttcacatagtgaaataaattctgattcttctaaattaaa

SEQ ID NO: 241744 - DNA, 1925 bp, Artificial Sequence
  derived and/or modified sequence
gcccaggctggagtgcaatggtgtgatctctgctcaccacaacctccgcctcccaggttcaagcgattctcctgtctcagcctctggagtagctgggattacaggcatgcaccaccacacctggctaattttgtatttttggtagagacagggtttctccatgttggtcaggctggtcttgaactcccaacctcaggtgatccacccacctcggccacccaaagtgctgggattataggtgtgagtcactgcacctggccaacagcaatactttctttcctttcttttcctctaccctctatgccaggactccttagaaataaaatattaaggaaagtgagttatgaagatgataagggcaatgcagactacagaattatgggtgtctttgaactgctgcttcctgtaaaatgccaaaaacttctttgggcacatgatggttcccagcttgagagatctgtgagctccagttggaatgtttcatggcaactagttttcttaatgttctttttcagatatatgaaatcagggcatcttttcaggaggatgcttcctattcagaggttgcaaagcacttatgtaagccttaggtgactgcatgggtggaagtgcacagagttcaccatctgaagcttaatctggggccagcagttctgatacctgttgtatttgcgttacaaatgaacttgagcaccgaggccctcatgcccactgtcctgtaagtgggcgctcggcctggattgcagctctgccctgtctgtagtgagggctgcctgctgctcctttacttctcttcctgtattcctaggattgacttttgcttcctgctgtaactactctgtttcttcttcccagctcgagccttgggcacagaagtgattcaactcttccccgagaaaggaaatatgggaaagatcctccccgaatacctcagcaactggaccatggaaaaagtcagacgagagggggttaaggtgatgcccaatgctattgtgcaatccgttggagtcagcagtggcaagttacttatcaagctgaaagacggcaggaaggtagaaactgaccacatagtggcagctgtgggcctggagcccaatgttgagttggccaagactggtggcctggaaatagactcagattttggtggcttccgggtaaatgcagagctacaagcacgctctaacatctgggtggcaggagatgctgcatgcttctacgatataaagttgggaaggaggcgggtagagcaccatgatcacgctgttgtgagtggaagattggctggagaaaatatgactggagctgctaagccgtactggcatcagtcaatgttctggagtgatttgggccccgatgttggctatgaagctattggtcttgtggacagtagtttgcccacagttggtgtttttgcaaaagcaactgcacaagacaaccccaaatctgccacagagcagtcaggaactggtatccgatcagagagtgagacagagtccgaggcctcagaaattactattcctcccagcaccccggcagttccacaggctcccgtccagggggaggactacggcaaaggtgtcatcttctacctcagggacaaagtggtcgtggggattgtgctatggaacatctttaaccgaatgccaatagcaaggaagatcattaaggacggtgagcagcatgaagatctcaatgaagtagccaaactattcaacattcatgaagactgaagccccacagtggaattggcaaacccactgcagcccctgagaggaggtcgaatgggtaaaggagcatttttttattcagcagactttctctgtgtatgagtgtgaatgatcaagtcctttgtgaatattttcaactatgtaggtaaattcttaatgttcacatagtgaaataaattctgattcttctaaattaaa

SEQ ID NO: 241745 - DNA, 2105 bp, Artificial Sequence
  derived and/or modified sequence
tcgccgaaatgttccggtgtggaggcctggcggcgggtgctttgaagcagaagctggtgcccttggtgcggaccgtgtgcgtccgaagcccgaggcagaggaaccggctcccaggcctacaagactatgaaagaggatgaaaaaagatacaatgaaagaatttcagggttagggctgacaccagaacagaaacagaaaaaggccgcgttatctgcttcagaaggagaggaagttcctcaagacaaggcgccaagtcatgttcctttcctgctaattggtggaggcacagctgcttttgctgcagccagatccatccgggctcgggatcctggggccagggtactgattgtatctgaagatcctgagctgccgtacatgcgacctcctctttcaaaagaactgtggttttcagatgacccaaatgtcacaaagacactgcgattcaaacagtggaatggaaaagagagaagcatatatttccagccaccttctttctatgtctctgctcaggacctgcctcatattgagaatggtggtgtggctgtcctcactgggaagaaggtagtacagctggatgtgagagacaacatggtgaaacttaatgatggctctcaaataacctatgaaaagtgcttgattgcaacaggaggtactccaagaagtctgtctgccattgatagggctggagcagaggtgaagagtagaacaacgcttttcagaaagattggagactttagaagcttggagaagatttcacgggaagtcaaatcaattacgattatcggtgggggcttccttggtagcgaactggcctgtgctcttggcagaaaggatatatgaaatcagggcatcttttcaggaggatgcttcctattcagaggttgcaaagcacttatgtaagccttaggtgactgcatgggtggaagtgcacagagttcaccatctgaagcttaatctggggccagcagttctgatacctgttgtatttgcgttacaaatgaacttgagcaccgaggccctcatgcccactgtcctctcgagccttgggcacagaagtgattcaactcttccccgagaaaggaaatatgggaaagatcctccccgaatacctcagcaactggaccatggaaaaagtcagacgagagggggttaaggtgatgcccaatgctattgtgcaatccgttggagtcagcagtggcaagttacttatcaagctgaaagacggcaggaaggtagaaactgaccacatagtggcagctgtgggcctggagcccaatgttgagttggccaagactggtggcctggaaatagactcagattttggtggcttccgggtaaatgcagagctacaagcacgctctaacatctgggtggcaggagatgctgcatgcttctacgatataaagttgggaaggaggcgggtagagcaccatgatcacgctgttgtgagtggaagattggctggagaaaatatgactggagctgctaagccgtactggcatcagtcaatgttctggagtgatttgggccccgatgttggctatgaagctattggtcttgtggacagtagtttgcccacagttggtgtttttgcaaaagcaactgcacaagacaaccccaaatctgccacagagcagtcaggaactggtatccgatcagagagtgagacagagtccgaggcctcagaaattactattcctcccagcaccccggcagttccacaggctcccgtccagggggaggactacggcaaaggtgtcatcttctacctcagggacaaagtggtcgtggggattgtgctatggaacatctttaaccgaatgccaatagcaaggaagatcattaaggacggtgagcagcatgaagatctcaatgaagtagccaaactattcaacattcatgaagactgaagccccacagtggaattggcaaacccactgcagcccctgagaggaggtcgaatgggtaaaggagcatttttttattcagcagactttctctgtgtatgagtgtgaatgatcaagtcctttgtgaatattttcaactatgtaggtaaattcttaatgttcacatagtgaaataaattctgattcttctaaattaaa

SEQ ID NO: 241746 - DNA, 1830 bp, Artificial Sequence
  derived and/or modified sequence
atgttcagatgcggcggcctggccgccggcgccctgaagcagaagctggtgcccctggtgagaaccgtgtgcgtgagaagccccagacagagaaacagactgcccgtggtgcagagccaccacctgggcagccccagcagaagcctggccagcaccggcgccagcggcaaggacggcagcaacctggtgtacttcctgatcgtgggcgccaccgtgaccggcgccggcgtgtactacgcctacaagaccatgaaggaggacgagaagagatacaacgagagaatcagcggcctgggcctgacccccgagcagaagcagaagaaggccgccctgagcgccagcgagggcgaggaggtgccccaggacaaggcccccagccacgtgcccttcctgctgatcggcggcggcaccgccgccttcgccgccgccagaagcatcagagccagagaccccggcgccagagtgctgatcgtgagcgaggaccccgagctgccctacatgagaccccccctgagcaaggagctgtggttcagcgacgaccccaacgtgaccaagaccctgagattcaagcagtggaacggcaaggagagaagcatctacttccagccccccagcttctacgtgagcgcccaggacctgccccacatcgagaacggcggcgtggccgtgctgaccggcaagaaggtggtgcagctggacgtgagagacaacatggtgaagctgaacgacggcagccagatcacctacgagaagtgcctgatcgccaccggcggcacccccagaagcctgagcgccatcgacagagccggcgccgaggtgaagagcagaaccaccctgttcagaaagatcggcgacttcagaagcctggagaagatcagcagagaggtgaagagcatcaccatcatcggcggcggcttcctgggcagcgagctggcctgcgccctgggcagaaaggccagagccctgggcaccgaggtgatccagctgttccccgagaagggcaacatgggcaagatcctgcccgagtacctgagcaactggaccatggagaaggtgagaagagagggcgtgaaggtgatgcccaacgccatcgtgcagagcgtgggcgtgagcagcggcaagctgctgatcaagctgaaggacggcagaaaggtggagaccgaccacatcgtggccgccgtgggcctggagcccaacgtggagctggccaagaccggcggcctggagatcgacagcgacttcggcggcttcagagtgaacgccgagctgcaggccagaagcaacatctgggtggccggcgacgccgcctgcttctacgacatcaagctgggcagaagaagagtggagcaccacgaccacgccgtggtgagcggcagactggccggcgagaacatgaccggcgccgccaagccctactggcaccagagcatgttctggagcgacctgggccccgacgtgggctacgaggccatcggcctggtggacagcagcctgcccaccgtgggcgtgttcgccaaggccaccgcccaggacaaccccaagagcgccaccgagcagagcggcaccggcatcagaagcgagagcgagaccgagagcgaggccagcgagatcaccatcccccccagcacccccgccgtgccccaggcccccgtgcagggcgaggactacggcaagggcgtgatcttctacctgagagacaaggtggtggtgggcatcgtgctgtggaacatcttcaacagaatgcccatcgccagaaagatcatcaaggacggcgagcagcacgaggacctgaacgaggtggccaagctgttcaacatccacgaggactag

SEQ ID NO: 241747 - DNA, 981 bp, Artificial Sequence
  derived and/or modified sequence
atgttcagatgcggcggcctggccgccggcgccctgaagcagaagctggtgcccctggtgagaaccgtgtgcgtgagaagccccagacagagaaacagactgcccgccagagccctgggcaccgaggtgatccagctgttccccgagaagggcaacatgggcaagatcctgcccgagtacctgagcaactggaccatggagaaggtgagaagagagggcgtgaaggtgatgcccaacgccatcgtgcagagcgtgggcgtgagcagcggcaagctgctgatcaagctgaaggacggcagaaaggtggagaccgaccacatcgtggccgccgtgggcctggagcccaacgtggagctggccaagaccggcggcctggagatcgacagcgacttcggcggcttcagagtgaacgccgagctgcaggccagaagcaacatctgggtggccggcgacgccgcctgcttctacgacatcaagctgggcagaagaagagtggagcaccacgaccacgccgtggtgagcggcagactggccggcgagaacatgaccggcgccgccaagccctactggcaccagagcatgttctggagcgacctgggccccgacgtgggctacgaggccatcggcctggtggacagcagcctgcccaccgtgggcgtgttcgccaaggccaccgcccaggacaaccccaagagcgccaccgagcagagcggcaccggcatcagaagcgagagcgagaccgagagcgaggccagcgagatcaccatcccccccagcacccccgccgtgccccaggcccccgtgcagggcgaggactacggcaagggcgtgatcttctacctgagagacaaggtggtggtgggcatcgtgctgtggaacatcttcaacagaatgcccatcgccagaaagatcatcaaggacggcgagcagcacgaggacctgaacgaggtggccaagctgttcaacatccacgaggactag

SEQ ID NO: 241748 - protein, 260 aa, Artificial Sequence
  derived and/or modified sequence
MMWSNFFLQEENRRRGAAGRRRAHGQGRSGLTPEREGKVKLALLLAAVGATLAVLSVGTEFWVELNTYKANGSAVCEAAHLGLWKACTKRLWQADVPVDRDTCGPAELPGEANCTYFKFFTTGENARIFQRTTKKEVNLAAAVIAVLGLAVMALGCLCIIMVLSKGAEFLLRVGAVCFGLSGLLLLVSLEVFRHSVRALLQRVSPEPPPAPRLTYEYSWSLGCGVGAGLILLLGAGCFLLLTLPSWPWGSLCPKRGHRAT

SEQ ID NO: 241749 - DNA, 783 bp, Artificial Sequence
  derived and/or modified sequence
atgatgtggagtaactttttcctgcaggaggagaatagacggcggggcgccgcgggtcgccgccgagctcatgggcagggccgaagcggtctgactccagagagagagggaaaggtgaaactcgcgctgctgctggcagcggtcggcgctacactcgctgtccttagtgtgggaactgagttttgggtggagctgaacacttacaaggccaatgggtccgccgtgtgcgaggccgctcatcttggtctctggaaagcatgtaccaaacgtctttggcaggctgacgtcccagtggaccgagacacatgtggccccgcggagttacccggtgaagccaactgtacttatttcaagtttttcaccacaggagaaaatgcgcgcatttttcagaggacaacaaagaaggaagttaaccttgccgctgcagtcatcgccgtattggggttggcagtcatggctctggggtgtctctgtatcattatggtcttgtccaaaggggccgaattcctgttgagagtaggtgctgtatgttttggcctgtctggtctgctgctactggtaagtctcgaggtgtttcggcactccgtcagggcactcctgcagcgagtgagtcccgaaccaccacctgccccgcgcctcacatacgaatactcatggagtctcggctgcggggtcggtgcgggcctcattttgttactgggcgctggctgcttcctcctccttacactcccctcttggccctgggggagcctgtgtcccaaacgtggacaccgcgcaacctag

SEQ ID NO: 241750 - DNA, 783 bp, Artificial Sequence
  derived and/or modified sequence
atgatgtggagcaacttcttcctgcaggaggagaacagaagaagaggagctgctggaagaagaagagcccacggccagggccgcagcggcctgaccccagagcgggagggcaaggtgaagctggccctgctgctggccgctgtgggcgccaccctggccgtgctgtctgtgggcacagagttctgggtggagctgaacacctacaaggccaatggatctgctgtgtgtgaggccgcccacctgggcctgtggaaggcctgcaccaagaggctgtggcaggctgatgtgcctgtggaccgggacacctgtggccctgctgagctgcctggagaggccaactgcacctacttcaagttcttcaccaccggggagaatgcccgcatcttccagaggaccaccaagaaggaggtgaacctggccgctgctgtgattgctgtgctgggcctggccgtgatggccctgggctgcctgtgcatcatcatggtgctgagcaaaggagctgagttcctgctgcgggtgggcgctgtgtgcttcggcctgagcggcctgctgctgctggtgtccctggaggtgttccgccacagcgtgcgggccctgctgcagagggtgtccccagagcccccaccagccccccggctgacctatgagtacagctggagcctgggctgcggcgtgggcgccggcctcatcctgctgctgggcgccggctgcttcctgctgctgaccctgcccagctggccctggggcagcctgtgccccaagaggggccaccgggccacctag

SEQ ID NO: 241751 - DNA, 783 bp, Artificial Sequence
  derived and/or modified sequence
atgatgtggagcaacttcttcctgcaggaggagaaccggcggcggggcgccgccggacggaggcgggcgcacggccagggtagaagtgggctcacccctgaacgtgaggggaaggtgaagctcgctctcttgctagctgcagtcggagccaccctagcggtgctctctgtcgggacggaattttgggtggaactcaacacttacaaagccaacggctcggcagtgtgcgaggctgcgcacttgggactgtggaaggcgtgcactaaacgactctggcaggccgatgtgccggtggaccgtgacacctgcggtcccgccgaactgcccggcgaagccaactgtacttacttcaagttttttactacaggggagaacgcacgtatctttcagaggacaactaaaaaggaagtgaacttagccgctgcggttatcgccgttctgggtctggctgtgatggcgctgggatgcttgtgcatcataatggtcctttccaagggagccgaattcctgcttcgcgtaggcgcagtttgcttcggtctcagcggacttcttctcttagtgtccctggaagttttccgtcacagcgtgcgcgccctcctacagcgcgtttcacctgaaccaccacccgcgcctaggttgacatacgagtacagctggagcctgggctgtggcgtgggagctggactgatactcctgctgggggctggttgttttctgctgttgaccctgccatcctggccatggggcagcttgtgccccaaacggggacacagggcaacctag

SEQ ID NO: 241752 - DNA, 783 bp, Artificial Sequence
  derived and/or modified sequence
atgatgtggagcaactttttcctccaggaagaaaacagaaggcgaggcgcagcgggtaggaggagggcgcacggccaaggcagatccggtctgacaccggagcgtgaggggaaggttaaactggcactgcttctcgcagccgtcggagccacgcttgccgtgttgtcagtcggcaccgagttttgggtagaattgaacacctacaaggcaaatggcagcgctgtttgcgaagcagcacacttgggcctgtggaaggcttgtactaagaggttatggcaggctgatgtacctgtcgatagagacacatgcggcccagcagagctccctggagaagcaaattgcacctacttcaaatttttcactactggggaaaacgcaagaatttttcagaggacaaccaaaaaagaagtgaaccttgcggcagcagtcatcgccgtgctgggcctggccgttatggctcttggatgcctatgcattattatggtcctgtcaaaaggcgcagaatttctgcttcgggtaggtgccgtgtgctttggcctttccggtcttctgctgctagttagtctcgaagtgtttcggcacagtgtgagggcactgctgcaaagggtcagccctgagcctccccctgccccacgcctgacctatgagtacagttggtccctgggttgtggcgtgggcgcaggactgatactcctgctgggagctggctgctttcttctgctgaccctgcctagctggccttggggatcactgtgcccaaaacgaggccatcgagcaacctag

SEQ ID NO: 241753 - DNA, 1853 bp, Artificial Sequence
  derived and/or modified sequence
ccaagtcctctgttctcaaactctgagcccaagggaaccccggccacatctcctccaaacacacacaggacctcaggtcccttcctgggtaccccaaactcttagccctagtggggtgctcagatctctcaggaaaaccagtttcccttttgttaaccccccagcggggaccccaaagcagccccttggagctgcagggagcttcagcgggcaccagttctcattcctctggagctcttggggggactccctcctgggaagccgaattctatctctaaacctcagggtgggggccttgtttttcctctgggccccgtcttctttgccaagttcttgagggcaacctagaccctcctctgaaccccagaggcttccccagccctggggatcatttttctcttctgaaccccagaagcaatctcgactttcgcatttgagattccagacaggactcggctctccctctttcatacccaggggaaactgagtccctcacccccttcaagaccccaggccgctcctcgctcccgcccctcgaggcccttcgccggctctgcctcctcccccttcccgaccccaccggccataagatgatgtggtccaacttcttcctgcaagaggagaaccggcggcggggggccgcgggccggcggcgggcgcacgggcagggcaggtcggggctgacgcccgagcgcgaggggaaggtgaagctggcgctgctgctggccgccgtgggcgccacgctggcggtgctgtccgtgggcaccgagttctgggtggagctcaacacctacaaggccaacggcagcgccgtgtgcgaagcggcccacctggggctgtggaaggcgtgcaccaagcggctgtggcaggcggacgtgcccgtggacagggacacctgcggccccgcggagctgcccggagaagcaaactgcacctattttaaattcttcaccacgggggagaatgcacgcatctttcagagaaccacaaagaaagaggtgaatctggcagctgcggtgatagcagtgctgggcctggcagtcatggccttggggtgcctctgtatcatcatggtgctcagtaaaggtgcagagttcctgctccgagttggagccgtctgctttggcctctcaggcctgctgctcttggtgagcctggaggtgttccggcattccgtgagggccctgctgcagagagtcagcccggagcctcccccggccccacgcctcacctacgagtactcctggtccctgggctgcggcgtgggggccggcctgatcctgctgttgggggccggctgctttctgctgctcacactgccttcctggccctgggggtccctctgtcccaagcgggggcaccgggccacctagagccacgcgtgagacttctctaagcaaccaccgagccctttgaccttctccattgtacccccaagatctttttgccccatctcctagagaaactgtgttctccctgctcgggggcccatgtttttttacacgcctgcctcctgtccccttatcctttctccctctgtaaatacgtttttctctgtggctgtatgtgggttgcttgggggtgggatgggaagaggctctttgcaaacgagggtccccagagaagactggcggggacctgatggggtagctggggtgtggggttgggggatgaggtcagggggtcttgggtgggagttgggggccccttcatttcccaggtctggatcgattcacttgccgggagagactttttacaactcatctgcagctccgggtgcggttgggggagatagcgaagggtctggcctcgctgtgatctgatttgggattaaaggtttggaaatttaacaa

SEQ ID NO: 241754 - DNA, 783 bp, Artificial Sequence
  derived and/or modified sequence
atgatgtggagcaacttcttcctgcaggaggagaacagaagaagaggcgccgccggcagaagaagagcccacggccagggcagaagcggcctgacccccgagagagagggcaaggtgaagctggccctgctgctggccgccgtgggcgccaccctggccgtgctgagcgtgggcaccgagttctgggtggagctgaacacctacaaggccaacggcagcgccgtgtgcgaggccgcccacctgggcctgtggaaggcctgcaccaagagactgtggcaggccgacgtgcccgtggacagagacacctgcggccccgccgagctgcccggcgaggccaactgcacctacttcaagttcttcaccaccggcgagaacgccagaatcttccagagaaccaccaagaaggaggtgaacctggccgccgccgtgatcgccgtgctgggcctggccgtgatggccctgggctgcctgtgcatcatcatggtgctgagcaagggcgccgagttcctgctgagagtgggcgccgtgtgcttcggcctgagcggcctgctgctgctggtgagcctggaggtgttcagacacagcgtgagagccctgctgcagagagtgagccccgagcccccccccgcccccagactgacctacgagtacagctggagcctgggctgcggcgtgggcgccggcctgatcctgctgctgggcgccggctgcttcctgctgctgaccctgcccagctggccctggggcagcctgtgccccaagagaggccacagagccacctag

SEQ ID NO: 241755 - protein, 214 aa, Artificial Sequence
  derived and/or modified sequence
MMWSNFFLQEENRRRGAAGRRRAHGQGRSGLTPEREGKVKLALLLAAVGATLAVLSVGTEFWVELNTYKANGSAVCEAAHLGLWKACTKRLWQADVPVDRDTCGPAELPGEANCTYFKFFTTGENARIFQRTTKKGLLLLVSLEVFRHSVRALLQRVSPEPPPAPRLTYEYSWSLGCGVGAGLILLLGAGCFLLLTLPSWPWGSLCPKRGHRAT

SEQ ID NO: 241756 - DNA, 645 bp, Artificial Sequence
  derived and/or modified sequence
atgatgtggtctaacttctttctgcaggaagagaacaggcggcggggcgccgcaggccgcagacgggcacacggccagggcaggagcggtctgacaccagagagggagggcaaagtgaaacttgctctcctcttggctgcagttggcgctacgctggctgtgctgagtgttggcaccgaattctgggtcgaactgaacacgtacaaggcaaacggctccgcagtgtgtgaggctgcccacctgggactctggaaagcatgcactaagcgcctgtggcaggccgacgttcctgttgacagagatacatgtggcccagccgaattgccaggcgaagccaactgcacctatttcaagttttttaccactggagaaaatgcgcggatttttcagcgcactaccaagaaggggttactcctgttggtgagtctggaggtgttcaggcactctgttagagcactccttcaacgcgtgtcaccagaaccacctcctgccccccgccttacgtacgaatactcctggagcctaggctgtggggtaggggccggactgatcctcctattgggtgccggctgttttttattactgacactgccttcctggccttggggctcactctgcccaaagagaggtcacagagccacttag

SEQ ID NO: 241757 - DNA, 645 bp, Artificial Sequence
  derived and/or modified sequence
atgatgtggagcaacttcttcctgcaggaggagaacagaagaagaggagctgctggaagaagaagagcccacggccagggccgcagcggcctgaccccagagcgggagggcaaggtgaagctggccctgctgctggccgctgtgggcgccaccctggccgtgctgtctgtgggcacagagttctgggtggagctgaacacctacaaggccaatggatctgctgtgtgtgaggccgcccacctgggcctgtggaaggcctgcaccaagaggctgtggcaggctgatgtgcctgtggaccgggacacctgtggccctgctgagctgcctggagaggccaactgcacctacttcaagttcttcaccaccggggagaatgcccgcatcttccagaggaccaccaagaagggcctgctgctgctggtgtccctggaggtgttccgccacagcgtgcgggccctgctgcagagggtgtccccagagcccccaccagccccccggctgacctatgagtacagctggagcctgggctgcggcgtgggcgccggcctcatcctgctgctgggcgccggctgcttcctgctgctgaccctgcccagctggccctggggcagcctgtgccccaagaggggccaccgggccacctag

SEQ ID NO: 241758 - DNA, 645 bp, Artificial Sequence
  derived and/or modified sequence
atgatgtggagcaacttcttcctgcaggaggagaaccggcggcggggtgccgctggcagaagacgggcgcacgggcagggacgctctgggctgacacctgaacgcgaaggaaaggtgaaactggcgctcttgctcgccgcggtgggggcaacactcgcggtcttgtccgtgggtaccgagttctgggttgagctaaacacttataaggccaatggttcagccgtttgtgaggccgcccacctaggcttatggaaggcttgtacaaagcggctgtggcaagccgatgtgcccgtggacagggacacatgcggccccgcagagttgcctggggaagctaattgcacttactttaaatttttcaccacaggcgaaaatgccaggatctttcagcgtacaactaaaaaagggctgttattgctggtgtctctcgaagtgtttcgacattccgtccgtgctctgttgcagagagtgtcccctgagcccccacctgcaccgcgactaacgtacgaatatagttggtcactgggctgtggagtgggcgctggcctgattctcctcttgggcgcagggtgtttcctcctgctgacgctcccatcttggccttggggaagtctctgccccaaaagaggtcaccgggcaacttag

SEQ ID NO: 241759 - DNA, 645 bp, Artificial Sequence
  derived and/or modified sequence
atgatgtggtctaacttcttcctccaggaagaaaaccgcagacggggtgcggcaggccgtaggcgagctcacggccagggtcggtccggtctcacccctgaacgggaggggaaagtgaaactcgcgctcctactcgccgcagtgggagcaacactggctgtcctgtcggtgggtaccgagttttgggttgaactgaacacatataaagcgaacgggagcgctgtttgtgaggccgcacacctgggcctttggaaagcctgcaccaaaagattatggcaggccgacgtaccggtggaccgcgatacctgcggacccgcagagttgccaggagaggctaactgcacatacttcaaattttttactaccggtgagaatgccagaatctttcagagaactaccaagaagggtctactgctcctggtgagcttggaggtgttccggcactctgtgagggcactactgcagagggtgtcacccgagcctcctcccgctcccaggcttacatacgaatatagctggagtttgggttgtggagtcggggctggtttgatcctgctgctaggggctggatgttttcttctgctgaccctcccatcatggccctggggcagcctatgccctaaaagagggcacagggccacatag

SEQ ID NO: 241760 - DNA, 645 bp, Artificial Sequence
  derived and/or modified sequence
atgatgtggtccaacttcttcctgcaagaggagaaccggcggcggggggccgcgggccggcggcgggcgcacgggcagggcaggtcggggctgacgcccgagcgcgaggggaaggtgaagctggcgctgctgctggccgccgtgggcgccacgctggcggtgctgtccgtgggcaccgagttctgggtggagctcaacacctacaaggccaacggcagcgccgtgtgcgaagcggcccacctggggctgtggaaggcgtgcaccaagcggctgtggcaggcggacgtgcccgtggacagggacacctgcggccccgcggagctgcccggagaagcaaactgcacctattttaaattcttcaccacgggggagaatgcacgcatctttcagagaaccacaaagaaaggcctgctgctcttggtgagcctggaggtgttccggcattccgtgagggccctgctgcagagagtcagcccggagcctcccccggccccacgcctcacctacgagtactcctggtccctgggctgcggcgtgggggccggcctgatcctgctgttgggggccggctgctttctgctgctcacactgccttcctggccctgggggtccctctgtcccaagcgggggcaccgggccacctag

SEQ ID NO: 241761 - DNA, 645 bp, Artificial Sequence
  derived and/or modified sequence
atgatgtggagcaacttcttcctgcaggaggagaacagaagaagaggcgccgccggcagaagaagagcccacggccagggcagaagcggcctgacccccgagagagagggcaaggtgaagctggccctgctgctggccgccgtgggcgccaccctggccgtgctgagcgtgggcaccgagttctgggtggagctgaacacctacaaggccaacggcagcgccgtgtgcgaggccgcccacctgggcctgtggaaggcctgcaccaagagactgtggcaggccgacgtgcccgtggacagagacacctgcggccccgccgagctgcccggcgaggccaactgcacctacttcaagttcttcaccaccggcgagaacgccagaatcttccagagaaccaccaagaagggcctgctgctgctggtgagcctggaggtgttcagacacagcgtgagagccctgctgcagagagtgagccccgagcccccccccgcccccagactgacctacgagtacagctggagcctgggctgcggcgtgggcgccggcctgatcctgctgctgggcgccggctgcttcctgctgctgaccctgcccagctggccctggggcagcctgtgccccaagagaggccacagagccacctag

SEQ ID NO: 241762 - protein, 349 aa, Artificial Sequence
  derived and/or modified sequence
MKGLYFQQSSTDEEITFVFQEKEDLPVTEDNFVKLQVKACALSQINTKLLAEMKMKKDLFPVGREIAGIVLDVGSKVSFFQPDDEVVGILPLDSEDPGLCEVVRVHEHYLVHKPEKVTWTEAAGSIRDGVRAYTALHYLSHLSPGKSVLIMDGASAFGTIAIQLAHHRGAKVISTACSLEDKQCLERFRPPIARVIDVSNGKVHVAESCLEETGGLGVDIVLDAGVRLYSKDDEPAVKLQLLPHKHDIITLLGVGGHWVTTEENLQLDPPDSHCLFLKGATLAFLNDEVWNLSNVQQGKYLCILKDVMEKLSTGVFRPQLDEPIPLYEAKVSMEAVQKNQGRKKQVVQF

SEQ ID NO: 241763 - protein, 181 aa, Artificial Sequence
  derived and/or modified sequence
MKGLYFQQSSTDEEITFVFQEKEDLPVTEDNFVKLQVKACALSQINTKLLAEMKMKKDLFPVGREIAGIVLDVGSKVSFFQPDDEVVGILPLDSEDPGLCEVVRVHEHYLVHKPEKVTWTEAAGSIRDGVRAYTALHYLSHLSPGKSVLIMDGASAFGTIAIQLAHHRGAKVISTACSLED

SEQ ID NO: 241764 - protein, 19 aa, Artificial Sequence
  derived and/or modified sequence
MKGLYFQQSSTDEEITFVF

SEQ ID NO: 241765 - protein, 198 aa, Artificial Sequence
  derived and/or modified sequence
MKGLYFQQSSTDEEITFVFQEKEDLPVTEDNFVKLQVKACALSQINTKLLAEMKMKKDLFPVGREIAGIVLDVGSKVSFFQPDDEVVGILPLDSEDPGLCEVVRVHEHYLVHKPEKVTWTEAAGSIRDGVRAYTALHYLSHLSPGKSVLIMDGASAFGTIAIQLAHHRGAKVISTACSLEDKQCLERFRPPIENSTIA

SEQ ID NO: 241766 - DNA, 1050 bp, Artificial Sequence
  derived and/or modified sequence
atgaagggactgtacttccagcagtcctctaccgacgaggagattacatttgttttccaggagaaagaggacctaccagtgacagaggacaattttgtcaagctccaggtgaaagcttgcgccctgtcacagattaacaccaagttgctcgccgagatgaagatgaagaaggatctgttcccggtgggccgtgaaatcgccggtatcgtactggatgtgggctctaaagtgtcattctttcaaccagacgatgaggtggtaggcatccttcccttggacagtgaagacccaggtttatgcgaggtcgttcgggtccacgagcattacctcgttcacaagccagagaaagttacctggacagaagccgccgggtcaatcagagacggggtcagagcctatacagccttacattatctgtctcacctttcccccggaaaaagcgtcttaatcatggatggtgcgtctgcctttggcactatcgccatacagcttgctcaccatcgtggggctaaggtgatctctactgcttgttctctcgaagacaaacagtgtctggagaggtttcggcctcctatcgcccgcgtgattgatgtgtcaaacggaaaggtgcatgtggccgaaagctgtttggaagagaccgggggcttaggtgtggatatcgtgctggacgctggagtccgactctattccaaggatgacgaacccgcagtcaagctgcaactgctgcctcacaaacatgacatcataactctcttgggcgtcggagggcactgggtaactacagaggaaaacttacaactggatccacctgattcgcattgtctcttcctgaaaggagccaccctggcctttctcaatgatgaagtatggaatttaagtaacgtgcagcaaggaaaatacctgtgtattctcaaagatgtgatggaaaagctgagcaccggagtgttccggccccagctggatgaacccatcccgctgtacgaggccaaagtttccatggaggcagtgcaaaagaatcagggccgaaagaaacaggtggtgcagttctag

SEQ ID NO: 241767 - DNA, 546 bp, Artificial Sequence
  derived and/or modified sequence
atgaagggactgtattttcagcaaagctcaacagacgaggaaattacattcgtttttcaagaaaaggaagacctccctgtaacagaggacaattttgttaaattgcaggtcaaggcatgtgccctgagccagatcaacactaagttgctggccgaaatgaagatgaagaaggacctgttccctgtggggcgcgagatcgccggtattgtgttagatgtcgggagcaaggtaagttttttccagccagatgatgaagtagtcggaatcctgcccctcgatagtgaggaccctgggctctgcgaggtcgtccgagttcatgagcactatctagtccacaaaccggaaaaggtcacttggacagaggctgcgggctctatcagagatggagtgagggcttacacggctctccactacctgagtcacctgtctccgggcaaatctgtgttgattatggatggagccagcgctttcggtactatcgccatccagttagcccaccaccgtggcgctaaggtcattagcaccgcatgtagcctagaggactag

SEQ ID NO: 241768 - DNA, 60 bp, Artificial Sequence
  derived and/or modified sequence
atgaaggggctttatttccagcaatccagcactgacgaagaaataaccttcgtattttag

SEQ ID NO: 241769 - DNA, 597 bp, Artificial Sequence
  derived and/or modified sequence
atgaaaggcctttatttccagcaaagctcgaccgacgaggaaatcactttcgtttttcaagagaaggaggatttgcctgtgaccgaggacaactttgtcaagttacaggtgaaagcgtgcgcgctgtctcagattaacacaaagttgctggctgagatgaagatgaagaaggacctttttccggttggaagagaaatcgccggcattgtcctggacgtcggatccaaagtgagtttctttcaacccgatgatgaagtggtgggaatcctgccactggactctgaggaccctgggctgtgcgaagtggtgcgcgtacacgagcactacctcgttcacaagccagaaaaagttacctggacggaggctgcaggatctattcgagacggtgttagggcatacacagccttgcattatctgagccacctcagcccaggaaaaagcgtgctcattatggacggtgcgtctgctttcgggacgattgccatacagctcgcgcaccaccgcggcgcgaaagtgatctccactgcctgtagcctcgaagacaagcaatgcctggagcgctttagacctcctattgagaattctaccatcgcttag

SEQ ID NO: 241770 - DNA, 1050 bp, Artificial Sequence
  derived and/or modified sequence
atgaagggcctgtacttccagcagagcagcacagatgaggagatcacctttgtgttccaggagaaggaggacctgcctgtgacagaggacaactttgtgaagctgcaggtgaaggcctgtgccctgagccagatcaacaccaagctgctggccgagatgaagatgaagaaggacctcttccctgtgggccgggagattgctggcatcgtgctggatgtgggcagcaaggtgtccttcttccagccagatgatgaggtggtgggcatcctgcccctggacagtgaagatcctggcctgtgtgaggtggtgcgggtgcatgagcactacctggtgcacaagccagagaaggtgacctggacagaggccgccggcagcatcagagatggagtgcgggcctacacagccctgcactacctgagccacctgagccctgggaagtctgtgctgatcatggatggagccagcgccttcggcaccatcgccatccagctggcccaccacagaggagccaaggtgatcagcacagcctgcagcctggaggacaagcagtgcctggagcgcttccggccccccatcgcccgggtgattgatgtgtccaatggcaaggtgcacgtggccgagagctgcctggaggagactggaggcctgggcgtggacatcgtgctggatgctggggtgcggctgtacagcaaggatgatgagcctgctgtgaagctgcagctgctgccccacaagcatgacatcatcaccctgctgggcgtgggcggccactgggtgaccacagaggagaacctgcagctggaccccccagacagccactgcctcttcctgaagggggccaccctggccttcctgaatgatgaggtgtggaacctgagcaatgtgcagcagggcaagtacctgtgcatcctgaaggatgtgatggagaagctgagcactggagtcttccggccccagctggatgagcccatccccctgtatgaggccaaggtgtccatggaggccgtgcagaagaaccagggcaggaagaagcaggtggtgcagttctag

SEQ ID NO: 241771 - DNA, 546 bp, Artificial Sequence
  derived and/or modified sequence
atgaagggcctgtacttccagcagagcagcacagatgaggagatcacctttgtgttccaggagaaggaggacctgcctgtgacagaggacaactttgtgaagctgcaggtgaaggcctgtgccctgagccagatcaacaccaagctgctggccgagatgaagatgaagaaggacctcttccctgtgggccgggagattgctggcatcgtgctggatgtgggcagcaaggtgtccttcttccagccagatgatgaggtggtgggcatcctgcccctggacagtgaagatcctggcctgtgtgaggtggtgcgggtgcatgagcactacctggtgcacaagccagagaaggtgacctggacagaggccgccggcagcatcagagatggagtgcgggcctacacagccctgcactacctgagccacctgagccctgggaagtctgtgctgatcatggatggagccagcgccttcggcaccatcgccatccagctggcccaccacagaggagccaaggtgatcagcacagcctgcagcctggaggactag

SEQ ID NO: 241772 - DNA, 60 bp, Artificial Sequence
  derived and/or modified sequence
atgaagggcctgtacttccagcagagcagcacagatgaggagatcacctttgtgttctag

SEQ ID NO: 241773 - DNA, 597 bp, Artificial Sequence
  derived and/or modified sequence
atgaagggcctgtacttccagcagagcagcacagatgaggagatcacctttgtgttccaggagaaggaggacctgcctgtgacagaggacaactttgtgaagctgcaggtgaaggcctgtgccctgagccagatcaacaccaagctgctggccgagatgaagatgaagaaggacctcttccctgtgggccgggagattgctggcatcgtgctggatgtgggcagcaaggtgtccttcttccagccagatgatgaggtggtgggcatcctgcccctggacagtgaagatcctggcctgtgtgaggtggtgcgggtgcatgagcactacctggtgcacaagccagagaaggtgacctggacagaggccgccggcagcatcagagatggagtgcgggcctacacagccctgcactacctgagccacctgagccctgggaagtctgtgctgatcatggatggagccagcgccttcggcaccatcgccatccagctggcccaccacagaggagccaaggtgatcagcacagcctgcagcctggaggacaagcagtgcctggagcgcttccggccccccatcgagaacagcaccatcgcctag

SEQ ID NO: 241774 - DNA, 1050 bp, Artificial Sequence
  derived and/or modified sequence
atgaagggcctgtacttccagcagagcagcaccgacgaggagatcacttttgttttccaagagaaggaagaccttcctgtcacagaagataactttgtcaaactgcaggtgaaggcatgcgcgctgtcgcaaatcaacaccaagttgctcgctgagatgaaaatgaagaaagacctgttccctgtgggacgagagattgccggcatcgtcctggatgttggatccaaagtatcctttttccagcccgatgatgaagtggtgggcatcctgccactcgactccgaagatccggggttatgtgaggtcgtgagggtacatgagcattatctggtgcacaagccggaaaaagtaacgtggaccgaggccgccggtagtatccgggacggcgtccgcgcctataccgccctgcactacctttctcacctgtccccagggaaatccgtacttattatggatggcgcgtctgcattcggaaccatagccatccagctcgctcaccacaggggcgctaaagtaatcagcaccgcgtgcagcctggaagataagcagtgtctagagcgcttccggccacctattgcaagagttatagacgtgtcaaacggtaaagtccacgtcgccgaatcttgtttggaggagactggaggacttggcgtcgacattgtactcgacgctggtgtgcgactttacagtaaggatgatgagcccgctgttaagctgcaactgctgccccataagcacgatatcatcaccctgttgggcgtgggtgggcattgggtgaccacagaggagaatttacaattagacccacctgacagccactgccttttcctgaagggcgcaacacttgcgttcctgaatgacgaggtttggaacctgagtaacgtgcagcaaggcaagtacctgtgtattctgaaggacgtgatggagaagctgagcactggtgtgtttaggcctcaactggatgaacccatacctctctacgaagccaaagtgagcatggaagctgtgcagaagaaccagggacgcaagaaacaagtggtccagttctag

SEQ ID NO: 241775 - DNA, 546 bp, Artificial Sequence
  derived and/or modified sequence
atgaagggcctgtacttccagcagagcagcaccgacgaggagatcacatttgtgttccaggagaaagaggacctgcctgtcacggaagacaatttcgtgaaactccaggtcaaggcgtgcgctctctcccagattaacaccaagttgctggcagagatgaagatgaagaaggatctgttccccgtcggacgtgagatcgcaggcatcgtgctggacgttgggagcaaggtgtccttcttccagccagacgatgaggtagtgggaatattgcccctggacagcgaagatcccggcttgtgcgaggtcgtgcgagttcatgagcattacttggtccataagcctgaaaaggtcacttggacggaagccgcaggttccattcgcgacggggttcgcgcatacaccgctttacactatcttagccatctcagtcccgggaagagcgttttgatcatggacggtgcctcagccttcgggaccattgcaatacagcttgcacaccatcgcggagctaaggtcatcagcacagcctgctcgttagaagattag

SEQ ID NO: 241776 - DNA, 60 bp, Artificial Sequence
  derived and/or modified sequence
atgaagggcctgtacttccagcagagcagcaccgacgaggagatcacctttgttttttag

SEQ ID NO: 241777 - DNA, 597 bp, Artificial Sequence
  derived and/or modified sequence
atgaagggcctgtacttccagcagagcagcaccgacgaggagatcactttcgtcttccaggagaaagaagatctcccagtcaccgaagataattttgtcaagctgcaggtaaaggcatgcgccctgagccaaattaataccaaattgcttgccgagatgaaaatgaagaaggacctattccccgtggggcgggagattgctggtattgtcctagacgtcggctcaaaggtgtcgttctttcagcctgacgatgaagtggtggggatactgccccttgactccgaagacccaggcctgtgcgaagtggtgagggtgcacgagcattacctagttcacaagccagaaaaagtcacatggactgaggcagccggctcaattcgggacggcgtgagagcttacacagctctgcattacctgtctcatctcagcccaggcaagagtgttctaatcatggatggggcaagcgcctttggcaccatcgccatccagttagcacatcaccggggagctaaggttatatctaccgcatgcagtctggaggataaacagtgtctcgaacgctttcgccctccaatcgagaattccaccattgcatag

SEQ ID NO: 241778 - DNA, 1050 bp, Artificial Sequence
  derived and/or modified sequence
atgaagggattgtatttccagcagtcctctactgatgaggagattaccttcgtcttccaagagaaggaggacttgcccgtgacagaggataactttgtgaaattgcaagttaaggcctgcgccctcagtcagatcaataccaaactgctcgctgagatgaagatgaagaaggatctattccctgtagggcgagagatcgctgggatcgttctcgacgtcggttcaaaggtgtcttttttccagcccgacgatgaagtggtgggtatattaccgttggactccgaagacccagggttgtgtgaggtcgttagagtgcacgagcattatctggttcacaagccggagaaggtcacatggaccgaggccgctggctcaatccgcgatggagtgagggcatatacagccttacattatctgagtcatctgtcacccggaaaaagcgtcctgattatggacggggcaagtgcatttggtactatagccatccagttagctcaccataggggcgctaaggtaattagtaccgcctgtagcctcgaggacaaacaatgtcttgagaggtttcgtcccccaattgccagggtgattgacgtgtccaatggcaaggtacacgtagcggagagctgtctggaggagaccggcggattgggcgtcgatatcgtgctagatgcgggtgtgcggctttactccaaggatgacgaaccagctgtgaagctgcagctgctcccccacaagcacgacattataacgttactgggggtgggtggccactgggtgacaacagaagagaatctccagctcgatccgcctgattcccactgtctctttctcaagggggctactctggcctttttaaacgacgaagtgtggaacctcagtaacgtgcaacaggggaagtatctatgtatattgaaggacgtcatggagaaactctccaccggcgtgtttcgaccgcaactcgatgagcccatccccttatatgaggctaaagtgtccatggaagcagttcagaagaatcaggggcgtaagaagcaggtagtgcagttttag

SEQ ID NO: 241779 - DNA, 546 bp, Artificial Sequence
  derived and/or modified sequence
atgaagggcctctattttcagcagtctagtaccgacgaagagatcaccttcgttttccaggaaaaggaagatctccccgttacagaggacaattttgtgaaactgcaagtcaaggcctgcgcactcagccagattaacacgaagctgttggcagagatgaaaatgaaaaaggacttgtttccggtaggccgtgagatagcaggcatcgtcctggatgtcggttcaaaagtttccttctttcagccagatgatgaggtggttggcatactgccactcgactccgaagaccccggactttgcgaggtcgtgcgcgtacacgagcactaccttgtccacaaacccgagaaggttacctggaccgaagcagccggttctatcagggatggggtaagggcctacacagctctgcactacctttcccacctcagccctggcaaatcagtgcttatcatggatggggcttcagcattcggaactatcgccatccagttggctcaccaccgcggagccaaggtcattagtacagcctgttctttagaggactag

SEQ ID NO: 241780 - DNA, 60 bp, Artificial Sequence
  derived and/or modified sequence
atgaagggactgtacttccagcaaagctccactgacgaagaaataacattcgtgttctag

SEQ ID NO: 241781 - DNA, 597 bp, Artificial Sequence
  derived and/or modified sequence
atgaaagggttgtatttccagcagagctccacggatgaggagatcacgttcgtgttccaagagaaagaggatctgcctgtgactgaggacaactttgttaagctccaggtgaaggcttgtgccctctctcaaatcaacacgaagctgctcgctgagatgaaaatgaagaaagatctgttcccagttggtcgggagattgcaggtatcgttctcgatgtggggtccaaggtgtcttttttccagcccgacgacgaggtagtcggcattttacctctggactcggaggaccccggtttgtgtgaagtcgttagggtgcacgagcactatctggtgcacaaacctgaaaaagtcacgtggaccgaagccgcagggtctatcagagacggtgtaagagcatatacagcactccactatctaagtcatttgtctcccggaaagagcgtattaattatggacggcgcatcagcgttcggcactatcgccatacaactcgcgcaccaccggggagcaaaggtcatcagtaccgcatgttctctggaagataagcaatgcctagaacggttccgaccacctatcgagaatagcactattgcttag

SEQ ID NO: 241782 - DNA, 1617 bp, Artificial Sequence
  derived and/or modified sequence
agcagggggcgggctctctgacgaaggactggaaggtggcggtggtgaaggtgcaggccgttggggcggctcagaggcaggtgactatgaaaggcttatatttccaacagagttccacagatgaagaaataacatttgtatttcaagaaaaggaagatcttcctgttacagaggataactttgtgaaacttcaagttaaagcttgtgctctgagccagataaatacaaagcttctggcagaaatgaagatgaaaaaggatttatttcctgttgggagagaaattgctggaattgtattagatgttggaagcaaggtatcattctttcaaccagatgatgaagtagttggaattttgcccctggactctgaagaccctggactttgtgaagttgttagagtacatgagcattacttggttcataaaccagaaaaggtcacatggacggaagcagcaggaagcattcgggatggagtgcgtgcctatacagctctgcattatctttctcatctctctcctggaaaatcagtgctgataatggatggagcaagtgcatttggtacaatagctattcagttagcacatcatagaggagccaaagtgatttcaacagcatgcagccttgaagataagcagtgccttgaaagattcagacctcccatagcccgagtgattgatgtatctaatgggaaagttcatgttgctgaaagctgtttggaagaaacaggtggcctgggagtagatattgtcctagatgctggagtgagattatatagtaaagatgatgaaccagctgtaaaactacaactactaccacataaacatgatatcatcacacttcttggtgttggaggccactgggtaacaacagaagaaaaccttcagttggatcctccagatagccactgccttttcctcaagggagcaacgttagctttcctgaatgatgaagtttggaatttgtcaaatgtacaacagggaaaatatctttgtatcttaaaggatgtgatggagaagttatcaactggtgttttcagacctcagttggatgaacccattccactgtatgaggcaaaagtttccatggaagctgttcagaaaaatcaaggaagaaaaaagcaagttgttcaattttaattttcttctttctcagacctcagtcggatgaacatattccagtatttgaagccagaattttctttggaaattgttgagaaaaaccaaggaagataaaacaagttgcatttttaagcacgtttctctgctaagacaagatgctcagttgacacatttgaaaagtgtttgaaaaattcttgtgcaaatgatcaagataattctataattaacatcttaagggaatttttctaaaaaccttttcattgtttctatatattttgcccctgctataaaattccttccatgaagaaaactgctgctttcagcaaaagtcacactactcttgataaaagctgttgcaggcctttgctaagctatcaaagtaacgtattaattttgtatcaactccgttctcaacaccttccttaagtctttgctgtcataatttaagcatttgagtatattttgaagtcttaaaagacttagcccataggcacttaaa

SEQ ID NO: 241783 - DNA, 607 bp, Artificial Sequence
  derived and/or modified sequence
ggtggctcatgcctgtaatcccagcatttcgggaggccgaggcagacggatcacaaggtgactatgaaaggcttatatttccaacagagttccacagatgaagaaataacatttgtatttcaagaaaaggaagatcttcctgttacagaggataactttgtgaaacttcaagttaaagcttgtgctctgagccagataaatacaaagcttctggcagaaatgaagatgaaaaaggatttatttcctgttgggagagaaattgctggaattgtattagatgttggaagcaaggtatcattctttcaaccagatgatgaagtagttggaattttgcccctggactctgaagaccctggactttgtgaagttgttagagtacatgagcattacttggttcataaaccagaaaaggtcacatggacggaagcagcaggaagcattcgggatggagtgcgtgcctatacagctctgcattatctttctcatctctctcctggaaaatcagtgctgataatggatggagcaagtgcatttggtacaatagctattcagttagcacatcatagaggagccaaagtgatttcaacagcatgcagccttgaagata

SEQ ID NO: 241784 - DNA, 620 bp, Artificial Sequence
  derived and/or modified sequence
ccgttccacgggattagcaaaactgcctccccgctgacagaactgagaatttctagaggcatttgtttgtatgggatttgctgttattatctaccctcttcattggccttgcctttattatctgtacgttttgatcaagaggagcagcaagagaagaatgccaacagacaagcacaaagaaacgcatctggccggagcctgcatgtatctaaatttccaggttgctgctgccctcagaatagcactgatgatggcaaagttctagaggaaactttcatattgaagaggctataaaaatctctatagcctccaactccacagagaagccgctaatctatttcttccaaagcaaagccttcttgagtctgaatcacaacaaaagattgcccataggaaatgtaatctccgaagttgttttctaatcccaaggcaagcagaagcgcaggaaggtgcggccgattcctcgccggtttcctttttttgggaattcggattgcattcgtgcaagcaagggactgcaattgtgtcttgggtccacaccacaaaaccgtgtcggtgactatgaaaggcttatatttccaacagagttccacagatgaagaaataacatttgtatttca

SEQ ID NO: 241785 - DNA, 2571 bp, Artificial Sequence
  derived and/or modified sequence
actggccccgcccaccgtgcgaacccaaagagggtgagccaaagaaatgtaagacaacagagtgacaagccgaatgagccaatcagcaggggctgtgtgggggcaggattagcactctccccctcctccccatgtaggcgtaacaggagatttatggtctgaggttgcctatcgtggtttatggagattttgttgcacgatttcggtgcatctgctcgttgccgtgagagacactagataggatgcacttaattgacttaattattggaggttttcaaggagagaataatgtggaaaggaaaaaggcgaagcacaacccaaaggggttggccgggcctatggttggaatgaggaagggtgtggtcttcggctaaaatttgcataaaacggaacccatccgggcgattccaacttcgcccatttattggtagtccttggggcggggcctcgcctctttctccgcccccgagcggaacatgacgggagatgtagttccgagaccggttgccatggcgttctggacagcctcgcgagtccgaccccgcccttcaggagtgacgagcggcctgaccaatgggagcagggggcgggctctctgacgaaggactggaaggtggcggtggtgaaggtgcaggccgttggggcggctcagaggcaggtgactatgaaaggcttatatttccaacagagttccacagatgaagaaataacatttgtatttcaagaaaaggaagatcttcctgttacagaggataactttgtgaaacttcaagttaaagcttgtgctctgagccagataaatacaaagcttctggcagaaatgaagatgaaaaaggatttatttcctgttgggagagaaattgctggaattgtattagatgttggaagcaaggtatcattctttcaaccagatgatgaagtagttggaattttgcccctggactctgaagaccctggactttgtgaagttgttagagtacatgagcattacttggttcataaaccagaaaaggtcacatggacggaagcagcaggaagcattcgggatggagtgcgtgcctatacagctctgcattatctttctcatctctctcctggaaaatcagtgctgataatggatggagcaagtgcatttggtacaatagctattcagttagcacatcatagaggagccaaagtgatttcaacagcatgcagccttgaagataagcagtgccttgaaagattcagacctcccatagagaacagtacaattgcctgatttcctgtcctttacagcccgagtgattgatgtatctaatgggaaagttcatgttgctgaaagctgtttggaagaaacaggtggcctgggagtagatattgtcctagatgctggagtgagattatatagtaaagatgatgaaccagctgtaaaactacaactactaccacataaacatgatatcatcacacttcttggtgttggaggccactgggtaacaacagaagaaaaccttcagttggatcctccagatagccactgccttttcctcaagggagcaacgttagctttcctgaatgatgaagtttggaatttgtcaaatgtacaacaggttaagtttccttaagtattccaaacagtattccaagtgccttgcaagtattcatttaaacattaaaacagccttttgagatgtaagtactgttatcatccccatttcacaggtgaagaaacagaagcacagagatgttgatacagactcaaggacgcagcaagtggcggagcaagaatcacactcaggcagtctctctcctttctgaacagagatgagccctaagatacctggaagattttgtttttaacctcacattaaggaaagcacacatcaccttgaaaggttgcacacttactcctatgatggtgccattgcacagaaacatttcagaatacttttctaaattaaagagtttgtggagtgttttataaatatcaatgctaggaaatctttatcaaatgaagataggtttgactttttgaaacaaaagtcattcagagataagtctggtgtgattgaagccaaatcattccagttgagtaaaaataataaaaagtttggaatatacaaacaatttcaaaaagaaaggtgcaaacctctttagagtagggtcaacttaagaattccttttatttctaaaatgactggcttagaggcagcagcacttggtaaaagttttaatgtattggataaaaaaaaagttatcattacttgatagagcatatgtgtgtgtctgaagaaagatttacatagccttacacttctctctactgaatatcatacgttacttttcttaaatgtgtctagtcatatatgtgtgatatgtataaaggccagttccctccaggagcaatgacagtctttattcggagctttaaggtagttatgtaggccgggcatggtggcacatgcctgtaatcccagctactcatgaggctgaggcagaagaatcgcttgaacctgggaggcagaggtttcagtgagccaagattgcactactacactccagcctggtgacagagtgagactccatctc

SEQ ID NO: 241786 - DNA, 1050 bp, Artificial Sequence
  derived and/or modified sequence
atgaagggcctgtacttccagcagagcagcaccgacgaggagatcaccttcgtgttccaggagaaggaggacctgcccgtgaccgaggacaacttcgtgaagctgcaggtgaaggcctgcgccctgagccagatcaacaccaagctgctggccgagatgaagatgaagaaggacctgttccccgtgggcagagagatcgccggcatcgtgctggacgtgggcagcaaggtgagcttcttccagcccgacgacgaggtggtgggcatcctgcccctggacagcgaggaccccggcctgtgcgaggtggtgagagtgcacgagcactacctggtgcacaagcccgagaaggtgacctggaccgaggccgccggcagcatcagagacggcgtgagagcctacaccgccctgcactacctgagccacctgagccccggcaagagcgtgctgatcatggacggcgccagcgccttcggcaccatcgccatccagctggcccaccacagaggcgccaaggtgatcagcaccgcctgcagcctggaggacaagcagtgcctggagagattcagaccccccatcgccagagtgatcgacgtgagcaacggcaaggtgcacgtggccgagagctgcctggaggagaccggcggcctgggcgtggacatcgtgctggacgccggcgtgagactgtacagcaaggacgacgagcccgccgtgaagctgcagctgctgccccacaagcacgacatcatcaccctgctgggcgtgggcggccactgggtgaccaccgaggagaacctgcagctggacccccccgacagccactgcctgttcctgaagggcgccaccctggccttcctgaacgacgaggtgtggaacctgagcaacgtgcagcagggcaagtacctgtgcatcctgaaggacgtgatggagaagctgagcaccggcgtgttcagaccccagctggacgagcccatccccctgtacgaggccaaggtgagcatggaggccgtgcagaagaaccagggcagaaagaagcaggtggtgcagttctag

SEQ ID NO: 241787 - DNA, 546 bp, Artificial Sequence
  derived and/or modified sequence
atgaagggcctgtacttccagcagagcagcaccgacgaggagatcaccttcgtgttccaggagaaggaggacctgcccgtgaccgaggacaacttcgtgaagctgcaggtgaaggcctgcgccctgagccagatcaacaccaagctgctggccgagatgaagatgaagaaggacctgttccccgtgggcagagagatcgccggcatcgtgctggacgtgggcagcaaggtgagcttcttccagcccgacgacgaggtggtgggcatcctgcccctggacagcgaggaccccggcctgtgcgaggtggtgagagtgcacgagcactacctggtgcacaagcccgagaaggtgacctggaccgaggccgccggcagcatcagagacggcgtgagagcctacaccgccctgcactacctgagccacctgagccccggcaagagcgtgctgatcatggacggcgccagcgccttcggcaccatcgccatccagctggcccaccacagaggcgccaaggtgatcagcaccgcctgcagcctggaggactag

SEQ ID NO: 241788 - DNA, 60 bp, Artificial Sequence
  derived and/or modified sequence
atgaagggcctgtacttccagcagagcagcaccgacgaggagatcaccttcgtgttctag

SEQ ID NO: 241789 - DNA, 597 bp, Artificial Sequence
  derived and/or modified sequence
atgaagggcctgtacttccagcagagcagcaccgacgaggagatcaccttcgtgttccaggagaaggaggacctgcccgtgaccgaggacaacttcgtgaagctgcaggtgaaggcctgcgccctgagccagatcaacaccaagctgctggccgagatgaagatgaagaaggacctgttccccgtgggcagagagatcgccggcatcgtgctggacgtgggcagcaaggtgagcttcttccagcccgacgacgaggtggtgggcatcctgcccctggacagcgaggaccccggcctgtgcgaggtggtgagagtgcacgagcactacctggtgcacaagcccgagaaggtgacctggaccgaggccgccggcagcatcagagacggcgtgagagcctacaccgccctgcactacctgagccacctgagccccggcaagagcgtgctgatcatggacggcgccagcgccttcggcaccatcgccatccagctggcccaccacagaggcgccaaggtgatcagcaccgcctgcagcctggaggacaagcagtgcctggagagattcagaccccccatcgagaacagcaccatcgcctag

SEQ ID NO: 241790 - protein, 212 aa, Artificial Sequence
  derived and/or modified sequence
MRMTMEEMKNEAETTSMVSMPLYAVMYPVFNELERVNLSAAQTLRAAFIKAEKENPGLTQDIIMKILEKKSVEVNFTESLLRMAADDVEEYMIERPEPEFQDLNEKARALKQILSKIPDEINDRVRFLQTIKDIASAIKELLDTVNNVFKKYQYQNRRALEHQKKEFVKYSKSFSDTLKTYFKDGKAINVFVSANRLIHQTNLILQTFKTVA

SEQ ID NO: 241791 - protein, 146 aa, Artificial Sequence
  derived and/or modified sequence
MRMTMEEMKNEAETTSMVSMPLYAVMYPVFNELERVNLSAAQTLRAAFIKAEKENPGLTQDIIMKILEKKSVEVNFTESLLRMAADDVEEYMIERPEPEFQDLNEKARALKQILSKIPDEINDRVRFLQTIKDIASAIKELLDTVN

SEQ ID NO: 241792 - protein, 79 aa, Artificial Sequence
  derived and/or modified sequence
MRMTMEEMKNEAETTSMVSMPLYAVMYPVFNELERVNLSAAQTLRAAFIKAEKENPGLTQDIIMKILEKKSVEVNFTES

SEQ ID NO: 241793 - protein, 202 aa, Artificial Sequence
  derived and/or modified sequence
MRMTMEEMKNEAETTSMVSMPLYAVMYPVFNELERVNLSAAQTLRAAFIKAEKENPGLTQDIIMKILEKKSVEVNFTESLLRMAADDVEEYMIERPEPEFQDLNEKARALKQILSKIPDEINDRVRFLQTIKDIASAIKELLDTVNNVFKKYQYQNRRALEHQKKEFVKYSKSFSDTLKTYFKDGKAINVFVSANRLIHQTN

SEQ ID NO: 241794 - protein, 186 aa, Artificial Sequence
  derived and/or modified sequence
MRMTMEEMKNEAETTSMVSMPLYAVMYPVFNELERVNLSAAQTLRAAFIKAEKENPGLTQDIIMKILEKKSVEVNFTESLLRMAADDVEEYMIERPEPEFQDLNEKARALKQILSKIPDEINDRVRFLQTIKDIASAIKELLDTVNNVFKKYQYQNRRALEHQKKEFVKYSKSFSDTLKTYFKDGK

SEQ ID NO: 241795 - protein, 134 aa, Artificial Sequence
  derived and/or modified sequence
MRMTMEEMKNEAETTSMVSMPLYAVMYPVFNELERVNLSAAQTLRAAFIKAEKENPGLTQDIIMKILEKKSVEVNFTESLLRMAADDVEEYMIERPEPEFQDLNEKARALKQILSKIPDEINDRVRFLQTIKDI

SEQ ID NO: 241796 - DNA, 639 bp, Artificial Sequence
  derived and/or modified sequence
atgcgaatgaccatggaggagatgaagaacgaggccgagaccacttctatggtctccatgcctctctacgcagtcatgtacccagttttcaacgaactggaacgcgtaaatctatctgctgctcagacacttagagctgccttcataaaggccgagaaagagaaccctgggttaactcaagacataattatgaaaattttggagaagaaatcagtggaggtgaatttcacagagagtctgttaagaatggctgccgatgatgtggaggagtatatgattgagcggcccgagcccgagttccaagacctgaatgaaaaagctcgcgcattgaaacagatactttccaaaataccagatgagattaatgacagagtgcggttcttacagaccataaaggatatcgctagcgcaatcaaggagttactggacaccgtcaacaatgtgttcaaaaaataccaataccagaacaggcgggcgctggagcatcaaaagaaagaatttgttaagtattcaaagtccttttccgacaccctgaagacttattttaaggacggaaaggccattaatgtgtttgtgagcgcaaatagattgatccatcaaaccaacctgatccttcagacattcaaaaccgtggcgtag

SEQ ID NO: 241797 - DNA, 639 bp, Artificial Sequence
  derived and/or modified sequence
atgagaatgactatggaggaaatgaagaatgaggccgagaccacctccatggtgtccatgcccctgtacgcggtcatgtaccccgtatttaatgagctggaacgagttaacctgagtgccgcccagacattgcgggctgctttcattaaggcagagaaagagaatccgggccttacccaggacattatcatgaagattctagaaaagaaatccgtcgaggtgaactttaccgaatcactgctgaggatggcggctgatgatgtagaggagtatatgattgaacgtccagaacctgaattccaggacttaaacgagaaggcacgagcccttaagcagatactgtctaaaattccggatgagattaatgatcgcgtgcgatttcttcagaccataaaagatattgcttccgcgatcaaagagctcctcgacactgtgaacaacgtcttcaagaagtaccagtaccaaaatcgcagggcgcttgaacatcagaagaaagagtttgtgaaatatagtaagtccttctcagatacgctgaagacctacttcaaggacggcaaggccatcaacgtatttgtcagcgccaatcgtctgatccatcagacaaatctgatcctgcagacctttaaaacggtggcttag

SEQ ID NO: 241798 - DNA, 441 bp, Artificial Sequence
  derived and/or modified sequence
atgcgtatgactatggaggaaatgaaaaacgaagcagagaccacttcaatggtaagcatgcctctgtacgcggtgatgtaccccgtgtttaacgagcttgaaagagttaacctaagcgcagcccagaccctgcgggcagccttcattaaggctgagaaggagaaccctggactgacccaagatattatcatgaagattcttgaaaagaaaagtgtggaagtaaattttaccgagagtttgctcaggatggctgctgacgatgtggaggaatatatgatcgagaggccagagcccgagtttcaggatctaaacgagaaggcacgggctctgaagcagatcctgagtaaaattcctgacgaaattaacgaccgcgtgcgattcctgcagactatcaaggacatcgctagcgccattaaagagttacttgataccgtgaattag

SEQ ID NO: 241799 - DNA, 240 bp, Artificial Sequence
  derived and/or modified sequence
atgagaatgacgatggaagagatgaagaatgaagcagagacaacctccatggtaagcatgcccctgtacgctgtcatgtaccccgtgtttaacgagcttgagcgcgtaaacctgtccgccgcgcagactttacgggccgctttcattaaggccgaaaaagagaaccctggcttaactcaggatataataatgaagatcctggaaaaaaagtccgttgaggtcaactttaccgagtcttag

SEQ ID NO: 241800 - DNA, 639 bp, Artificial Sequence
  derived and/or modified sequence
atgcggatgaccatggaagaaatgaagaacgaagctgaaaccaccagcatggtttcaatgcctctgtatgctgtcatgtacccagtctttaacgagctggagagggtgaatctgtccgcggcccagacattgcgagccgcttttattaaggccgaaaaggaaaatcccgggctcacacaggacataatcatgaaaatattggagaagaaaagcgtggaggtgaactttacagaatccctcctccgcatggcggcggacgacgttgaggaatacatgattgagcgacctgaaccggagtttcaagacttgaatgagaaggcccgggcactgaagcagatcctgagcaagatacctgatgagatcaacgaccgtgtgcgcttcttgcagacaattaaagatatagctagcgcgatcaaggagttattggatacagtgaataacgttttcaaaaagtaccaataccagaataggcgtgcactagaacaccagaagaaggaatttgtgaagtacagcaagtccttctctgatacactgaagacctacttcaaggacggaaaggccattaacgtgttcgtaagcgccaaccgcctcattcaccagacaaacctcattctacaaacctttaagaccgtggcatag

SEQ ID NO: 241801 - DNA, 639 bp, Artificial Sequence
  derived and/or modified sequence
atgcgcatgactatggaggaaatgaaaaatgaagcagaaactaccagtatggttagcatgcccctgtacgccgttatgtacccagtgttcaatgaacttgaaagggtgaatcttagcgctgcacagacattacgggctgcattcattaaagcggagaaggagaatccaggactcacccaggacattatcatgaagattctcgaaaaaaaatcagtggaagtgaattttaccgaatccctgctcagaatggcagccgacgacgtcgaagagtatatgattgagcgccctgaacccgagtttcaggacttgaacgagaaagcacgcgccctgaagcagatactaagtaaaatcccagacgagatcaacgatcgggtaagattcctccagactataaaggacatcgcaagcgccatcaaggagttgttggataccgttaacaacgtgttcaaaaagtatcagtatcagaacagacgggccttggaacaccagaagaaggaattcgtgaagtactccaaatcatttagtgacactctgaaaacatattttaaggacggaaaggcaatcaatgtgttcgtctcagcaaaccgcttgatccatcagacaaatctgattctccaaactttcaagactgtagcatag

SEQ ID NO: 241802 - DNA, 609 bp, Artificial Sequence
  derived and/or modified sequence
atgcgcatgaccatggaggagatgaaaaatgaagccgagacaactagtatggtgtcaatgcccctatacgctgtgatgtaccccgtctttaacgagctggaacgggtcaatctgagtgccgcccagacccttcgggctgcctttattaaagccgaaaaagagaatccagggcttacacaagatattatcatgaaaattctcgaaaagaaaagcgtcgaagtcaacttcacagagagcctcttgaggatggcagctgatgacgtggaggagtacatgatcgaacgtcctgaaccagaattccaggacttgaatgaaaaggcccgcgctctcaagcagatcttgagcaagatccctgatgaaattaacgaccgcgtcaggttcctccaaacaataaaagatattgcctctgcaataaaagagttattggataccgtgaataacgtctttaagaagtaccagtaccagaaccggcgggcccttgaacatcagaagaaagagtttgtcaaatatagtaaaagcttttctgacaccttgaaaacttattttaaggatggaaaggcgattaatgtctttgtgagtgccaatcgcctcatccaccagactaactag

SEQ ID NO: 241803 - DNA, 561 bp, Artificial Sequence
  derived and/or modified sequence
atgcgcatgactatggaagagatgaagaacgaggcagaaacgacaagtatggtgtccatgcctctgtatgccgtgatgtacccagtgtttaatgaactggagagagtaaacttgagtgctgcccagacactgcgtgccgcatttattaaagccgaaaaagagaacccagggctgacccaggacataatcatgaagatactcgaaaagaaatctgtggaggtgaacttcactgagtcactcttgagaatggctgccgatgacgtggaggaatacatgattgaaaggcctgagcctgagtttcaagacctcaacgaaaaggctagggctttaaaacagatcctgagcaaaatacccgacgaaatcaacgaccgggtcaggttcttacagacaatcaaggacattgcctcagctatcaaggagctcctggatacagtgaacaatgtgttcaaaaagtaccaatatcagaatcgccgagcactggaacaccagaaaaaggaattcgtcaagtattcaaagtccttcagcgacacactcaaaacctatttcaaagacggaaagtag

SEQ ID NO: 241804 - DNA, 405 bp, Artificial Sequence
  derived and/or modified sequence
atgcgtatgactatggaagaaatgaagaacgaggccgagactacaagcatggtgagtatgccactatatgctgtaatgtaccccgtatttaacgaactggaacgggtgaacctgagtgccgcgcagaccctcagggctgcattcattaaggctgagaaggaaaatcccggtctcacgcaagacattataatgaaaatcctggaaaaaaaaagcgtggaagtcaacttcacagagtctctgttaaggatggcagccgatgacgtcgaggagtacatgatcgagcgccccgaacccgaattccaggatctgaatgagaaggcacgggctttaaagcagatcctttctaagatcccagacgagatcaatgacagggttcgctttctccagacgatcaaggatatctag

SEQ ID NO: 241805 - DNA, 639 bp, Artificial Sequence
  derived and/or modified sequence
atgcgaatgacgatggaagagatgaagaatgaggctgagactacctccatggtaagtatgcccttgtatgctgtgatgtaccccgttttcaacgagctggagcgggtgaacctgagcgctgcacagactctgagggctgctttcatcaaggctgagaaggaaaatcccggcctaactcaggatattatcatgaagatcctggagaaaaaaagcgtggaagtgaattttacagagtccttactccgcatggcagccgacgatgtcgaggaatacatgatcgagcgccccgagccagagtttcaggacctgaatgagaaagcgcgggccctgaagcagatcctcagtaaaattccggatgaaattaacgatcgcgtgcgattcctgcaaaccattaaggacatcgcttcagctatcaaggagcttctggacactgttaataacgtgttcaagaaataccagtaccagaaccgtagggcactggaacatcaaaaaaaggaatttgtcaaatacagcaagtccttctctgacactctgaaaacctactttaaagacggcaaagccattaacgtgttcgtctctgcgaatagactgatacatcagaccaacctgattttacagactttcaaaaccgttgcctag

SEQ ID NO: 241806 - DNA, 639 bp, Artificial Sequence
  derived and/or modified sequence
atgaggatgaccatggaggagatgaagaatgaggccgagaccacctccatggtgtccatgcccctgtatgctgtgatgtaccctgtgttcaatgagctggagcgggtgaacctgtctgctgcccagaccctgcgggccgccttcatcaaggccgagaaggagaaccctggcctgacccaggacatcatcatgaagatcctggagaagaagtctgtggaggtgaacttcacagagagcctgctgaggatggctgctgatgatgtggaggagtacatgattgaaagacctgagcctgagttccaggacctgaatgagaaggcccgggccctgaagcagatcctgagcaagatcccagatgagatcaatgacagagtgcgcttcctgcagaccatcaaggacatcgccagcgccatcaaggagctgctggacacagtgaacaacgtgttcaagaagtaccagtaccagaacagaagagccctggagcaccagaagaaggagtttgtgaagtacagcaagagcttcagtgacaccctgaagacctacttcaaggatggcaaggccatcaacgtgtttgtgtctgccaacagactcatccaccagaccaacctgatcctgcagaccttcaagacagtggcctag

SEQ ID NO: 241807 - DNA, 441 bp, Artificial Sequence
  derived and/or modified sequence
atgaggatgaccatggaggagatgaagaatgaggccgagaccacctccatggtgtccatgcccctgtatgctgtgatgtaccctgtgttcaatgagctggagcgggtgaacctgtctgctgcccagaccctgcgggccgccttcatcaaggccgagaaggagaaccctggcctgacccaggacatcatcatgaagatcctggagaagaagtctgtggaggtgaacttcacagagagcctgctgaggatggctgctgatgatgtggaggagtacatgattgaaagacctgagcctgagttccaggacctgaatgagaaggcccgggccctgaagcagatcctgagcaagatcccagatgagatcaatgacagagtgcgcttcctgcagaccatcaaggacatcgccagcgccatcaaggagctgctggacacagtgaactag

SEQ ID NO: 241808 - DNA, 240 bp, Artificial Sequence
  derived and/or modified sequence
atgaggatgaccatggaggagatgaagaatgaggccgagaccacctccatggtgtccatgcccctgtatgctgtgatgtaccctgtgttcaatgagctggagcgggtgaacctgtctgctgcccagaccctgcgggccgccttcatcaaggccgagaaggagaaccctggcctgacccaggacatcatcatgaagatcctggagaagaagtctgtggaggtgaacttcacagagagctag

SEQ ID NO: 241809 - DNA, 609 bp, Artificial Sequence
  derived and/or modified sequence
atgaggatgaccatggaggagatgaagaatgaggccgagaccacctccatggtgtccatgcccctgtatgctgtgatgtaccctgtgttcaatgagctggagcgggtgaacctgtctgctgcccagaccctgcgggccgccttcatcaaggccgagaaggagaaccctggcctgacccaggacatcatcatgaagatcctggagaagaagtctgtggaggtgaacttcacagagagcctgctgaggatggctgctgatgatgtggaggagtacatgattgaaagacctgagcctgagttccaggacctgaatgagaaggcccgggccctgaagcagatcctgagcaagatcccagatgagatcaatgacagagtgcgcttcctgcagaccatcaaggacatcgccagcgccatcaaggagctgctggacacagtgaacaacgtgttcaagaagtaccagtaccagaacagaagagccctggagcaccagaagaaggagtttgtgaagtacagcaagagcttcagtgacaccctgaagacctacttcaaggatggcaaggccatcaacgtgtttgtgtctgccaacagactcatccaccagaccaactag

SEQ ID NO: 241810 - DNA, 561 bp, Artificial Sequence
  derived and/or modified sequence
atgaggatgaccatggaggagatgaagaatgaggccgagaccacctccatggtgtccatgcccctgtatgctgtgatgtaccctgtgttcaatgagctggagcgggtgaacctgtctgctgcccagaccctgcgggccgccttcatcaaggccgagaaggagaaccctggcctgacccaggacatcatcatgaagatcctggagaagaagtctgtggaggtgaacttcacagagagcctgctgaggatggctgctgatgatgtggaggagtacatgattgaaagacctgagcctgagttccaggacctgaatgagaaggcccgggccctgaagcagatcctgagcaagatcccagatgagatcaatgacagagtgcgcttcctgcagaccatcaaggacatcgccagcgccatcaaggagctgctggacacagtgaacaacgtgttcaagaagtaccagtaccagaacagaagagccctggagcaccagaagaaggagtttgtgaagtacagcaagagcttcagtgacaccctgaagacctacttcaaggatggcaagtag

SEQ ID NO: 241811 - DNA, 405 bp, Artificial Sequence
  derived and/or modified sequence
atgaggatgaccatggaggagatgaagaatgaggccgagaccacctccatggtgtccatgcccctgtatgctgtgatgtaccctgtgttcaatgagctggagcgggtgaacctgtctgctgcccagaccctgcgggccgccttcatcaaggccgagaaggagaaccctggcctgacccaggacatcatcatgaagatcctggagaagaagtctgtggaggtgaacttcacagagagcctgctgaggatggctgctgatgatgtggaggagtacatgattgaaagacctgagcctgagttccaggacctgaatgagaaggcccgggccctgaagcagatcctgagcaagatcccagatgagatcaatgacagagtgcgcttcctgcagaccatcaaggacatctag

SEQ ID NO: 241812 - DNA, 639 bp, Artificial Sequence
  derived and/or modified sequence
atgcggatgaccatggaggagatgaagaacgaggccgagaccacctctatggtttcaatgcctctgtatgccgtgatgtacccggtgtttaacgagctcgagagagtgaacctgtctgctgctcagaccctccgagctgccttcatcaaggccgaaaaagagaaccctggactcactcaggatatcatcatgaaaatcctcgaaaagaaaagcgttgaggtaaactttactgaaagcttgcttaggatggccgctgatgatgtcgaagagtatatgatcgaaagacccgaacctgagtttcaagacttgaacgagaaggcccgagccttaaagcaaatactgtcaaaaatacccgatgagatcaacgaccgcgtccggttcctccagaccattaaagacatcgcgtctgccataaaggagttactggacaccgtgaacaacgtcttcaagaaatatcagtaccagaaccgacgggcacttgagcaccagaagaaagagtttgtcaagtacagtaagtcattttcagacacattaaaaacctacttcaaagacggtaaggctatcaacgtctttgtttctgcgaaccggttgattcaccagaccaatctcatactccagactttcaaaacggtggcttag

SEQ ID NO: 241813 - DNA, 639 bp, Artificial Sequence
  derived and/or modified sequence
atgcggatgaccatggaggagatgaagaacgaggccgagaccacctccatggtgtccatgcccctgtatgcggtcatgtatcccgtttttaacgaactggagcgggtgaatctctccgcagcccagaccctcagagctgcttttattaaggcagaaaaagaaaatccagggttgacccaggatatcattatgaaaatcctcgaaaagaagtctgtggaagtcaacttcacggagagccttctgagaatggctgcagacgatgtggaggagtacatgatagagcggcctgagcctgagtttcaagacctgaatgaaaaagctagggcactgaaacagattctcagcaaaattcctgatgagattaacgacagggtgcgattcctgcagaccattaaggacattgctagcgcaatcaaggagcttctggatacagtgaataacgtcttcaagaagtaccagtaccaaaaccgcagagctctggaacatcagaagaaggaattcgtcaagtactccaagagcttctcagatacattgaagacatactttaaggacggaaaggcaataaacgtctttgtgagcgccaaccgcctgatccatcaaacaaatctaatactgcagacattcaagactgtcgcttag

SEQ ID NO: 241814 - DNA, 441 bp, Artificial Sequence
  derived and/or modified sequence
atgcggatgaccatggaggagatgaagaacgaggccgagaccacctctatggtctcaatgccactgtatgccgtcatgtatcctgtctttaatgagctagagcgggtgaacctctcagctgcccagaccctgagggccgctttcatcaaggctgaaaaagagaaccctgggctgacccaggacattatcatgaaaatcctagagaagaagtccgtggaagtcaattttactgagtctctcttacggatggcagcggacgacgtcgaggagtacatgatcgagcgacctgagccagagtttcaagacttgaatgagaaggctagggccttgaaacagattcttagtaagattccagatgagatcaacgaccgggtccggttcttgcaaaccatcaaagatattgcttcggccataaaagagctgctggacactgtgaactag

SEQ ID NO: 241815 - DNA, 240 bp, Artificial Sequence
  derived and/or modified sequence
atgcggatgaccatggaggagatgaagaacgaggccgagaccacctcaatggtgtcaatgcccctctatgccgttatgtatccagtctttaacgagttggaacgagtgaatctgtccgctgctcagacacttagggccgctttcattaaggcagagaaggagaatccaggccttactcaagacattatcatgaaaattctggagaagaaatcagtggaagttaactttactgagagctag

SEQ ID NO: 241816 - DNA, 639 bp, Artificial Sequence
  derived and/or modified sequence
atgcggatgaccatggaggagatgaagaacgaggccgagaccaccagcatggtgagcatgccgctctatgccgttatgtaccctgtattcaacgagcttgaacgggtgaacctaagcgcagctcagacactgagagcggcatttatcaaagccgagaaagaaaaccccggattgacacaggacatcatcatgaaaatcctcgagaaaaaatccgtggaagtgaattttaccgaatctctgttgcggatggccgccgatgacgtggaggagtacatgatcgagcggccagaacccgagttccaggatctgaacgagaaggcaagagcactaaagcaaatactgagtaaaattccagacgagatcaatgacagggtgcggttccttcagaccattaaggatattgccagcgccatcaaggagctgctggatacggtgaataatgtttttaagaagtatcagtaccagaatagaagagcgctggaacatcagaaaaaggaatttgttaagtatagtaagtctttctccgacacactaaagacttactttaaggacggtaaagcaatcaacgtctttgtgagcgcaaaccgcttaatacaccagaccaaccttatcctccagacctttaaaacagtggcttag

SEQ ID NO: 241817 - DNA, 639 bp, Artificial Sequence
  derived and/or modified sequence
atgcggatgaccatggaggagatgaagaacgaggccgagaccaccagcatggttagcatgccactgtacgctgtcatgtatccggtctttaatgaattggaacgggttaacttatcagcggcacaaactttaagggccgccttcataaaggcagaaaaagagaatcctggcctgacccaggacatcattatgaaaatactggaaaagaaatctgtcgaagttaattttaccgaaagtctgctacgtatggctgcagacgacgttgaggagtacatgatcgagaggcccgagcccgaatttcaggaccttaacgagaaagctcgagctcttaagcagattctttcaaaaatacccgatgaaataaacgaccgcgtccgttttctccaaactatcaaagacatagcaagtgcaatcaaagagctgttagacaccgtcaataacgttttcaaaaagtatcaataccaaaacagacgcgctctggagcaccagaaaaaggagtttgtcaagtacagcaagtcattttccgacactctaaagacctattttaaggacggaaaggcgatcaatgtgtttgtcagcgctaatagactcatccaccagactaacctgatcctccaaactttcaaaacagtcgcttag

SEQ ID NO: 241818 - DNA, 609 bp, Artificial Sequence
  derived and/or modified sequence
atgcggatgaccatggaggagatgaagaacgaggccgagaccacctcaatggtgagcatgccattatacgccgttatgtacccggtcttcaatgaactggaacgggtgaatctctctgctgcgcagactctccgcgctgcttttattaaggctgagaaggagaacccaggccttacacaggacattatcatgaaaatcctggagaaaaagagcgttgaagtaaactttaccgaatccctgttgcgtatggccgccgacgatgtggaggaatatatgatcgagcggccagagccggaatttcaggatttaaatgagaaggcgagagcgttgaaacagatcctctctaaaatccccgatgaaatcaacgatcgagtgagatttctgcaaacgattaaagatatcgcttcagcaatcaaggagcttctagacaccgtgaacaacgtgtttaaaaagtaccagtatcagaacagaagggctctcgagcatcagaagaaggagtttgtgaagtactctaagtcattcagcgacacactgaagacatattttaaggacggcaaagctatcaatgtgttcgtttcagccaatagattaatccaccagaccaactag

SEQ ID NO: 241819 - DNA, 561 bp, Artificial Sequence
  derived and/or modified sequence
atgcggatgaccatggaggagatgaagaacgaggccgagaccacctccatggtgtcaatgcctctctatgcagtgatgtacccagtatttaacgagctggagcgagtgaacctttctgcagcacaaactctgagagcggcctttatcaaggctgaaaaggagaatcctggtttaacccaagatatcatcatgaagatactggaaaaaaagagcgtggaggtcaactttaccgagtccctgctgcgtatggccgccgatgacgttgaagaatacatgattgagcgtccagagcctgaattccaagacctgaacgagaaggctagggctctgaagcaaatcctgtccaagattcctgatgagattaacgatagggttagattcctccagacaatcaaggatattgcatccgctattaaagagttgctcgataccgtgaacaatgtgttcaagaaataccagtaccagaatagacgagccctggaacaccagaagaaagaatttgtgaaatacagtaagagcttcagtgacacgctcaaaacatactttaaagatggcaagtag

SEQ ID NO: 241820 - DNA, 405 bp, Artificial Sequence
  derived and/or modified sequence
atgcggatgaccatggaggagatgaagaacgaggccgagaccaccagcatggtgagcatgcctctgtatgccgttatgtatccagtgttcaatgagctggagcgggttaatctgagtgccgcacagacactccgcgccgctttcattaaggctgagaaagagaacccaggtctgactcaggacatcatcatgaaaatccttgagaagaaatccgtagaggtgaatttcaccgaaagcctccttaggatggctgctgacgacgtggaagaatacatgatcgaacgacctgaacccgagttccaggatctcaacgaaaaggcaagggcactgaagcagatactctcaaaaatcccagacgagattaacgacagagtccggtttctgcagaccatcaaggatatctag

SEQ ID NO: 241821 - DNA, 639 bp, Artificial Sequence
  derived and/or modified sequence
atgcggatgaccatggaggagatgaagaacgaggccgagaccacctcgatggtgagcatgccgctatatgctgttatgtatccagtctttaacgaactagaaagagtaaacctcagcgccgcacagaccttaagagcggcttttattaaggctgaaaaggagaaccctggcttgacacaggacatcatcatgaagattctggagaagaaatcggtagaagtcaactttaccgaatctctgctgcgcatggctgccgacgacgtcgaggaatacatgatcgagagacctgaacctgagttccaagatctcaacgagaaggccagggctttaaagcagatcctgtcaaaaatccctgacgagatcaatgatcgagtcagatttttacaaacgatcaaagatattgcgagcgccattaaggaactactcgatacagtgaacaacgtgttcaaaaagtatcagtatcaaaataggcgcgcgctggagcaccagaaaaaagagtttgtgaagtattcgaaatcttttagtgacactctaaaaacttacttcaaggacgggaaggctatcaacgtctttgtaagtgctaacagactcatacatcaaacgaatctgattctgcagacctttaaaaccgtggcttag

SEQ ID NO: 241822 - DNA, 639 bp, Artificial Sequence
  derived and/or modified sequence
atgcggatgaccatggaggagatgaagaatgaggccgagaccacatccatggttagcatgccgctatacgcggtgatgtatcccgttttcaacgagttggagcgcgtgaatctttcagccgcacaaactttgcgcgctgctttcatcaaggcagagaaagagaatcccggtctgacccaggatatcataatgaaaatcctggaaaaaaagagcgtggaagtgaactttaccgaatcacttctgcggatggccgcagatgacgtcgaggagtacatgattgagagaccagagcctgagtttcaggacctgaacgaaaaagcccgtgctctgaagcagattctttcaaaaatacccgacgagattaacgacagagtacgattccttcaaaccattaaggacatcgcgagtgctatcaaggagttgcttgacaccgtaaataatgttttcaagaaataccagtaccagaataggcgcgctttggagcatcagaagaaagaatttgtgaagtattcgaagagcttttcagataccttgaaaacttatttcaaagatggaaaggcaattaatgtctttgtgtcagccaatagactcattcatcaaacaaatctgattctgcagacgtttaaaactgtagcctag

SEQ ID NO: 241823 - DNA, 639 bp, Artificial Sequence
  derived and/or modified sequence
atgcgaatgactatggaggaaatgaaaaatgaggctgagactacatccatggtgtctatgccactttacgccgttatgtaccccgtgtttaacgaactggagagagtgaacctgtccgcagcccagaccctccgtgccgcattcatcaaggccgaaaaggagaacccaggccttacacaggatattatcatgaagattctggaaaagaagagtgtcgaagtcaacttcacggagtcactccttaggatggccgcagatgacgtggaagaatacatgatcgagcgccctgagcctgaattccaggatttaaatgagaaagcgcgagctctgaaacagatcctgtctaaaattccagacgagatcaatgatagggtgcgctttctgcagactatcaaagacatagcctccgcaatcaaggaactcctcgatacggtgaataacgtgttcaagaaataccagtaccaaaacagaagagcactcgagcatcagaagaaagagtttgtcaagtattccaaaagtttttccgacaccttaaagacctacttcaaagatgggaaagccattaacgtgtttgtgtccgcgaacagactcattcaccagacaaatctcatacttcagaccttcaagaccgtggcttag

SEQ ID NO: 241824 - DNA, 441 bp, Artificial Sequence
  derived and/or modified sequence
atgcggatgacgatggaggagatgaaaaatgaagccgagactaccagtatggtctccatgcctctgtacgccgtaatgtatccagtatttaatgaattagagcgggtcaacctttccgccgcacaaacactcagagccgctttcatcaaggctgaaaaggagaaccccggactgacacaggacataataatgaaaattttggaaaaaaagagtgtggaggttaatttcaccgaatccctccttcggatggctgcagatgacgtggaagagtatatgatcgagaggcctgaacccgagtttcaagatctcaatgagaaggcacgcgctttaaagcagatactaagtaagattcccgatgagataaacgacagagtgagattccttcagaccattaaggatattgcgtcagcaattaaggaactgctcgacacagtgaattag

SEQ ID NO: 241825 - DNA, 240 bp, Artificial Sequence
  derived and/or modified sequence
atgcgtatgacaatggaggaaatgaagaacgaggccgagactacctctatggtgagcatgccattatacgccgtgatgtaccctgtcttcaacgaacttgaacgcgttaacctgtccgctgcccaaacgctgcgagccgcatttataaaggccgagaaggagaatcctggcttgacacaggatattatcatgaaaatactggagaagaagtccgtggaggttaattttacagaatcatag

SEQ ID NO: 241826 - DNA, 639 bp, Artificial Sequence
  derived and/or modified sequence
atgaggatgacaatggaggagatgaagaacgaggctgagactacttcgatggtctctatgcccctctacgcagtgatgtacccggtgttcaatgagctggaaagggttaacttgagcgctgcacagaccttgagagctgcattcattaaagcagagaaggaaaacccaggtctcacccaggatatcataatgaagattctggagaagaagtctgtggaagttaacttcaccgaatcattattgagaatggctgcggatgatgtggaagagtatatgatcgaaagaccagaaccggagtttcaggacctaaatgagaaagcgagggccctaaaacagattctgagcaagattcccgacgagatcaacgacagggtgcgctttttgcagacaatcaaggatatcgcctcggccatcaaagaactgttagatacagtcaataatgtgttcaagaaatatcagtatcagaataggagagcattggagcatcagaagaaagaattcgttaaatatagcaaaagcttcagcgatacgttgaagacctactttaaagatgggaaggccattaatgttttcgttagtgccaacaggttgatccaccagaccaatctgattctgcaaacctttaagaccgtcgcctag

SEQ ID NO: 241827 - DNA, 639 bp, Artificial Sequence
  derived and/or modified sequence
atgaggatgactatggaagagatgaagaacgaggcagagacaacgagtatggtgtctatgcccctgtacgctgtcatgtatccagtatttaatgaacttgagcgcgtgaatctgtcagccgctcagactctgagagccgctttcattaaagcagaaaaggaaaatcccggtttgactcaagacatcattatgaaaatccttgagaaaaaaagcgtggaggtcaactttactgagtccttactgcgcatggcagccgacgacgtcgaggaatacatgattgagcgaccggaaccggagttccaagaccttaacgagaaggccagggccctgaaacagatcctgtccaagatcccagatgagattaatgatagggtgagatttctgcaaacaatcaaggatatcgcttctgccattaaggaactcctcgatactgtcaacaacgtattcaagaagtatcagtaccagaaccgtcgggcactcgaacaccagaaaaaggagttcgtgaagtactctaagagcttctccgataccctgaagacatacttcaaagacggcaaggctataaacgtcttcgtgagcgcgaacaggctgatccaccagaccaacttaatcctgcagaccttcaagactgtggcctag

SEQ ID NO: 241828 - DNA, 609 bp, Artificial Sequence
  derived and/or modified sequence
atgcggatgacaatggaggagatgaaaaacgaagctgaaacaacctccatggtaagtatgcctctctacgcagtgatgtaccccgtgttcaacgagcttgaacgtgtgaacttaagcgccgctcagaccctccgtgccgcatttataaaagccgagaaagaaaaccccggtctgacacaggatatcatcatgaagattctggagaaaaaatccgtggaagtgaatttcaccgaaagtcttttgcgtatggcagctgatgacgtggaggagtatatgatcgaaaggcctgagccagagtttcaggacctgaacgaaaaggccagggcccttaagcagatcctttccaagatccctgacgagatcaacgacagagtaaggtttttgcagacgattaaggacatcgcatctgcgattaaggagctcttggatactgtaaacaacgtgttcaaaaagtaccagtatcagaaccgccgagccctcgaacatcagaaaaaggaattcgtcaaatattcaaagagcttttcagacacattaaaaacttattttaaagatggtaaagcaattaacgtgttcgtaagcgccaacagactgatccaccaaactaattag

SEQ ID NO: 241829 - DNA, 561 bp, Artificial Sequence
  derived and/or modified sequence
atgcggatgacaatggaggagatgaaaaacgaggccgaaaccacctcgatggtctccatgcccctgtacgctgttatgtaccccgtgtttaacgaactggagagagtcaacctgagcgccgctcagacccttcgcgctgccttcattaaggcggagaaggaaaatcctggcctcacgcaagacatcatcatgaaaattctggaaaaaaagtctgtcgaagtgaactttaccgagtctttgttgcggatggccgcagatgacgtggaagagtacatgatcgagagaccagaaccagagtttcaggacctgaatgaaaaagcccgtgcattaaaacagatcctatccaagatcccagatgaaattaatgacagggtgaggttcctgcagactatcaaggacatcgccagcgcaattaaagaactgctcgataccgtcaacaatgtgtttaagaagtaccagtaccaaaaccggagggctcttgagcatcaaaagaaggagtttgttaaatatagtaagtcattctctgacactctgaaaacctattttaaggacggaaagtag

SEQ ID NO: 241830 - DNA, 405 bp, Artificial Sequence
  derived and/or modified sequence
atgaggatgactatggaggaaatgaaaaatgaagcagagaccacgagcatggttagtatgccgctctatgctgtgatgtaccccgtgttcaacgaactggaacgggtcaatctttccgctgcgcagacgctgcgcgcagccttcataaaagccgagaaagagaatcctgggctcactcaggacatcatcatgaaaattttggaaaagaaatcagtggaggttaactttacagagtctctgctcaggatggccgctgacgacgtcgaggagtatatgatagaacgacctgagccggagtttcaagatctgaatgaaaaggccagagctctgaagcagatcctcagcaagattccagacgaaatcaatgaccgggtgaggttcctgcagacaatcaaggatatttag

SEQ ID NO: 241831 - DNA, 639 bp, Artificial Sequence
  derived and/or modified sequence
atgcggatgaccatggaggagatgaagaacgaagctgagacaactagcatggtttctatgccactgtatgcagtgatgtaccccgtcttcaatgagctggaacgggtgaatctgtctgccgcacagaccctgcgagcagcttttataaaggcagagaaagagaaccctggtctcacacaggatattataatgaagatcctcgagaaaaaatcagtggaggtgaacttcacagagagcttacttcggatggctgctgatgacgtcgaagagtacatgatcgaacgacctgaaccagaatttcaagacctgaatgaaaaagcgagagccctgaagcaaatactttccaagataccagacgaaataaatgatagagtgcgctttctccaaacaatcaaagacatcgcgagcgcaataaaggaacttctggacactgtgaataatgttttcaaaaagtaccagtatcagaatcgcagggcgctggaacaccagaagaaggagtttgtgaaatattccaaatcattctccgacacactgaagacctactttaaggatggtaaggctattaacgtgtttgtgagtgcgaacaggctgatccaccagaccaaccttatcctccagacctttaagactgtcgcttag

SEQ ID NO: 241832 - DNA, 2067 bp, Artificial Sequence
  derived and/or modified sequence
aagtcagtgcctcagttgctggtaaggtgtagctgttctgtcccagtccccgtagctctgcaccgagcagaagaggtctagggtcacgcaggggccatggctgaggcacttgggcttggttctggcaggcggagcggacggggctgagagcggggccctacgggcggaagaggagcactggaagaaggaagagacaaatgttggggtctacggattcagttccagtttaatgatgtggccctctaaggagataattttgccttaaacagaaagacttgaccctcttaggtgtcatacctaagatcagtgtgttttttgtgtccaattcttttatcaccaaaaaagagaagaaatattgcagtgaatgaagattcctctgcattttagcactgctttttcaactgtagttggcttttgaatgaggatgacaatggaagagatgaagaatgaagctgagaccacatccatggtttctatgcccctctatgcagtcatgtatcctgtgtttaatgagctagaacgagtaaatctgtctgcagcccagacactgagagccgctttcatcaaggctgaaaaagaaaatccaggtctcacacaagacatcattatgaaaattttagagaaaaaaagcgtggaagttaacttcacggagtcccttcttcgtatggcagctgatgatgtagaagagtatatgattgaacgaccagagccagaattccaagacctaaacgaaaaggcacgagcacttaaacaaattctcagtaagatcccagatgagatcaatgacagagtgaggtttctgcagacaatcaaggatatagctagtgcaataaaagaacttcttgatacagtgaataatgtcttcaagaaatatcaataccagaaccgcagggcacttgaacaccaaaagaaagaatttgtaaagtactccaaaagtttcagtgatactctgaaaacgtattttaaagatggcaaggcaataaatgtgttcgtaagtgccaaccgactaattcatcaaaccaacttaatacttcagaccttcaaaactgtggcctgaaagttgtatatgttaagagatgtacttctcagtggcagtattgaactgcctttatctgtaaattttaaagtttgactgtataaattatcagtccctcctgaagggatctaatccaggatgttgaatgggattattgccatcttacaccatatttttgtaaaatgtagcttaatcataatctcacactgaagattttgcatcacttttgctattatcattcttttaagaattataagccaaaagaatttacgccttaatgtgtcattatataacattccttaaaagaattgtaaatattggtgtttgtttctgacattttaacttgaaagcgatatgctgcaagataatgtatttaacaatatttggtggcaaatattcaataaatagtttacatctgttaaacatttctttacttgaaaaaatgcatatatatatgtgtgtatatatatatatatatatatatatatgaacagaagaccaagacaacttggtgtaatgtctaaaaaacttctaatgggagcttatcagcagtttatcaaataataaagcaagaatttctatttttgtccttaatcactttggacacagagtagtcaatggaaatatttttgttaattacttataaggtactgagtatttttatatgatttccaacctgttttaaacgacttatgagtaagagatagcattttctagtgtttttgcactataatgccactttttgaactcttgtgacaaatgtagatttgactcttaaaaattaagcctttcgtatactgggccctcataagctttgcacaattttttcccaaaaaatagccacaattaatagtaatttgaagctatatcaacggttggattgaaattgtcatgagtgttaatattatatacactcttcaactaggtacagttttatttcaccatagagaagttttaaggaaattatgtatcaagtgttcatgttaagtggtttcatttttcaattataaaataaagggaaaaaatcagaa

SEQ ID NO: 241833 - DNA, 934 bp, Artificial Sequence
  derived and/or modified sequence
aggttggcccctggtgccccgggagaggggacagggcggatgtgcctggggtggggtcctttgaaggtgtggcttcggaccgagaggtgaggctgctgttttccccctgctttatcagtgtgttttttgtgtccaattcttttatcaccaaaaaagagaagaaatattgcagtgaatgaagattcctctgcattttagcactgctttttcaactgtagttggcttttgaatgaggatgacaatggaagagatgaagaatgaagctgagaccacatccatggtttctatgcccctctatgcagtcatgtatcctgtgtttaatgagctagaacgagtaaatctgtctgcagcccagacactgagagccgctttcatcaaggctgaaaaagaaaatccaggtctcacacaagacatcattatgaaaattttagagaaaaaaagcgtggaagttaacttcacggagtcccttcttcgtatggcagctgatgatgtagaagagtatatgattgaacgaccagagccagaattccaagacctaaacgaaaaggcacgagcacttaaacaaattctcagtaagatcccagatgagatcaatgacagagtgaggtttctgcagacaatcaaggatatagctagtgcaataaaagaacttcttgatacagtgaataatgtcttcaagaaatatcaataccagaaccgcagggcacttgaacaccaaaagaaagaatttgtaaagtactccaaaagtttcagtgatactctgaaaacgtattttaaagatggcaaggcaataaatgtgttcgtaagtgccaaccgactaattcatcaaaccaacttaatacttcagaccttcaaaactgtggcctgaaagttgtatatgttaagagatgtacttctcagtggcagtattgaactgcctttatctgtaaatttt

SEQ ID NO: 241834 - DNA, 715 bp, Artificial Sequence
  derived and/or modified sequence
gggacagggcggatgtgcctggggtggggtcctttgaaggtgtggcttcggaccgagaggtgaggctgctgttttccccctgctttctttctcctctaaatcttggtctcttgtttggaagtgactaacagcattttggcatgagaaagccctaaaaagatcagtgtgttttttgtgtccaattcttttatcaccaaaaaagagaagaaatattgcagtgaatgaagattcctctgcattttagcactgctttttcaactgtagttggcttttgaatgaggatgacaatggaagagatgaagaatgaagctgagaccacatccatggtttctatgcccctctatgcagtcatgtatcctgtgtttaatgagctagaacgagtaaatctgtctgcagcccagacactgagagccgctttcatcaaggctgaaaaagaaaatccaggtctcacacaagacatcattatgaaaattttagagaaaaaaagcgtggaagttaacttcacggagtcccttcttcgtatggcagctgatgatgtagaagagtatatgattgaacgaccagagccagaattccaagacctaaacgaaaaggcacgagcacttaaacaaattctcagtaagatcccagatgagatcaatgacagagtgaggtttctgcagacaatcaaggatatagctagtgcaataaaagaacttcttgatacagtgaataa

SEQ ID NO: 241835 - DNA, 585 bp, Artificial Sequence
  derived and/or modified sequence
gaagtgaagtcagtgcctcagttgctgaggagcactggaagaaggaagagacaaatgttggggtctacggattcagttccagtttaatgatgtggccctctaaggagataattttgccttaaacagaaagacttgaccctcttaggtgtcatacctaagctttctcctctaaatcttggtctcttgtttggaagtgactaacagcattttggcatgagaaagccctaaaaagatcagtgtgttttttgtgtccaattcttttatcaccaaaaaagagaagaaatattgcagtgaatgaagattcctctgcattttagcactgctttttcaactgtagttggcttttgaatgaggatgacaatggaagagatgaagaatgaagctgagaccacatccatggtttctatgcccctctatgcagtcatgtatcctgtgtttaatgagctagaacgagtaaatctgtctgcagcccagacactgagagccgctttcatcaaggctgaaaaagaaaatccaggtctcacacaagacatcattatgaaaattttagagaaaaaaagcgtggaagttaacttcacggagtcc

SEQ ID NO: 241836 - DNA, 1026 bp, Artificial Sequence
  derived and/or modified sequence
gggtccttccggcgtcgccggagtgaattgatccgggagttgaagagggctgcaaggtgggaagtgaagtcagtgcctcagttgctgaggagcactggaagaaggaagagacaaatgttggggtctacggattcagttccagtttaatgatgtggccctctaaggagataattttgccttaaacagaaagacttgaccctcttaggtgtcatacctaagatcagtgtgttttttgtgtccaattcttttatcaccaaaaaagagaagaaatattgcagtgaatgaagattcctctgcattttagcactgctttttcaactgtagttggcttttgaatgaggatgacaatggaagagatgaagaatgaagctgagaccacatccatggtttctatgcccctctatgcagtcatgtatcctgtgtttaatgagctagaacgagtaaatctgtctgcagcccagacactgagagccgctttcatcaaggctgaaaaagaaaatccaggtctcacacaagacatcattatgaaaattttagagaaaaaaagcgtggaagttaacttcacggagtcccttcttcgtatggcagctgatgatgtagaagagtatatgattgaacgaccagagccagaattccaagacctaaacgaaaaggcacgagcacttaaacaaattctcagtaagatcccagatgagatcaatgacagagtgaggtttctgcagacaatcaaggatatagctagtgcaataaaagaacttcttgatacagtgaataatgtcttcaagaaatatcaataccagaaccgcagggcacttgaacaccaaaagaaagaatttgtaaagtactccaaaagtttcagtgatactctgaaaacgtattttaaagatggcaaggcaataaatgtgttcgtaagtgccaaccgactaattcatcaaaccaacttaatacttcagaccttcaaaactgtggcctgaaagttgtatatgttaagagatgtacttctcagtggcagtattgaactgcctt

SEQ ID NO: 241837 - DNA, 1360 bp, Artificial Sequence
  derived and/or modified sequence
gcacgactccggctgggcaggattccggacaacgcctggttcctcttgggtccttccggcgtcgccggagtgaattgatccgggagttgaagagggctgcaaggtgggaagtgaagtcagtgcctcagttgctgctttctcctctaaatcttggtctcttgtttggaagtgactaacagcattttggcatgagaaagccctaaaaagatcagtgtgttttttgtgtccaattcttttatcaccaaaaaagagaagaaatattgcagtgaatgaagattcctctgcattttagcactgctttttcaactgtagttggcttttgaatgaggatgacaatggaagagatgaagaatgaagctgagaccacatccatggtttctatgcccctctatgcagtcatgtatcctgtgtttaatgagctagaacgagtaaatctgtctgcagcccagacactgagagccgctttcatcaaggctgaaaaagaaaatccaggtctcacacaagacatcattatgaaaattttagagaaaaaaagcgtggaagttaacttcacggagtcccttcttcgtatggcagctgatgatgtagaagagtatatgattgaacgaccagagccagaattccaagacctaaacgaaaaggcacgagcacttaaacaaattctcagtaagatcccagatgagatcaatgacagagtgaggtttctgcagacaatcaaggatatagctagtgcaataaaagaacttcttgatacagtgaataatgtcttcaagaaatatcaataccagaaccgcagggcacttgaacaccaaaagaaagaatttgtaaagtactccaaaagtttcagtgatactctgaaaacgtattttaaagatggcaaggcaataaatgtgttcgtaagtgccaaccgactaattcatcaaaccaacttaatacttcagaccttcaaaactgtggcctgaaagttgtatatgttaagagatgtacttctcagtggcagtattgaactgcctttatctgtaaattttaaagtttgactgtataaattatcagtccctcctgaagggatctaatccaggatgttgaatgggattattgccatcttacaccatatttttgtaaaatgtagcttaatcataatctcacactgaagattttgcatcacttttgctattatcattcttttaagaattataagccaaaagaatttacgccttaatgtgtcattatataacattccttaaaagaattgtaaatattggtgtttgtttctgacattttaacttgaaagcgatatgctgcaagataatgtatttaacaatatttggtggcaaatattcaataaatagtttacatctgt

SEQ ID NO: 241838 - DNA, 849 bp, Artificial Sequence
  derived and/or modified sequence
ggcggatgtgcctggggtggggtcctttgaaggtgtggcttcggaccgagagctttctcctctaaatcttggtctcttgtttggaagtgactaacagcattttggcatgagaaagccctaaaaagatcagtgtgttttttgtgtccaattcttttatcaccaaaaaagagaagaaatattgcagtgaatgaagattcctctgcattttagcactgctttttcaactgtagttggcttttgaatgaggatgacaatggaagagatgaagaatgaagctgagaccacatccatggtttctatgcccctctatgcagtcatgtatcctgtgtttaatgagctagaacgagtaaatctgtctgcagcccagacactgagagccgctttcatcaaggctgaaaaagaaaatccaggtctcacacaagacatcattatgaaaattttagagaaaaaaagcgtggaagttaacttcacggagtcccttcttcgtatggcagctgatgatgtagaagagtatatgattgaacgaccagagccagaattccaagacctaaacgaaaaggcacgagcacttaaacaaattctcagtaagatcccagatgagatcaatgacagagtgaggtttctgcagacaatcaaggatatagctagtgcaataaaagaacttcttgatacagtgaataatgtcttcaagaaatatcaataccagaaccgcagggcacttgaacaccaaaagaaagaatttgtaaagtactccaaaagtttcagtgatactctgaaaacgtattttaaagatggcaaggcaataaatgtgttcgtaagtgccaaccgactaattcatcaaaccaactt

SEQ ID NO: 241839 - DNA, 716 bp, Artificial Sequence
  derived and/or modified sequence
gaaggtgtggcttcggaccgagagatcagtgtgttttttgtgtccaattcttttatcaccaaaaaagagaagaaatattgcagtgaatgaagattcctctgcattttagcactgctttttcaactgtagttggcttttgaatgaggatgacaatggaagagatgaagaatgaagctgagaccacatccatggtttctatgcccctctatgcagtcatgtatcctgtgtttaatgagctagaacgagtaaatctgtctgcagcccagacactgagagccgctttcatcaaggctgaaaaagaaaatccaggtctcacacaagacatcattatgaaaattttagagaaaaaaagcgtggaagttaacttcacggagtcccttcttcgtatggcagctgatgatgtagaagagtatatgattgaacgaccagagccagaattccaagacctaaacgaaaaggcacgagcacttaaacaaattctcagtaagatcccagatgagatcaatgacagagtgaggtttctgcagacaatcaaggatatagctagtgcaataaaagaacttcttgatacagtgaataatgtcttcaagaaatatcaataccagaaccgcagggcacttgaacaccaaaagaaagaatttgtaaagtactccaaaagtttcagtgatactctgaaaacgtattttaaagatggcaagtaagtactgtaatttatc

SEQ ID NO: 241840 - DNA, 686 bp, Artificial Sequence
  derived and/or modified sequence
gtgggaagtgaagtcagtgcctcagttgctgggaagaggagcactggaagaaggaagagacaaatgttggggtctacggattcagttccagtttaatgatgtggccctctaaggagataattttgccttaaacagaaagacttgaccctcttaggtgtcatacctaagatcagtgtgttttttgtgtccaattcttttatcaccaaaaaagagaagaaatattgcagtgaatgaagattcctctgcattttagcactgctttttcaactgtagttggcttttgaatgaggatgacaatggaagagatgaagaatgaagctgagaccacatccatggtttctatgcccctctatgcagtcatgtatcctgtgtttaatgagctagaacgagtaaatctgtctgcagcccagacactgagagccgctttcatcaaggctgaaaaagaaaatccaggtctcacacaagacatcattatgaaaattttagagaaaaaaagcgtggaagttaacttcacggagtcccttcttcgtatggcagctgatgatgtagaagagtatatgattgaacgaccagagccagaattccaagacctaaacgaaaaggcacgagcacttaaacaaattctcagtaagatcccagatgagatcaatgacagagtgaggtttctgcagacaatcaaggatata

SEQ ID NO: 241841 - DNA, 1276 bp, Artificial Sequence
  derived and/or modified sequence
cggctgggcaggattccggacaacgcctggttcctcttgggtccttccggcgtcgccggagtgaattgatccgggagttgaagagggctgcaaggtgggaagtgaagtcagtgcctcagttgctgatcagtgtgttttttgtgtccaattcttttatcaccaaaaaagagaagaaatattgcagtgaatgaagattcctctgcattttagcactgctttttcaactgtagttggcttttgaatgaggatgacaatggaagagatgaagaatgaagctgagaccacatccatggtttctatgcccctctatgcagtcatgtatcctgtgtttaatgagctagaacgagtaaatctgtctgcagcccagacactgagagccgctttcatcaaggctgaaaaagaaaatccaggtctcacacaagacatcattatgaaaattttagagaaaaaaagcgtggaagttaacttcacggagtcccttcttcgtatggcagctgatgatgtagaagagtatatgattgaacgaccagagccagaattccaagacctaaacgaaaaggcacgagcacttaaacaaattctcagtaagatcccagatgagatcaatgacagagtgaggtttctgcagacaatcaaggatatagctagtgcaataaaagaacttcttgatacagtgaataatgtcttcaagaaatatcaataccagaaccgcagggcacttgaacaccaaaagaaagaatttgtaaagtactccaaaagtttcagtgatactctgaaaacgtattttaaagatggcaaggcaataaatgtgttcgtaagtgccaaccgactaattcatcaaaccaacttaatacttcagaccttcaaaactgtggcctgaaagttgtatatgttaagagatgtacttctcagtggcagtattgaactgcctttatctgtaaattttaaagtttgactgtataaattatcagtccctcctgaagggatctaatccaggatgttgaatgggattattgccatcttacaccatatttttgtaaaatgtagcttaatcataatctcacactgaagattttgcatcacttttgctattatcattcttttaagaattataagccaaaagaatttacgccttaatgtgtcattatataacattccttaaaagaattgtaaatattggtgtttgtttctgacattttaacttgaaagcgatatgctgcaagataatgtatttaacaatatttggtggcaaatattcaataaatagtttacatct

SEQ ID NO: 241842 - DNA, 639 bp, Artificial Sequence
  derived and/or modified sequence
atgagaatgaccatggaggagatgaagaacgaggccgagaccaccagcatggtgagcatgcccctgtacgccgtgatgtaccccgtgttcaacgagctggagagagtgaacctgagcgccgcccagaccctgagagccgccttcatcaaggccgagaaggagaaccccggcctgacccaggacatcatcatgaagatcctggagaagaagagcgtggaggtgaacttcaccgagagcctgctgagaatggccgccgacgacgtggaggagtacatgatcgagagacccgagcccgagttccaggacctgaacgagaaggccagagccctgaagcagatcctgagcaagatccccgacgagatcaacgacagagtgagattcctgcagaccatcaaggacatcgccagcgccatcaaggagctgctggacaccgtgaacaacgtgttcaagaagtaccagtaccagaacagaagagccctggagcaccagaagaaggagttcgtgaagtacagcaagagcttcagcgacaccctgaagacctacttcaaggacggcaaggccatcaacgtgttcgtgagcgccaacagactgatccaccagaccaacctgatcctgcagaccttcaagaccgtggcctag

SEQ ID NO: 241843 - DNA, 441 bp, Artificial Sequence
  derived and/or modified sequence
atgagaatgaccatggaggagatgaagaacgaggccgagaccaccagcatggtgagcatgcccctgtacgccgtgatgtaccccgtgttcaacgagctggagagagtgaacctgagcgccgcccagaccctgagagccgccttcatcaaggccgagaaggagaaccccggcctgacccaggacatcatcatgaagatcctggagaagaagagcgtggaggtgaacttcaccgagagcctgctgagaatggccgccgacgacgtggaggagtacatgatcgagagacccgagcccgagttccaggacctgaacgagaaggccagagccctgaagcagatcctgagcaagatccccgacgagatcaacgacagagtgagattcctgcagaccatcaaggacatcgccagcgccatcaaggagctgctggacaccgtgaactag

SEQ ID NO: 241844 - DNA, 240 bp, Artificial Sequence
  derived and/or modified sequence
atgagaatgaccatggaggagatgaagaacgaggccgagaccaccagcatggtgagcatgcccctgtacgccgtgatgtaccccgtgttcaacgagctggagagagtgaacctgagcgccgcccagaccctgagagccgccttcatcaaggccgagaaggagaaccccggcctgacccaggacatcatcatgaagatcctggagaagaagagcgtggaggtgaacttcaccgagagctag

SEQ ID NO: 241845 - DNA, 609 bp, Artificial Sequence
  derived and/or modified sequence
atgagaatgaccatggaggagatgaagaacgaggccgagaccaccagcatggtgagcatgcccctgtacgccgtgatgtaccccgtgttcaacgagctggagagagtgaacctgagcgccgcccagaccctgagagccgccttcatcaaggccgagaaggagaaccccggcctgacccaggacatcatcatgaagatcctggagaagaagagcgtggaggtgaacttcaccgagagcctgctgagaatggccgccgacgacgtggaggagtacatgatcgagagacccgagcccgagttccaggacctgaacgagaaggccagagccctgaagcagatcctgagcaagatccccgacgagatcaacgacagagtgagattcctgcagaccatcaaggacatcgccagcgccatcaaggagctgctggacaccgtgaacaacgtgttcaagaagtaccagtaccagaacagaagagccctggagcaccagaagaaggagttcgtgaagtacagcaagagcttcagcgacaccctgaagacctacttcaaggacggcaaggccatcaacgtgttcgtgagcgccaacagactgatccaccagaccaactag

SEQ ID NO: 241846 - DNA, 561 bp, Artificial Sequence
  derived and/or modified sequence
atgagaatgaccatggaggagatgaagaacgaggccgagaccaccagcatggtgagcatgcccctgtacgccgtgatgtaccccgtgttcaacgagctggagagagtgaacctgagcgccgcccagaccctgagagccgccttcatcaaggccgagaaggagaaccccggcctgacccaggacatcatcatgaagatcctggagaagaagagcgtggaggtgaacttcaccgagagcctgctgagaatggccgccgacgacgtggaggagtacatgatcgagagacccgagcccgagttccaggacctgaacgagaaggccagagccctgaagcagatcctgagcaagatccccgacgagatcaacgacagagtgagattcctgcagaccatcaaggacatcgccagcgccatcaaggagctgctggacaccgtgaacaacgtgttcaagaagtaccagtaccagaacagaagagccctggagcaccagaagaaggagttcgtgaagtacagcaagagcttcagcgacaccctgaagacctacttcaaggacggcaagtag

SEQ ID NO: 241847 - DNA, 405 bp, Artificial Sequence
  derived and/or modified sequence
atgagaatgaccatggaggagatgaagaacgaggccgagaccaccagcatggtgagcatgcccctgtacgccgtgatgtaccccgtgttcaacgagctggagagagtgaacctgagcgccgcccagaccctgagagccgccttcatcaaggccgagaaggagaaccccggcctgacccaggacatcatcatgaagatcctggagaagaagagcgtggaggtgaacttcaccgagagcctgctgagaatggccgccgacgacgtggaggagtacatgatcgagagacccgagcccgagttccaggacctgaacgagaaggccagagccctgaagcagatcctgagcaagatccccgacgagatcaacgacagagtgagattcctgcagaccatcaaggacatctag

SEQ ID NO: 241848 - protein, 215 aa, Artificial Sequence
  derived and/or modified sequence
MGLRTTKQMGRGTKAPGHQEDHMVKEPVEDTDPSTLSFNMSDKYPIQDTELPKAEECDTITLNCPRNSDMKNQGEENGFPDSTGDPLPEISKDNSCKENCTCSSCLLRAPTISDLLNDQDLLDVIRIKLDPCHPTVKNWRNFASKWGMSYDELCFLEQRPQSPTLEFLLRNSQRTVGQLMELCRLYHRADVEKVLRRWVDEEWPKRERGDPSRHF

SEQ ID NO: 241849 - protein, 84 aa, Artificial Sequence
  derived and/or modified sequence
MVKEPVEDTDPSTLSFNMSDKYPIQDTELPKAEECDTITLNCPRNSDMKNQGEENGFPDSTGDPLPEISKDNSCKENCTCSSCL

SEQ ID NO: 241850 - DNA, 648 bp, Artificial Sequence
  derived and/or modified sequence
atgggcctgagaaccaccaagcagatgggcagaggcaccaaggcccccggccaccaggaggaccacatggtgaaggagcccgtggaggacaccgaccccagcaccctgagcttcaacatgagcgacaagtaccccatccaggacaccgagctgcccaaggccgaggagtgcgacaccatcaccctgaactgccccagaaacagcgacatgaagaaccagggcgaggagaacggcttccccgacagcaccggcgaccccctgcccgagatcagcaaggacaacagctgcaaggagaactgcacctgcagcagctgcctgctgagagcccccaccatcagcgacctgctgaacgaccaggacctgctggacgtgatcagaatcaagctggacccctgccaccccaccgtgaagaactggagaaacttcgccagcaagtggggcatgagctacgacgagctgtgcttcctggagcagagaccccagagccccaccctggagttcctgctgagaaacagccagagaaccgtgggccagctgatggagctgtgcagactgtaccacagagccgacgtggagaaggtgctgagaagatgggtggacgaggagtggcccaagagagagagaggcgaccccagcagacacttctag

SEQ ID NO: 241851 - DNA, 648 bp, Artificial Sequence
  derived and/or modified sequence
atgggcttgcgcacaacaaaacagatgggccgggggacaaaagcccccggccaccaggaggaccacatggtgaaggagccagtggaggacaccgacccctctactttatcattcaacatgtcagacaagtacccgatacaggacacagaattgccgaaggctgaagagtgcgacaccattacgctgaactgccccaggaactctgacatgaagaatcagggcgaggagaacgggttccccgatagcacaggcgaccctcttcctgaaattagtaaagataattcctgtaaagaaaactgtacctgttcaagctgcctgctccgcgcccccactatctcagacctcttgaatgaccaggacctgctggacgtgatcaggatcaaactggacccttgtcaccctaccgtaaagaactggagaaattttgcgtccaaatggggcatgtcttacgacgaactttgcttcctagaacagcgccctcagagcccaacgcttgaattcttactgagaaatagtcaacgtactgtgggccagctcatggagctgtgtcgcctgtaccatcgcgccgacgtggaaaaggttctccgcagatgggttgacgaagaatggcctaagagagagaggggggacccatctcgacacttttag

SEQ ID NO: 241852 - DNA, 648 bp, Artificial Sequence
  derived and/or modified sequence
atgggcctgcggaccaccaagcagatgggccggggcaccaaggcccctggccaccaggaggaccacatggtgaaggagcctgtggaggacacagaccccagcaccctgtccttcaacatgtctgacaagtaccccatccaggacacagagctgcccaaggccgaggagtgtgacaccatcaccctgaactgccccaggaacagcgacatgaagaaccagggcgaggagaatggcttcccagacagcactggagaccccctgcctgagatcagcaaggacaacagctgcaaggagaactgcacctgcagcagctgcctgctgcgggcccccaccatcagtgacctgctgaatgaccaggacctgctggatgtgatccgcatcaagctggacccctgccaccccaccgtgaagaactggaggaactttgccagcaagtggggcatgtcctatgatgagctgtgcttcctggagcagaggccccagagccccaccctggagttcctgctgaggaacagccagaggacagtgggccagctgatggagctgtgccgcctgtaccacagagcagatgtggagaaggtgctgcggcgctgggtggatgaggagtggcccaagcgggagcggggggaccccagccgccacttctag

SEQ ID NO: 241853 - DNA, 648 bp, Artificial Sequence
  derived and/or modified sequence
atgggcctgcggaccaccaagcagatgggccggggcaccaaggcccctggacaccaggaagatcatatggtgaaggaacctgtggaggataccgatccgtcaacattatccttcaatatgagcgacaagtatcccattcaggatacggagctgccaaaagccgaggaatgcgacaccatcacactgaattgcccacggaacagcgacatgaagaatcagggagaggaaaatggcttccccgattctacaggagaccctctgcccgaaatctcaaaggataattcatgtaaagaaaactgcacctgcagttcttgcctgcttcgggcaccaacaataagcgacctgttgaatgaccaagacctgctggacgtgatcaggattaagctggatccttgccatcctactgttaaaaactggagaaactttgcctctaagtggggtatgagttacgacgagctgtgtttcctggagcagcgtccgcagagcccaacgctggaatttctccttcggaacagtcagagaaccgtaggccagctcatggaattgtgcaggctctatcaccgtgccgatgtggaaaaggtgctgcggcgctgggtcgatgaggagtggccaaagagagaacgcggcgatccaagtcgacacttctag

SEQ ID NO: 241854 - DNA, 648 bp, Artificial Sequence
  derived and/or modified sequence
atgggtctgcggactacaaaacagatggggcgaggtaccaaggctccagggcaccaggaggaccacatggtgaaggaacctgtggaggacactgaccctagcactctgtcatttaacatgagtgataagtacccaatacaggataccgagcttccaaaagccgaggagtgtgataccattacactcaattgtcccagaaattccgatatgaagaatcagggtgaggagaacgggttccctgattccaccggggatcccttgccggagatcagcaaagataattcatgcaaagagaactgtacttgttcttcatgcctactcagagcacctacaatctccgacctgttgaacgatcaagatttgctcgacgttatacgcatcaagctggatccctgccatcccactgtaaaaaattggagaaattttgcctctaagtgggggatgagctacgacgagttatgcttcctcgagcaacgccctcagagtcccacgctggaattcttgctacgtaactctcagaggacagttggccagctgatggagctgtgtcgcctgtaccaccgtgcagacgtggagaaggtactgcggaggtgggtggatgaggaatggcctaagagggagaggggagacccctcacgccacttttag

SEQ ID NO: 241855 - DNA, 858 bp, Artificial Sequence
  derived and/or modified sequence
ccgaaggcagaccaagaggaagtttatcctcccacctacaaattccccagagagctttcatctagaaggtttgactctggccagacaaccagcgagcatcttctcgcaatctgttgcttcttccatggcaaactccagagaattaagaagccaaactcaacatcgccatgggcctcaggacgactaaacagatggggagaggcactaaagctcctggtcaccaagaggatcatatggtaaaggaaccagtggaagacacagaccctagcactttatcctttaatatgtcagacaaatatcccattcaagatacggaactccctaaagctgaagaatgtgatacaattactttgaactgcccacgaaattcagatatgaaaaatcagggagaagaaaatggctttccagatagcactggagatcctcttccagagatcagcaaggacaactcctgcaaagaaaactgtacttgttcctcctgcttgctccgggcccccaccataagtgacttgctcaatgatcaggacttactagacgtgatcaggataaagctggatccgtgtcacccaacggtgaaaaactggaggaattttgcaagcaaatgggggatgtcctatgacgaattgtgcttcctggagcagaggccacagagccccaccttggagttcttgctccggaacagtcagaggacggtgggccagctgatggagctctgcaggctctaccacagggccgacgtggagaaggttctgcgcaggtgggtggacgaggagtggcccaagcgggagcgtggagacccctccaggcacttctagagctcttcttcttccttcattggcctctccggatgttgaaaca

SEQ ID NO: 241856 - protein, 514 aa, Artificial Sequence
  derived and/or modified sequence
MSRESDVEAQQSHGSSACSQPHGSVTQSQGSSSQSQGISSSSTSTMPNSSQSSHSSSGTLSSLETVSTQELYSIPEDQEPEDQEPEEPTPAPWARLWALQDGFANLECVNDNYWFGRDKSCEYCFDEPLLKRTDKYRTYSKKHFRIFREVGPKNSYIAYIEDHSGNGTFVNTELVGKGKRRPLNNNSEIALSLSRNKVFVFFDLTVDDQSVYPKALRDEYIMSKTLGSGACGEVKLAFERKTCKKVAIKIISKRKFAIGSAREADPALNVETEIEILKKLNHPCIIKIKNFFDAEDYYIVLELMEGGELFDKVVGNKRLKEATCKLYFYQMLLAVQITDFGHSKILGETSLMRTLCGTPTYLAPEVLVSVGTAGYNRAVDCWSLGVILFICLSGYPPFSEHRTQVSLKDQITSGKYNFIPEVWAEVSEKALDLVKKLLVVDPKARFTTEEALRHPWLQDEDMKRKFQDLLSEENESTALPQVLAQPSTSRKRPREGEAEGAETTKRPAVCAAVL

SEQ ID NO: 241857 - protein, 289 aa, Artificial Sequence
  derived and/or modified sequence
MSRESDVEAQQSHGSSACSQPHGSVTQSQGSSSQSQGISSSSTSTMPNSSQSSHSSSGTLSSLETVSTQELYSIPEDQEPEDQEPEEPTPAPWARLWALQDGFANLECVNDNYWFGRDKSCEYCFDEPLLKRTDKYRTYSKKHFRIFREVGPKNSYIAYIEDHSGNGTFVNTELVGKGKRRPLNNNSEIALSLSRNKVFVFFDLTVDDQSVYPKALRDEYIMSKTLGSGACGEVKLAFERKTCKKVAIKIISKRKFAIGSAREADPALNVETEIEILKKLNHDGRGRAV

SEQ ID NO: 241858 - DNA, 1545 bp, Artificial Sequence
  derived and/or modified sequence
atgagcagagagagcgacgtggaggcccagcagagccacggcagcagcgcctgcagccagccccacggcagcgtgacccagagccagggcagcagcagccagagccagggcatcagcagcagcagcaccagcaccatgcccaacagcagccagagcagccacagcagcagcggcaccctgagcagcctggagaccgtgagcacccaggagctgtacagcatccccgaggaccaggagcccgaggaccaggagcccgaggagcccacccccgccccctgggccagactgtgggccctgcaggacggcttcgccaacctggagtgcgtgaacgacaactactggttcggcagagacaagagctgcgagtactgcttcgacgagcccctgctgaagagaaccgacaagtacagaacctacagcaagaagcacttcagaatcttcagagaggtgggccccaagaacagctacatcgcctacatcgaggaccacagcggcaacggcaccttcgtgaacaccgagctggtgggcaagggcaagagaagacccctgaacaacaacagcgagatcgccctgagcctgagcagaaacaaggtgttcgtgttcttcgacctgaccgtggacgaccagagcgtgtaccccaaggccctgagagacgagtacatcatgagcaagaccctgggcagcggcgcctgcggcgaggtgaagctggccttcgagagaaagacctgcaagaaggtggccatcaagatcatcagcaagagaaagttcgccatcggcagcgccagagaggccgaccccgccctgaacgtggagaccgagatcgagatcctgaagaagctgaaccacccctgcatcatcaagatcaagaacttcttcgacgccgaggactactacatcgtgctggagctgatggagggcggcgagctgttcgacaaggtggtgggcaacaagagactgaaggaggccacctgcaagctgtacttctaccagatgctgctggccgtgcagatcaccgacttcggccacagcaagatcctgggcgagaccagcctgatgagaaccctgtgcggcacccccacctacctggcccccgaggtgctggtgagcgtgggcaccgccggctacaacagagccgtggactgctggagcctgggcgtgatcctgttcatctgcctgagcggctacccccccttcagcgagcacagaacccaggtgagcctgaaggaccagatcaccagcggcaagtacaacttcatccccgaggtgtgggccgaggtgagcgagaaggccctggacctggtgaagaagctgctggtggtggaccccaaggccagattcaccaccgaggaggccctgagacacccctggctgcaggacgaggacatgaagagaaagttccaggacctgctgagcgaggagaacgagagcaccgccctgccccaggtgctggcccagcccagcaccagcagaaagagacccagagagggcgaggccgagggcgccgagaccaccaagagacccgccgtgtgcgccgccgtgctgtag

SEQ ID NO: 241859 - DNA, 870 bp, Artificial Sequence
  derived and/or modified sequence
atgagcagagagagcgacgtggaggcccagcagagccacggcagcagcgcctgcagccagccccacggcagcgtgacccagagccagggcagcagcagccagagccagggcatcagcagcagcagcaccagcaccatgcccaacagcagccagagcagccacagcagcagcggcaccctgagcagcctggagaccgtgagcacccaggagctgtacagcatccccgaggaccaggagcccgaggaccaggagcccgaggagcccacccccgccccctgggccagactgtgggccctgcaggacggcttcgccaacctggagtgcgtgaacgacaactactggttcggcagagacaagagctgcgagtactgcttcgacgagcccctgctgaagagaaccgacaagtacagaacctacagcaagaagcacttcagaatcttcagagaggtgggccccaagaacagctacatcgcctacatcgaggaccacagcggcaacggcaccttcgtgaacaccgagctggtgggcaagggcaagagaagacccctgaacaacaacagcgagatcgccctgagcctgagcagaaacaaggtgttcgtgttcttcgacctgaccgtggacgaccagagcgtgtaccccaaggccctgagagacgagtacatcatgagcaagaccctgggcagcggcgcctgcggcgaggtgaagctggccttcgagagaaagacctgcaagaaggtggccatcaagatcatcagcaagagaaagttcgccatcggcagcgccagagaggccgaccccgccctgaacgtggagaccgagatcgagatcctgaagaagctgaaccacgacggcagaggcagagccgtgtag

SEQ ID NO: 241860 - DNA, 624 bp, Artificial Sequence
  derived and/or modified sequence
atgagcagagagagcgacgtggaggcccagcagagccacggcagcagcgcctgcagccagccccacggcagcgtgacccagagccagggcagcagcagccagagccagggcatcagcagcagcagcaccagcaccatgcccaacagcagccagagcagccacagcagcagcggcaccctgagcagcctggagaccgtgagcacccaggagctgtacagcatccccgaggaccaggagcccgaggaccaggagcccgaggagcccacccccgccccctgggccagactgtgggccctgcaggacggcttcgccaacctggagtgcgtgaacgacaactactggttcggcagagacaagagctgcgagtactgcttcgacgagcccctgctgaagagaaccgacaagtacagaacctacagcaagaagcacttcagaatcttcagagaggtgggccccaagaacagctacatcgcctacatcgaggaccacagcggcaacggcaccttcgtgaacaccgagctggtgggcaagggcaagagaagacccctgaacaacaacagcgagatcgccctgagcctgagcagaaacaaggagaagatcctgaagatctacagcctgagctag

SEQ ID NO: 241861 - DNA, 1771 bp, Artificial Sequence
  derived and/or modified sequence
gcaggtttagcgccactctgctggctgaggctgcggagagtgtgcggctccaggtgggctcacgcggtcgtgatgtctcgggagtcggatgttgaggctcagcagtctcatggcagcagtgcctgttcacagccccatggcagcgttacccagtcccaaggctcctcctcacagtcccagggcatatccagctcctctaccagcacgatgccaaactccagccagtcctctcactccagctctgggacactgagctccttagagacagtgtccactcaggaactctattctattcctgaggaccaagaacctgaggaccaagaacctgaggagcctacccctgccccctgggctcgattatgggcccttcaggatggatttgccaatcttgaatgtgtgaatgacaactactggtttgggagggacaaaagctgtgaatattgctttgatgaaccactgctgaaaagaacagataaataccgaacatacagcaagaaacactttcggattttcagggaagtgggtcctaaaaactcttacattgcatacatagaagatcacagtggcaatggaacctttgtaaatacagagcttgtagggaaaggaaaacgccgtcctttgaataacaattctgaaattgcactgtcactaagcagaaataaagtttttgtcttttttgatctgactgtagatgatcagtcagtttatcctaaggcattaagagatgaatacatcatgtcaaaaactcttggaagtggtgcctgtggagaggtaaagctggctttcgagaggaaaacatgtaagaaagtagccataaagatcatcagcaaaaggaagtttgctattggttcagcaagagaggcagacccagctctcaatgttgaaacagaaatagaaattttgaaaaagctaaatcatccttgcatcatcaagattaaaaacttttttgatgcagaagattattatattgttttggaattgatggaagggggagagctgtttgacaaagtggtggggaataaacgcctgaaagaagctacctgcaagctctatttttaccagatgctcttggctgtgcagattactgattttgggcactccaagattttgggagagacctctctcatgagaaccttatgtggaacccccacctacttggcgcctgaagttcttgtttctgttgggactgctgggtataaccgtgctgtggactgctggagtttaggagttattctttttatctgccttagtgggtatccacctttctctgagcataggactcaagtgtcactgaaggatcagatcaccagtggaaaatacaacttcattcctgaagtctgggcagaagtctcagagaaagctctggaccttgtcaagaagttgttggtagtggatccaaaggcacgttttacgacagaagaagccttaagacacccgtggcttcaggatgaagacatgaagagaaagtttcaagatcttctgtctgaggaaaatgaatccacagctctaccccaggttctagcccagccttctactagtcgaaagcggccccgtgaaggggaagccgagggtgccgagaccacaaagcgcccagctgtgtgtgctgctgtgttgtgaactccgtggtttgaacacgaaagaaatgtaccttctttcactctgtcatctttcttttctttgagtctgtttttttatagtttgtattttaattatgggaataattgctttttcacagtcactgatgtacaattaaaaacctgatggaacctgg

SEQ ID NO: 241862 - DNA, 1545 bp, Artificial Sequence
  derived and/or modified sequence
atgtctcgggagtcggatgttgaggctcagcagtctcatggcagcagtgcctgttcacagccccatggcagcgttacccagtcccaaggctcctcctcacagtcccagggcatatccagctcctctaccagcacgatgccaaactccagccagtcctctcactccagctctgggacactgagctccttagagacagtgtccactcaggaactctattctattcctgaggaccaagaacctgaggaccaagaacctgaggagcctacccctgccccctgggctcgattatgggcccttcaggatggatttgccaatcttgaatgtgtgaatgacaactactggtttgggagggacaaaagctgtgaatattgctttgatgaaccactgctgaaaagaacagataaataccgaacatacagcaagaaacactttcggattttcagggaagtgggtcctaaaaactcttacattgcatacatagaagatcacagtggcaatggaacctttgtaaatacagagcttgtagggaaaggaaaacgccgtcctttgaataacaattctgaaattgcactgtcactaagcagaaataaagtttttgtcttttttgatctgactgtagatgatcagtcagtttatcctaaggcattaagagatgaatacatcatgtcaaaaactcttggaagtggtgcctgtggagaggtaaagctggctttcgagaggaaaacatgtaagaaagtagccataaagatcatcagcaaaaggaagtttgctattggttcagcaagagaggcagacccagctctcaatgttgaaacagaaatagaaattttgaaaaagctaaatcatccttgcatcatcaagattaaaaacttttttgatgcagaagattattatattgttttggaattgatggaagggggagagctgtttgacaaagtggtggggaataaacgcctgaaagaagctacctgcaagctctatttttaccagatgctcttggctgtgcagattactgattttgggcactccaagattttgggagagacctctctcatgagaaccttatgtggaacccccacctacttggcgcctgaagttcttgtttctgttgggactgctgggtataaccgtgctgtggactgctggagtttaggagttattctttttatctgccttagtgggtatccacctttctctgagcataggactcaagtgtcactgaaggatcagatcaccagtggaaaatacaacttcattcctgaagtctgggcagaagtctcagagaaagctctggaccttgtcaagaagttgttggtagtggatccaaaggcacgttttacgacagaagaagccttaagacacccgtggcttcaggatgaagacatgaagagaaagtttcaagatcttctgtctgaggaaaatgaatccacagctctaccccaggttctagcccagccttctactagtcgaaagcggccccgtgaaggggaagccgagggtgccgagaccacaaagcgcccagctgtgtgtgctgctgtgttgtga

SEQ ID NO: 241863 - DNA, 1545 bp, Artificial Sequence
  derived and/or modified sequence
atgtcccgggagtcagacgtcgaggcccagcagagtcatggcagctccgcttgtagccagccccacggtagcgtaacccaaagccagggttcctcctcacagagccagggaatttccagctctagtacctcgacaatgccgaactccagccaatcttcgcattctagtagcgggacgctctcctcgctggagacagtatcaacccaggagctctattcaatacccgaggatcaggaaccggaagatcaagagcccgaagaacctaccccagcaccatgggcacgactgtgggctctccaagacgggtttgcgaacctcgaatgcgtcaatgacaactactggttcggacgggataagtcttgtgagtactgctttgacgaacctctattaaaaagaactgataaatatagaacatattccaagaaacattttcgcatcttcagagaggtggggcctaagaacagttatatcgcatacatcgaggaccattcaggtaatggcacatttgtcaacaccgagttggtgggaaaaggcaagaggagacccctgaacaacaactccgagattgccctctccctgagccgcaataaggtttttgtttttttcgacttgactgtcgacgaccagagcgtgtaccccaaggccctgagggacgaatacatcatgagcaaaacgcttgggtccggagcatgtggtgaagttaaactcgctttcgagagaaagacatgtaagaaagttgccattaagattatcagcaagcggaaattcgccattggcagtgcccgggaagctgatcctgccctgaatgttgagaccgaaattgaaatcctgaaaaaattaaatcatccctgtattattaagatcaagaattttttcgatgcagaagattactacattgttctggagctgatggaaggtggagagcttttcgataaggtggtcggtaataaaagactaaaagaagccacatgcaaactgtacttctaccaaatgttgcttgcagtccagattacggattttgggcacagcaaaattttgggagagaccagtctcatgcgtaccctctgcggcactcccacctacttggctcccgaggtgctggtgtccgtggggactgcaggctacaaccgggccgtggactgctggtcattgggtgtaatacttttcatctgtctgagtggctatccccctttttcagagcacaggacccaagtgtcccttaaagaccaaatcacctccgggaagtacaactttattccagaagtctgggccgaggtttctgaaaaggccctggacttagtgaaaaaacttcttgtagtagatcctaaagcacggttcactaccgaggaggccttgcgacatccatggctgcaagatgaggatatgaaacggaaattccaggacctgctcagcgaggagaatgagtccacagcactcccccaggtgctcgctcagcccagcacctcaaggaagaggccgcgagagggcgaagctgaaggtgctgaaacaactaagcggcctgctgtctgcgcagccgtgctgtag

SEQ ID NO: 241864 - DNA, 870 bp, Artificial Sequence
  derived and/or modified sequence
atgtcccgcgagagtgatgtagaggctcagcaatcccatgggagctcggcctgcagccagccccatggatcagtcacgcagtctcagggttcttcgtcacagagtcagggaatctcctcatcttctacatcaactatgcccaactcttctcagagtagccattcaagctccggtaccctgtcctctctggagactgtttcaactcaggagctttactccattcctgaagaccaggagcctgaggaccaagagcccgaagaacccacaccggcaccatgggcccggttgtgggcccttcaggacgggttcgcaaatcttgaatgcgtcaatgataattactggtttggacgggataagagttgcgagtactgcttcgacgagccattgctgaaacgcaccgataagtatagaacttatagtaaaaaacacttcagaattttccgcgaggtgggcccaaagaacagctacatcgcctacatcgaggaccacagcggtaacggcacattcgtgaatactgagttggtgggtaagggcaagagacgaccattaaacaacaacagcgaaatcgcactgtctctctcacgaaataaggttttcgttttcttcgacttgactgtggacgaccagagtgtctatcccaaagcgctgcgggacgagtacatcatgtccaagaccctgggaagtggcgcctgcggcgaagttaaactggcatttgaaaggaagacatgcaagaaggtggcaattaagataatttcaaaaagaaaattcgctataggatcggcccgcgaggccgatcctgccctgaacgtggagacagagatagaaattctaaaaaaactcaaccatgacggacgaggccgcgccgtgtag

SEQ ID NO: 241865 - DNA, 1545 bp, Artificial Sequence
  derived and/or modified sequence
atgagtagagaatctgatgttgaagcccagcagtcccacggtagctcagcttgctctcaaccgcacggaagcgtaacccagagccagggttcttcttctcagtcccaaggaatcagttctagctctacctcaaccatgcccaattcttcccagagctcccactccagctctggcaccctcagcagccttgagaccgtttccacccaagagctctactctatacctgaggatcaggaacccgaagatcaggagcctgaggaaccaacccccgcaccgtgggctcgtctctgggccttacaggatggttttgccaacctcgaatgcgtcaatgataactactggttcggtcgcgacaaaagctgcgaatattgctttgatgagcccctgctgaaacgcacagacaagtataggacttactctaaaaagcacttcagaatctttcgagaagtcgggcccaagaactcttacatcgcctacattgaggatcacagtggaaatggaaccttcgtgaacaccgaactggtgggtaaaggcaagagacgccctttgaacaataattcagagattgccctgagcctctcacgaaataaggtcttcgtgttttttgacctcaccgtggatgaccagtccgtgtaccctaaagccctgcgagacgaatacatcatgtctaaaaccctcggaagcggcgcatgcggggaggtcaagcttgccttcgaacgtaaaacatgcaaaaaggtggccattaagatcatttcaaagcgaaagttcgccattggatccgctcgggaggctgatcccgctctcaacgtagagaccgaaatcgaaatcttgaaaaaactgaaccatccctgtataatcaaaatcaagaactttttcgacgctgaggattattatatcgtcctggagcttatggaaggcggagagctgttcgacaaggtggtcgggaacaaacgcctcaaggaagccacttgtaaattatacttttaccagatgctcctggccgtccagattacagactttgggcatagcaagattctgggagagacttcactcatgcgcacactgtgcggaacccctacctatctggcacctgaagttttagtctcggttggtaccgccggatacaacagagcagttgactgctggagtctgggggttattttatttatctgcctgtccggctacccaccattttccgaacaccgtactcaggtgtcactcaaagatcagatcacctcggggaaatacaatttcatcccagaggtgtgggctgaggtcagcgagaaggccctcgatctggtcaaaaaactcctggtcgtagaccctaaggccagattcaccaccgaggaagccctgaggcatccatggctgcaggacgaggacatgaagcggaagttccaggatctgctgtccgaagagaacgaaagtacagccctgcctcaggtcctggcgcagcccagcacctccaggaagaggcctcgggagggagaggctgagggcgccgagaccacaaagaggcctgcagtgtgcgctgcagtgttatag

SEQ ID NO: 241866 - DNA, 624 bp, Artificial Sequence
  derived and/or modified sequence
atgtcccgagaaagcgatgttgaagcgcagcaatcccacggcagcagcgcatgctcgcagccgcacgggagcgtcacacagagccaaggcagtagctctcagtcccagggaatttcttcgtcaagcacgtctaccatgcccaactcctctcagtcatcacactcatccagcggaaccctgtccagcctggagacggtgtcaacacaggagttgtatagtattcctgaagaccaggagccagaggatcaggagccggaggagccaacccccgcaccttgggcccggctgtgggccctacaggacggatttgccaatctggaatgcgtcaacgataactattggtttggcagagacaagagctgcgaatactgctttgacgagcctctgctgaaacggactgacaagtatcgcacctacagcaaaaagcactttaggatcttccgggaggtgggaccgaagaatagttatatcgcgtatatcgaggatcacagcggcaatgggacctttgtgaacaccgaactggtcggcaaaggaaaacgccggcccctgaacaacaactccgaaatcgcactatctctcagccgcaataaagagaaaattctgaagatatactctttatcttag

SEQ ID NO: 241867 - DNA, 1545 bp, Artificial Sequence
  derived and/or modified sequence
atgagccgggagagtgatgtggaggcccagcagagccacggcagcagcgcctgcagccagccccacggctctgtgacccagagccagggcagcagcagccagagccagggcatcagcagcagcagcaccagcaccatgcccaacagcagccagagcagccacagcagcagcggcaccctgagcagcctggagaccgtgtccacccaggagctgtacagcatccctgaggaccaggagcctgaggaccaggagcctgaggagcccaccccagccccctgggcccggctgtgggccctgcaggacggctttgccaacctggagtgtgtgaatgacaactactggtttggccgggacaagagctgtgagtactgctttgatgagcccctgctgaagaggacagacaagtaccgcacctacagcaagaagcacttccgcatcttccgggaggtgggccccaagaacagctacatcgcctacatcgaggaccacagcggaaatggcacctttgtgaacacagagctggtgggcaagggcaagaggcggcccctgaacaacaacagcgagatcgccctgagcctgagcaggaacaaggtgtttgtgttctttgacctgactgtggatgaccagagcgtgtaccccaaggccctgagagatgagtacatcatgagcaagaccctgggcagcggggcctgtggggaggtgaagctggcctttgagaggaagacctgcaagaaggtggccatcaagatcatcagcaagaggaagtttgccatcggcagcgcccgggaggccgaccctgccctgaatgtggagacagaaattgagatcctgaagaagctgaaccacccctgcatcatcaagatcaagaacttctttgatgctgaggactactacatcgtgctggagctgatggagggcggggagctgtttgacaaggtggtgggcaacaagaggctgaaggaggccacctgcaagctgtacttctaccagatgctgctggccgtgcagatcacagactttggccacagcaagatcctgggggagaccagcctgatgaggaccctgtgtggcacccccacctacctggcccctgaggtgctggtgtctgtgggcacagctggctacaacagagctgtggactgctggagcctgggcgtcatcctcttcatctgcctgagcggctacccacccttcagcgagcacaggacccaggtgtccctgaaggaccagatcaccagcggcaagtacaacttcatccctgaggtgtgggccgaggtgtctgagaaggccctggacctggtgaagaagctgctggtggtggaccccaaggcccgcttcaccacagaggaggccctgcggcacccctggctgcaggatgaggacatgaagaggaagttccaggacctgctgtctgaagaaaatgaaagcacagccctgccccaggtgctggcccagcccagcaccagcaggaagaggccccgggagggggaggccgagggcgctgagaccaccaagaggcctgctgtgtgtgccgctgtgctgtag

SEQ ID NO: 241868 - DNA, 870 bp, Artificial Sequence
  derived and/or modified sequence
atgagccgggagagtgatgtggaggcccagcagagccacggcagcagcgcctgcagccagccccacggctctgtgacccagagccagggcagcagcagccagagccagggcatcagcagcagcagcaccagcaccatgcccaacagcagccagagcagccacagcagcagcggcaccctgagcagcctggagaccgtgtccacccaggagctgtacagcatccctgaggaccaggagcctgaggaccaggagcctgaggagcccaccccagccccctgggcccggctgtgggccctgcaggacggctttgccaacctggagtgtgtgaatgacaactactggtttggccgggacaagagctgtgagtactgctttgatgagcccctgctgaagaggacagacaagtaccgcacctacagcaagaagcacttccgcatcttccgggaggtgggccccaagaacagctacatcgcctacatcgaggaccacagcggaaatggcacctttgtgaacacagagctggtgggcaagggcaagaggcggcccctgaacaacaacagcgagatcgccctgagcctgagcaggaacaaggtgtttgtgttctttgacctgactgtggatgaccagagcgtgtaccccaaggccctgagagatgagtacatcatgagcaagaccctgggcagcggggcctgtggggaggtgaagctggcctttgagaggaagacctgcaagaaggtggccatcaagatcatcagcaagaggaagtttgccatcggcagcgcccgggaggccgaccctgccctgaatgtggagacagaaattgagatcctgaagaagctgaaccatgatggccggggccgggctgtgtag

SEQ ID NO: 241869 - DNA, 624 bp, Artificial Sequence
  derived and/or modified sequence
atgagccgggagagtgatgtggaggcccagcagagccacggcagcagcgcctgcagccagccccacggctctgtgacccagagccagggcagcagcagccagagccagggcatcagcagcagcagcaccagcaccatgcccaacagcagccagagcagccacagcagcagcggcaccctgagcagcctggagaccgtgtccacccaggagctgtacagcatccctgaggaccaggagcctgaggaccaggagcctgaggagcccaccccagccccctgggcccggctgtgggccctgcaggacggctttgccaacctggagtgtgtgaatgacaactactggtttggccgggacaagagctgtgagtactgctttgatgagcccctgctgaagaggacagacaagtaccgcacctacagcaagaagcacttccgcatcttccgggaggtgggccccaagaacagctacatcgcctacatcgaggaccacagcggaaatggcacctttgtgaacacagagctggtgggcaagggcaagaggcggcccctgaacaacaacagcgagatcgccctgagcctgagcaggaacaaggagaagatcctgaagatctacagcctgtcctag

SEQ ID NO: 241870 - DNA, 1545 bp, Artificial Sequence
  derived and/or modified sequence
atgagccgggagagcgacgtggaggcccagcagagccacggcagcagtgcctgctcccagccccacggcagtgtgacacagtcccaggggtccagttcacagtcccagggaatttcttccagcagcacatcgactatgcctaactcttcccaatcttcccacagctctagcggaaccttgagcagcctggagacggtatccacccaagagttgtatagcatacctgaggatcaagaaccggaggaccaggaaccagaggaacccaccccagccccctgggccagactatgggcccttcaggatggcttcgctaaccttgaatgtgtgaacgataattattggtttggccgcgataagagctgtgagtactgcttcgacgaacctctcctgaagagaacagataagtatagaacctactcaaaaaaacacttcaggatcttccgagaggttggcccaaagaactcctacatcgcctacatcgaggaccacagcggcaacggaaccttcgtgaatacagaactggtgggaaagggtaaaagacgccctctgaataataacagcgaaatagccctgagcctgagtcgtaataaagtctttgttttctttgacctcacagtggatgaccagtctgtgtaccccaaagctctgcgggatgagtacataatgtccaagacgctggggagcggtgcatgtggcgaagtaaagttggcgttcgaaagaaagacctgtaaaaaggtggcgattaagatcattagcaagaggaaatttgccattggctcggcacgagaagctgacccagcactcaacgtcgagacagagatcgagatactcaaaaagcttaaccacccatgtattattaagattaagaacttcttcgatgctgaagactattatattgtcttggagctcatggaggggggggagctattcgacaaggtggttgggaacaagagacttaaggaggcaacgtgcaagctctacttttatcagatgttgctggcggttcagataacggatttcggccattccaagattcttggcgagacatctcttatgagaactctttgtggcaccccgacataccttgcccccgaggttctggtgtcagtaggcaccgccggatataaccgagccgtggactgttggagcctgggtgtgatcttgtttatttgcctcagtggctacccacccttctcagagcacagaacccaggtgtccttgaaggaccagattaccagcgggaagtacaacttcatacccgaagtctgggccgaggtgtccgagaaggccctggacctagttaaaaagcttctggttgtggatcccaaagctcggttcacaaccgaagaagccttacggcacccctggcttcaagatgaagatatgaaaagaaagtttcaagacctgctttcagaggagaatgagtcaactgctcttcctcaggtgctcgcccagccctcgaccagccgcaagcggccgagggaaggagaagccgagggagccgagacaacaaaaaggccagctgtatgcgccgccgtcttgtag

SEQ ID NO: 241871 - DNA, 870 bp, Artificial Sequence
  derived and/or modified sequence
atgagccgggagagcgacgtggaggcccagcagagccacggcagctcggcgtgttctcaaccacatgggtctgtaacgcagagtcagggtagtagtagccagtcccaggggatcagtagttcctctaccagcacaatgcctaattcgagccagtccagtcactccagtagcggtacactgtccagcttggaaactgtgtcgacccaagagctctatagcatacctgaggatcaggagccagaggatcaagaaccggaggagccgacgcctgccccgtgggcccggctgtgggcgctgcaggacgggtttgcgaacctggaatgtgtaaatgacaattactggttcggacgcgataaatcctgcgagtactgcttcgacgaacctttgctgaaaaggacagacaaataccgcacatattctaaaaagcacttcaggatcttccgggaggtcggtcccaaaaatagctacatcgcctatattgaagaccatagcggcaatgggacttttgtgaatacagaattggttggcaaaggtaaacggagaccgctgaataacaattcagaaatcgccctgtcactgtctaggaataaagtattcgtgttcttcgacctgactgtggacgaccagagcgtgtaccccaaagccttgcgggatgaatacatcatgtctaaaaccctcggctctggcgcctgcggtgaggtgaagttggccttcgagcgcaagacctgtaagaaagtggcgatcaaaattatctcgaagaggaagttcgctattggtagcgcacgagaggccgatcctgccctgaatgttgagactgaaatagaaatcctgaaaaaattgaatcacgatggaagaggtagagccgtctag

SEQ ID NO: 241872 - DNA, 1545 bp, Artificial Sequence
  derived and/or modified sequence
atgagccgggagagcgacgtggaggcccagcagagccacggcagctctgcctgttcacagcctcacggatcggttacacaatcacagggatcctcaagtcagtcccagggaatcagcagcagcagcacttccacgatgcccaattcttcgcaatccagccactctagttcgggcacactgtccagtctagagaccgttagcacccaagagctctacagcattcctgaggatcaggagccagaggatcaggagcccgaagagcctacacctgccccatgggccagactctgggcgttgcaggacggcttcgcaaatctggagtgtgttaatgataattactggtttggccgcgacaaatcctgcgaatactgttttgacgagccactgctcaaacgtactgacaaatatcgaacctattccaaaaaacacttcagaatattccgcgaagtcggccccaagaactcctatattgcctacatcgaagaccactccggaaatgggaccttcgtgaatactgagctggtgggcaaagggaaacgccgacccttgaataataacagtgagatagcattaagcctcagtagaaacaaggttttcgtattctttgacctgactgtcgacgatcagagcgtgtatcctaaggccctccgcgacgaatacataatgtctaagacacttggcagtggggcttgcggagaagttaaattagcatttgaacggaagacctgtaagaaagtggctatcaagataatcagtaaaagaaaatttgccattggtagtgccagggaagcagacccagccctgaacgtcgaaaccgaaattgaaattttgaagaaactgaatcacccttgcattatcaagatcaaaaacttcttcgatgcagaagattattatatcgtcctagagctgatggaggggggagagctgttcgacaaggtggtgggcaacaagcgccttaaagaagcaacctgtaagttgtacttctatcagatgctgttggctgtgcagattacagactttggacatagcaagattctcggcgaaactagcctgatgagaacactttgtggaaccccgacatatctcgctcctgaagtcctggtctctgtgggaactgctggatacaaccgcgccgtcgattgttggagcctcggtgtcatactgttcatctgcctatccggatatcctccgttctcggaacatcgcacgcaagtctcattgaaggatcagatcacgagtggaaagtataattttattccagaggtttgggcagaagtcagtgagaaagccctcgacctcgtcaaaaaactgctagtcgtggacccaaaagccaggttcaccacggaggaggcgctccgacatccttggctgcaggatgaggacatgaaaagaaagtttcaggacctgctctcagaagagaatgaaagcacggcgctacctcaggtgcttgctcagccgtccacctcaagaaaacggcctcgggagggagaggccgaaggagccgagactacaaaaagaccagccgtttgcgctgcagtcctgtag

SEQ ID NO: 241873 - DNA, 624 bp, Artificial Sequence
  derived and/or modified sequence
atgagccgggagagcgacgtggaggcccagcagagccacggcagctctgcgtgttcccagccccacggttccgtgacacagtcccagggctccagcagtcagagccagggaatttcgtcgtcttctacatccaccatgcccaattcctctcagtcctctcattcatcatctgggaccttgtccagtttggagaccgtgagtacccaggagctgtactccattcctgaggaccaagaaccggaggaccaagagccagaagagcccactccagcaccctgggcccgcctatgggcactgcaagacggctttgctaatctggagtgcgtgaatgacaattactggttcggcagagataagtcttgtgagtactgtttcgacgaaccactcttgaaacgcaccgataagtatcgaacctactccaaaaagcattttagaatcttcagagaggtgggccctaaaaattcttacattgcctacatagaggaccacagcggtaacggcactttcgtcaataccgagcttgtggggaagggaaaacgtcggccccttaacaacaactctgaaatcgcactgtcactcagcaggaacaaggagaagatattgaaaatatatagtctatcgtag

SEQ ID NO: 241874 - DNA, 1545 bp, Artificial Sequence
  derived and/or modified sequence
atgtcacgggaaagtgatgtcgaggctcagcaatcccatggttcctcagcttgcagtcaaccccatggaagtgtgacacaaagtcaagggagtagctctcagagccagggcatctctagtagctctaccagtactatgcctaattcatctcagagtagccacagcagcagcggcaccctatccagcctcgagactgtctctacacaagaattatactcaatccctgaagaccaggagccagaagaccaggagcctgaggaaccaacacccgctccctgggccagactgtgggccctgcaagatggctttgccaacctggagtgcgtgaatgataattactggttcgggcgagacaaatcctgcgaatactgttttgacgagccactcctgaagagaaccgacaagtaccgtacctatagcaagaagcatttccgcattttccgtgaggtcggacccaaaaattcctacattgcatacatcgaggaccattctggtaatggcaccttcgttaataccgagcttgtgggaaagggaaagcgacgcccactgaacaataactctgagattgctctgtccctgagcagaaacaaggtgtttgtgtttttcgacctgaccgttgacgaccagtccgtataccctaaggccctcagagacgaatacatcatgagtaagactttgggtagtggcgcatgcggagaagtaaaactcgcctttgagcggaagacctgtaagaaggtagcgataaagatcatcagcaaacgcaaattcgcgatcggctccgccagagaagctgatcccgctcttaacgttgagacggaaatcgagatcctgaaaaaactcaatcacccatgcattatcaaaatcaagaattttttcgatgctgaggattattatattgtgctggaattaatggaggggggtgaactgttcgacaaagtagttgggaacaagagattgaaggaggcaacttgtaagctgtacttctaccagatgctattagcagtgcagataacagactttggccactctaaaattttgggcgagaccagtctgatgcgcacactctgtgggactccaacctatttggctcccgaggtcctggtgtccgtagggaccgccggatacaacagggcagtggattgctggagcctgggcgtgatcctttttatctgtctgtccggttaccctcccttcagtgagcaccgtacacaagtctcactcaaggatcagatcacatccgggaaatataactttataccagaagtgtgggctgaagttagcgagaaggcgctagacttagtgaaaaaactcttagtggtggatcctaaagcgagattcaccaccgaagaggccctccgccacccatggctgcaggacgaagacatgaagcgcaaatttcaggatctgctgtccgaagaaaatgagtctacggcactgccacaggtcttggcgcagcctagcacctcccgtaagagaccaagagagggcgaggctgaaggagccgaaactacaaaaaggcccgctgtgtgcgctgccgtgctatag

SEQ ID NO: 241875 - DNA, 870 bp, Artificial Sequence
  derived and/or modified sequence
atgtcacgtgagagcgacgtcgaggcgcagcagagccatggttcaagtgcatgcagtcagccccacggatctgtgactcaaagccagggatcatcatcccagagccaaggcatttctagcagttccactagtacaatgccaaatagctctcagtcctcccattccagctctggcaccctcagtagcctcgagaccgtgagcacccaggagctgtattcaatccctgaagatcaggagcccgaggaccaggaaccagaggaacctacaccagctccttgggcacggctctgggccctgcaggacggtttcgccaacctggagtgcgttaacgacaactactggtttgggagagacaaaagctgcgagtactgtttcgacgagccattgctgaaaaggaccgataaatatcgcacctactccaaaaaacacttccggatcttccgcgaggtcggtcctaagaattcgtatatcgcatatatcgaagatcattctggcaacggtactttcgtgaacaccgagctggtagggaagggcaagaggagacctttgaataataactcggagatagccctctctctgtcccgcaataaagtattcgtcttcttcgatcttactgttgacgaccagtccgtttaccctaaggccttaagggatgagtatatcatgagcaagactcttggtagcggtgcttgcggggaggtgaagctggctttcgaaaggaagacctgcaaaaaggttgcaataaaaatcatctcaaaacggaagtttgccattggcagcgcccgagaggctgaccctgccttgaacgtggagacagagatcgagatcttgaagaagttaaatcacgatggcagagggagggctgtttag

SEQ ID NO: 241876 - DNA, 1545 bp, Artificial Sequence
  derived and/or modified sequence
atgtctagggaaagcgacgttgaggctcagcagtcacacggctcctccgcctgcagtcagccccacggttccgttacgcagagccagggcagctccagccagtcacagggcatttcaagcagcagtacttcgactatgcccaactcaagtcaaagctcccacagctcgtccggaacattaagtagtctcgagaccgtctccacgcaagagttgtactcaatccccgaagaccaggagcctgaagatcaggagcccgaggagcccacccctgctccctgggcaaggctctgggcattgcaagacggctttgccaacctggaatgcgtcaacgacaattattggtttggacgagacaagtcctgcgaatactgtttcgatgaaccgctcttgaagcgcaccgacaaataccgcacttactccaaaaaacattttagaatttttcgcgaagtcggacctaaaaatagttacatcgcctacatagaggaccacagtgggaacgggaccttcgtgaatactgagctggtggggaagggcaaacgccgaccactgaataataatagcgagattgcactctcgctgtcacgcaataaggtcttcgtattcttcgacttaactgtggatgaccagagcgtatatccaaaggccttgcgtgacgagtacattatgagcaagacacttgggtccggcgcttgtggcgaggtgaaactcgccttcgagcggaagacttgtaagaaggttgccattaagattatttctaagaggaaattcgctatcgggtctgctagagaggctgatccagctttgaacgtcgaaactgaaatagagatcctaaaaaaattgaaccacccatgcatcattaaaattaagaattttttcgacgcagaggactattacatagtgctggaacttatggaaggtggagagttatttgataaggtggtcggcaacaagcgtctgaaggaggccacctgcaagctgtatttttaccaaatgctgttggccgtgcaaatcacagatttcggtcactccaaaattctgggcgaaactagcctgatgaggaccctctgtggcacccccacctacctggcgccagaagtgctggttagtgtaggcaccgcaggatacaatcgcgctgtggactgctggtccctcggagttattctgttcatatgcctttccggctaccccccattttcagaacatcggacccaggtcagtctcaaggaccagatcacgagtggaaaatacaacttcatcccagaagtttgggcagaggtgtccgaaaaagcactcgatctggtgaaaaagctgctcgtggttgacccaaaggccaggttcactactgaagaggcgctcaggcacccctggctgcaagacgaagacatgaaaaggaaattccaggacttgctatccgaggaaaatgaatcaacagccttaccacaggtccttgctcagccatccacatcacgcaagcgcccacgggaaggtgaggcagaaggggctgagacaaccaagagacctgctgtgtgcgcagcggtattgtag

SEQ ID NO: 241877 - DNA, 624 bp, Artificial Sequence
  derived and/or modified sequence
atgagcagagagagtgacgttgaagctcaacagtctcacggcagctctgcatgtagccagccacacggatccgtgactcagtcacagggatcaagctctcaatctcagggaataagttcttcttcaacatcgaccatgcctaattcatcgcagagctctcactcctcctctggtactctgagcagtcttgaaacagtctcgacgcaagagctgtatagtattccagaggaccaggaacctgaagaccaagagccagaagagccgacacctgccccatgggccagactgtgggcattgcaggatggctttgcaaatttagagtgtgtgaatgataactactggttcggcagagataaatcttgcgagtactgctttgatgagccactcctcaaacgcactgacaaatatagaacctactccaagaagcattttcgcattttcagggaggttgggccaaagaatagttatatcgcttatatagaagaccactccggaaacggtacctttgtgaatacagagctggtgggcaagggcaagagacgcccacttaacaacaacagcgagatcgctttgtccctcagccgcaacaaagagaagatccttaaaatttattctctctcatag

SEQ ID NO: 241878 - protein, 417 aa, Artificial Sequence
  derived and/or modified sequence
MSTRYHQAASDSYLELLKEATKRDLNLSDEDGMTPTLLAAYHGNLEALEIICSRGGDPDRCDIWGNTPLHFAASNGHAHCVSFLVNFGANIFALDNDLQTPLDAAASREQNECVALLDKAATAQNIMNPKKVTRLKEQAQKNARRQIKECERLQEKHQNKMAHTYSKEESGTLSSSKGTFSRSSPSNASAPGTFGSLSKGIKDTFKIKFKKNKDTAEQVGKEGRSGQRNVMEVFREEEEDSFSGDFKEKLQLSAEEDGSVHHESILNRPGLGSIVFRRNRISSPEDISDSKREFGFKLPSELLQRQGASEADEGAADEEGEENGLKDDLPWDDDEVEWEEDVVDATPLEVFLLSQHLEEFLPIFKREQIDLEALLLCSDEDLQSIQMQLGPRKKVLNAINRRKQVLQQPGQLVDTSL

SEQ ID NO: 241879 - DNA, 1254 bp, Artificial Sequence
  derived and/or modified sequence
atgtctactcgctaccatcaagctgcttcagactcctacctggagttgctgaaggaagctactaagagggatctgaacttgagcgacgaagatggcatgacacctaccctgttggctgcctaccatgggaatctggaggcgctggaaattatttgcagtcgtggaggcgatcccgatcgatgtgatatttggggcaacactccgttacattttgcagcttctaacggtcacgcacattgtgtctctttcctcgtcaacttcggggccaacatctttgcattggataacgatctgcaaactcccttagacgccgctgcaagtcgtgagcagaatgagtgcgtagctctccttgacaaggcagccaccgcccagaatattatgaacccaaaaaaggtgacacgactgaaggagcaggctcagaaaaacgctagaagacagataaaagaatgcgagagactgcaggagaagcaccagaataagatggcacacacatactctaaggaagaaagtggtactctcagtagtagtaaaggtactttctcacgctcaagtccatcgaatgcgagcgctcccgggaccttcggatcattgagcaagggcattaaggacacatttaaaattaaatttaagaagaacaaagacacagccgaacaggttggtaaagaaggacgctccggccagcggaacgtgatggaagtatttcgtgaggaagaggaggactcattttccggcgactttaaggagaagctgcagttgagcgctgaggaagatgggtcagtccaccatgagagcatcctgaacagaccagggctgggctctattgtgttccggagaaacaggatttcctctcctgaagacatttccgacagcaaaagggagtttggattcaagttgccttccgagttgctgcagagacagggggctagtgaggccgatgaaggcgctgctgatgaagagggagaggagaatggccttaaagatgatttgccatgggacgatgacgaggtagaatgggaagaagatgtggtcgacgcaacaccactagaagtctttttgctctcacagcacctggaagagttcctgcctatcttcaaaagagaacagattgatttggaagcactcctgctctgctctgacgaagacctacagagtatccagatgcaactcggccctaggaagaaagtgctcaacgctatcaatagacgaaagcaagtgctccaacagccagggcagctggtggatacatcattatag

SEQ ID NO: 241880 - DNA, 1254 bp, Artificial Sequence
  derived and/or modified sequence
atgagcacccgctaccaccaggccgccagtgacagctacctggagctgctgaaggaggccaccaagagggacctgaacctgagtgatgaagatggcatgacccccaccctgctggccgcctaccacggcaacctggaggccctggagatcatctgcagcagaggaggagaccctgacagatgtgacatctggggcaacacccccctgcactttgctgccagcaatggacatgcccactgtgtgtccttcctggtgaactttggagccaacatctttgccctggacaatgacctgcagacccccctggatgctgctgccagccgggagcagaatgaatgtgtggccctgctggacaaggccgccacagcccagaacatcatgaaccccaagaaggtgacccggctgaaggagcaggcccagaagaatgcccggcggcagatcaaggaatgtgagcggctgcaggagaagcaccagaacaagatggcccacacctacagcaaggaggagagcggcaccctgagcagcagcaagggcaccttcagccgcagcagccccagcaatgccagcgcccctggcaccttcggcagcctgagcaagggcatcaaggacaccttcaagatcaagttcaagaagaacaaggacacagctgagcaggtgggcaaggagggccgcagcggccagagaaatgtgatggaggtgttccgggaggaggaggaggacagcttcagcggggacttcaaggagaagctgcagctgtctgctgaggaggatggctctgtgcaccacgagagcatcctgaacagacctggcctgggcagcatcgtgttcagaagaaaccgcatcagcagccctgaggacatcagtgacagcaagcgggagtttggcttcaagctgcccagcgagctgctgcagaggcagggcgccagcgaggctgatgagggcgctgctgatgaggagggggaggagaatggcctgaaggatgacctgccctgggatgatgatgaggtggagtgggaggaggatgtggtggatgccacccccctggaggtgttcctgctgagccagcacctggaggagttcctgcccatcttcaagcgggagcagattgacctggaggccctgctgctgtgcagtgatgaggacctgcagagcatccagatgcagctgggccccaggaagaaggtgctgaatgccatcaacagaaggaagcaggtgctgcagcagcccggccagctggtggacaccagcctgtag

SEQ ID NO: 241881 - DNA, 1254 bp, Artificial Sequence
  derived and/or modified sequence
atgagcacccggtaccaccaggccgccagcgacagctacctggagttgctgaaggaggccacaaaacgcgatttgaatctaagcgacgaagatggaatgactcctacgttgcttgctgcctaccacggaaacctcgaggcattggaaatcatctgctcacgaggtggggacccagatagatgtgatatctggggaaatactccactgcactttgcggcaagcaatggacacgcgcattgtgtgtcattccttgtgaattttggtgcaaatattttcgcgttggataacgacctgcagacaccattagatgccgccgcatcccgagagcaaaacgagtgcgttgctctgctcgataaggccgctacagcgcaaaatatcatgaaccccaagaaagtgactcgactgaaggaacaagctcagaagaacgctcgtcgacagattaaggagtgcgagcgccttcaggagaaacaccagaacaagatggcccacacgtacagcaaagaggagtccggtactctgtcatctagcaagggtacgttctccagaagctctccgtccaatgcctctgctcccggcaccttcggtagcctgagtaagggcataaaagatacctttaagattaaattcaagaagaataaggacacagccgaacaggttggtaaggagggaaggtccggacagcggaacgtaatggaggtgtttagggaagaggaagaagactccttctcaggagacttcaaggagaagctgcagctctctgctgaggaagatggatccgttcatcatgagagcatcctgaaccgccccggtttaggctctatcgtgttccgcaggaatcggatcagcagccccgaagacatctccgatagcaagagagagttcggctttaagctgccctccgaacttttacaaagacagggggccagcgaagcggacgaaggggccgccgacgaagaaggagaggaaaatggcctaaaggacgatttgccatgggatgacgacgaagtagagtgggaagaggatgtggtggatgccactcccttggaagtatttcttctctcccagcacctcgaggagtttcttccgatcttcaaaagggaacagattgatttggaagccctgcttctgtgttcggacgaagacttacagagcattcagatgcagttgggccccagaaagaaggttttaaacgccatcaatagacgaaagcaagtgctgcaacagccggggcaattggtcgacacatctctgtag

SEQ ID NO: 241882 - DNA, 2906 bp, Artificial Sequence
  derived and/or modified sequence
ctgcctggagagacatctggccaagttctggtgagcaggaaaaatgtctactcgttaccaccaagctgctagtgatagttacctggaacttctaaaagaggctaccaagcgagatctaaatctttcggatgaagacggcatgactcctactctcttggcagcctaccatgggaacttggaagccctagagataatctgcagtagaggaggggaccctgataggtgtgacatctggggaaacactcctctacattttgcagcctccaatggccatgcccactgcgtctcattcctggtcaactttggtgccaacatctttgccctggataatgacttacagactccactggatgctgctgccagcagggagcagaatgaatgtgttgctctcctggacaaggctgccactgcacagaacatcatgaaccccaagaaggtcaccaggctgaaggagcaggctcagaagaatgccaggaggcagatcaaagagtgtgagaggctccaggagaagcaccaaaataagatggcccacacctacagcaaggaggaatccgggactctctcttcttccaagggtaccttctccagatcatccccttcaaatgcttctgctcctggcacattcgggtcactatctaagggcattaaagacactttcaagatcaagttcaagaagaacaaagatacagcagaacaggtggggaaggaaggcagaagtgggcagaggaacgtgatggaagtgttcagagaggaagaggaagactcgttctcaggggacttcaaagagaagctccagttgtcagcagaggaggacggcagtgtgcaccatgaatccattctcaatcgtccaggtctaggaagtattgtttttagaaggaacaggatatcgagtcctgaagacatctcagatagcaagagagagtttggttttaaactgcccagtgaattgcttcaaagacaaggagcatcagaggctgatgagggtgcagctgatgaagagggagaggaaaacggcctcaaagatgatctgccgtgggatgacgatgaagtggagtgggaggaagatgtggtcgatgccacgcccctggaagtgttcttgctgtctcagcacctggaagaattcctgcctatcttcaagagagagcagattgatctagaagctctgctgctctgctctgatgaggaccttcagagcatacaaatgcagctgggtcccaggaagaaagttctgaatgctatcaacaggaggaagcaggtgcttcaacagcctgggcagctggtcgacaccagcctgtgatggagagttttggcctggagcattggggtgatgctgtggcccgctggcagcactccaggcggcaccccctctttacccaatgccagaccactgggaatggattctagggcatcggaaatgcctacctgagagagagacccaaactttactctgggaggtaggctatgcccatccaaataaatctccatgagaaacttgaggagacttcataacaagaatctggcatttctcttcagttatcttatatgtacatataattgtttttgtggttgttttgttttgttttgttttgttttttggagatgaaggtctcagtctcttacccaggctagggtgcagtggtatgatcatagttcactgtattctcaacctcctgggctcaaatgatctcctcccacctcagcctcccaagtagctgagactacaggttcacaccccccacacctggcttattttgtatgttttagtagaggtggggtcttgccacattgcccaggctggtctcaaactcctggcctcaagcaatcctcccacctcagcctcctaaagcactgggattacaggtgtgaaccaccgtacccagcctatctttttgatacttttgaataaagaaagggtcatatgcatgacaggaaaatgaaagaaacttcctttacttttctatctctggatttaaaattataatctcatcacattatcctgctgcttgctttccgatctgtgtaacctgggaattccaattctttttctctcctgagatctatgactttgcctagtggtagagactagagttctttcctggcctgcggcttgatgcccaacttaaatgcatctaaccctttaacaaatgtgtacatgtttacaagtaatggaaatgcgtctataatactcctgcctgagaatagagacagagtggtggtggggagagtgaagaaagagatagaatacaggtggtacctgttgtggactgaattgcgtcaaattcatatgttggagctctaacccctaatgtgactgtaattggaaataagacctttaaagaagtgattaaggttaaatgaagtcataagaatgcaaccctaatcctgtaggactggtgtcctttttttccctttttttttttttttttgagatggagccttgctctgtcactcatgctggagtgcagtggcgtgatctcagctcactgcaacccccgcctcccaggttcgagcacttttcatgcctcagcctcctgagtagctgggattacaggcgtgcaccacaacgcctggctaagtttttgtatttttagtagaggcggggtttcaccatgttggccaggctggtctcaaactcctgacctcaggtgatccacctgcctcggcctcccagagtgctgggattacaggcatgagccactgcacctggcctaggactggtgtcctaagaagaggaagagacacttaggtggaaggcacacagagaggccacgtgaggacacagtgagaaggtggccgtctgcaagccgaggagggggcctcaggagaaaccaaccctgcaatcaccttgatcttgggctttcagcccccaaaggtgtgagaaaataaacttcggttgataaactgct

SEQ ID NO: 241883 - DNA, 1254 bp, Artificial Sequence
  derived and/or modified sequence
atgagcacacgttaccaccaggccgcatccgattcctatctggaactgctgaaagaggctaccaagcgggacctcaacctgtcagatgaggatgggatgacacctactttgctggctgcgtaccacggcaatcttgaagccctcgaaatcatctgcagtcgtggcggtgatcctgaccgatgcgacatctggggcaatacccctttgcacttcgccgcatcaaacgggcacgctcattgcgtaagttttctcgtgaacttcggcgcaaatatatttgcccttgataacgacttgcagacacctctcgatgcagccgcaagtcgggagcagaatgaatgcgtggctctgctcgataaagcagctaccgcccagaatatcatgaacccaaagaaagttacccggcttaaggaacaggcccagaagaatgcccgacggcaaatcaaagaatgcgagagactgcaggaaaaacatcagaacaaaatggcgcatacttacagcaaggaggaatccggaaccctctcgtcttccaagggcacctttagcaggtcctcgcctagcaacgcgtcagctccgggtaccttcgggtcactgagtaaaggaatcaaggatacttttaagataaaatttaagaagaataaggatacagccgagcaagtcggaaaagaaggacggtcaggtcagaggaatgtcatggaggtgttccgggaagaagaggaggattcgttttccggagattttaaggaaaaactgcaattgtccgctgaggaggacggctccgttcatcatgaatcaatcctgaaccgaccaggtttggggtcgattgtgttcaggagaaataggatctccagtccggaagacatctctgattcaaaacgggagtttggctttaagctgccttcagaactcctgcagcggcagggagcctccgaagctgatgagggggcagccgacgaggaaggagaggagaatgggttgaaagatgacctaccttgggacgacgatgaagtcgagtgggaggaagacgtggtcgacgcaaccccactcgaggtgttcctcctctctcaacacctggaagagttcttgccaatctttaaaagggagcagatagatctggaggcgctgctcctttgttcagacgaggacctccagtctatacagatgcagctcggaccccgaaagaaagtcctcaatgcgatcaaccgccgaaagcaggtccttcagcagccagggcaactggtggacacatccttgtag

SEQ ID NO: 241884 - DNA, 1254 bp, Artificial Sequence
  derived and/or modified sequence
atgagcaccagataccaccaggccgccagcgacagctacctggagctgctgaaggaggccaccaagagagacctgaacctgagcgacgaggacggcatgacccccaccctgctggccgcctaccacggcaacctggaggccctggagatcatctgcagcagaggcggcgaccccgacagatgcgacatctggggcaacacccccctgcacttcgccgccagcaacggccacgcccactgcgtgagcttcctggtgaacttcggcgccaacatcttcgccctggacaacgacctgcagacccccctggacgccgccgccagcagagagcagaacgagtgcgtggccctgctggacaaggccgccaccgcccagaacatcatgaaccccaagaaggtgaccagactgaaggagcaggcccagaagaacgccagaagacagatcaaggagtgcgagagactgcaggagaagcaccagaacaagatggcccacacctacagcaaggaggagagcggcaccctgagcagcagcaagggcaccttcagcagaagcagccccagcaacgccagcgcccccggcaccttcggcagcctgagcaagggcatcaaggacaccttcaagatcaagttcaagaagaacaaggacaccgccgagcaggtgggcaaggagggcagaagcggccagagaaacgtgatggaggtgttcagagaggaggaggaggacagcttcagcggcgacttcaaggagaagctgcagctgagcgccgaggaggacggcagcgtgcaccacgagagcatcctgaacagacccggcctgggcagcatcgtgttcagaagaaacagaatcagcagccccgaggacatcagcgacagcaagagagagttcggcttcaagctgcccagcgagctgctgcagagacagggcgccagcgaggccgacgagggcgccgccgacgaggagggcgaggagaacggcctgaaggacgacctgccctgggacgacgacgaggtggagtgggaggaggacgtggtggacgccacccccctggaggtgttcctgctgagccagcacctggaggagttcctgcccatcttcaagagagagcagatcgacctggaggccctgctgctgtgcagcgacgaggacctgcagagcatccagatgcagctgggccccagaaagaaggtgctgaacgccatcaacagaagaaagcaggtgctgcagcagcccggccagctggtggacaccagcctgtag

SEQ ID NO: 241885 - protein, 666 aa, Artificial Sequence
  derived and/or modified sequence
MAMTWIVFSLWPLTVFMGHIGGHSLFSCEPITLRMCQDLPYNTTFMPNLLNHYDQQTAALAMEPFHPMVNLDCSRDFRPFLCALYAPICMEYGRVTLPCRRLCQRAYSECSKLMEMFGVPWPEDMECSRFPDCDEPYPRLVDLNLAGEPTEGAPVAVQRDYGFWCPRELKIDPDLGYSFLHVRDCSPPCPNMYFRREELSFARYFIGLISIICLSATLFTFLTFLIDVTRFRYPERPIIFYAVCYMMVSLIFFIGFLLEDRVACNASIPAQYKASTVTQGSHNKACTMLFMILYFFTMAGSVWWVILTITWFLAAVPKWGSEAIEKKALLFHASAWGIPGTLTIILLAMNKIEGDNISGVCFVGLYDVDALRYFVLAPLCLYVVVGVSLLLAGIISLNRVRIEIPLEKENQDKLVKFMIRIGVFSILYLVPLLVVIGCYFYEQAYRGIWETTWIQERCREYHIPCPYQVTQMSRPDLILFLMKYLMALIVGIPSVFWVGSKKTCFEWASFFHGRRKKEIVNESRQVLQEPDFAQSLLRDPNTPIIRKSRGTSTQGTSTHASSTQLAMVDDQRSKAGSIHSKVSSYHGSLHRSRDGRYTPCSYRGMEERLPHGSMSRLTDHSRHSSSHRLNEQSRHSSIRDLSNNPMTHITHGTSMNRVIEEDGTSA

SEQ ID NO: 241886 - protein, 35 aa, Artificial Sequence
  derived and/or modified sequence
MAMTWIVFSLWPLTVFMGHIGGHSLFSCEPITLRM

SEQ ID NO: 241887 - DNA, 13726 bp, Artificial Sequence
  derived and/or modified sequence
gccgctccgggtacctgagggacgcgcggccgcccgcggcaggcggtgcagcccccccaccccttggagccaggcgccggggtctgaggatagcatttctcaagacctgacttatggagcacttgtaacctgagatatttcagttgaaggaagaaatagctcttctcctaagatggaatctgtggtttgggaatgtggttgatcaacttgatatgttggccaaatgtgccccatgtaataaaatgaaaagaagagacaagatgatgtcattttcccatattgtgaaaccaaaaacaaacgccttttgtgagaccaagctaacaaacctctgacggtgcgaagagtatttaactgtttgaagaatttaacagtaagatacagaagaagtaccttcgagctgagacctgcaggtgtataaatatctaaaatacatattgaataggcctgatcatctgaatctccttcagacccaggaaggatggctatgacttggattgtcttctctctttggcccttgactgtgttcatggggcatataggtgggcacagtttgttttcttgtgaacctattaccttgaggatgtgccaagatttgccttataatactaccttcatgcctaatcttctgaatcattatgaccaacagacagcagctttggcaatggagccattccaccctatggtgaatctggattgttctcgggatttccggccttttctttgtgcactctacgctcctatttgtatggaatatggacgtgtcacacttccctgtcgtaggctgtgtcagcgggcttacagtgagtgttcgaagctcatggagatgtttggtgttccttggcctgaagatatggaatgcagtaggttcccagattgtgatgagccatatcctcgacttgtggatctgaatttagctggagaaccaactgaaggagccccagtggcagtgcagagagactatggtttttggtgtccccgagagttaaaaattgatcctgatctgggttattcttttctgcatgtgcgtgattgttcacctccttgtccaaatatgtacttcagaagagaagaactgtcatttgctcgctatttcataggattgatttcaatcatttgcctctcggccacattgtttacttttttaacttttttgattgatgtcacaagattccgttatcctgaaaggcctattatattttatgcagtctgctacatgatggtatccttaattttcttcattggatttttgcttgaagatcgagtagcctgcaatgcatccatccctgcacaatataaggcttccacagtgacacaaggatctcataataaagcctgtaccatgctttttatgatactctatttttttactatggctggcagtgtatggtgggtaattcttaccatcacatggtttttagcagctgtgccaaagtggggtagtgaagctattgagaagaaagcattgctgtttcacgccagtgcatggggcatccccggaactctaaccatcatccttttagcgatgaataaaattgaaggtgacaatattagtggcgtgtgttttgttggcctctacgatgttgatgcattgagatattttgttcttgctcccctctgcctgtatgtggtagttggggtttctctcctcttagctggcattatatccctaaacagagttcgaattgagattccattagaaaaggagaaccaagataaattagtgaagtttatgatccggatcggtgttttcagcattctttatctcgtaccactcttggttgtaattggatgctacttttatgagcaagcttaccggggcatctgggaaacaacgtggatacaagaacgctgcagagaatatcacattccatgtccatatcaggttactcaaatgagtcgtccagacttgattctctttctgatgaaatacctgatggctctcatagttggcattccctctgtattttgggttggaagcaaaaagacatgctttgaatgggccagtttttttcatggtcgtaggaaaaaagagatagtgaatgagagccgacaggtactccaggaacctgattttgctcagtctctcctgagggatccaaatactcctatcataagaaagtcaaggggaacttccactcaaggaacatccacccatgcttcttcaactcagctggctatggtggatgatcaaagaagcaaagcaggaagcatccacagcaaagtgagcagctaccacggcagcctccacagatcacgtgatggcaggtacacgccctgcagttacagaggaatggaggagagactacctcatggcagcatgtcacgactaacagatcactccaggcatagtagttctcatcggctcaatgaacagtcacgacatagcagcatcagagatctcagtaataatcccatgactcatatcacacatggcaccagcatgaatcgggttattgaagaagatggaaccagtgcttaatttgtcttgtctaaggtggaaatcttgtgctgtttaaaaagcagattttattctttgccttttgcatgactgatagctgtaactcacagttaacatgctttcagtcaagtacagattgtgtccactggaaaggtaaatgattgcttttttatattgcatcaaacttggaacatcaaggcatccaaaacactaagaattctatcatcacaaaaataattcgtctttctaggttatgaagagataattatttgtctggtaagcatttttataaacccactcattttatatttagaaaaatcctaaatgtgtggtgactgctttgtagtgaactttcatatactataaactagttgtgagataacattctggtagctcagttaataaaacaatttcagaattaaagaaattttctatgcaaggtttacttctcagatgaacagtaggactttgtagttttatttccactaagtgaaaaaagaactgtgtttttaaactgtaggagaatttaataaatcagcaagggtattttagctaatagaataaaagtgcaacagaagaatttgattagtctatgaaaggttctcttaaaattctatcgaaataatcttcatgcagagatattcagggtttggattagcagtggaataaagagatgggcattgtttcccctataattgtgctgtttttataacttttgtaaatattactttttctggctgtgtttttataacttatccatatgcatgatggaaaaattttaatttgtagccatcttttcccatgtaatagtattgattcatagagaacttaatgttcaaaatttgctttgtggaggcatgtaataagataaacatcatacattataaggtaaccacaattacaaaatggcaaaacattttctctgtattcattgttgtatttttctacagtgagatgtgatcttgccaaagccaccagaccttggcttccaggccctcctgtagtgagttgattgtctgcacttgccttgcccaatagccagtaggctacagcttttgccccacacccttattttcagattctggatcattcttgtttacaactgaaatatatataacctcagtccaaagtggtgattgatttgagtatttgaaaattgttgtagctaaatgaagcatgattagtcttagtatgaatatcatttaatctttaaaaaatcaagtaaaaatgtttatctgataatgtttaaataatttacaatataaactgtaaaacttattaggcatgaaatcaatcagaagagaaagaaaaatgctggaacatgcttgatgtattatgtaaaaagcatatttaaacaagggtcctcaaccctgactgcagataagaatcacttgggttacttcagatgcctaacaccttcctctcatacaaataagaattggtagctttcttaaaaaaaaaaaaaaaaaaaaaaagcgctccaggtgattctaatctgcagcctggcttgaaactcactactttaacttgcccctgatgatctgtcggcatcatatatcacatgaacatccacatggattctgtctttcgcttttatatcattatctaatattcagttgttctgcacctgatgccaaattctgggctgtactcctagagagacttactcagtaaggccaaagtgataggactttaaaatctgtagttataaaaataccgcaggtgattcttacggaggtaatccaagaatcatactttgaagaattattctagactctgaagaggcctggctctgccttatgctattatagtttatgacctttaacaatttaactctccgagcctcagttcccttgtttgtaaatgaagatagaagataaatacgtactctacctacctcacaaagctgtcagattaagatcaagtgaaaaaaattatgtgaaagctctttgaaaactgtaaagcattatgaatgataagggattaggttattgtggatttaagaggtgtgaggactgctatagtacattccttgacgtgtgttgaattcatgtatactttctttcttaccctttaaaacaaactgccaagaaattaggtgttgaaaaagaatattctcatcaggcagcaaagtcagttttctgatagtaataatttgtctattatgttatatatttcaaagtacatgtatgataatatgacttattcttcatgagagatatttgaatatttggcccaaaatgtttttcatttttctctgtgttcattgcctttctccttggagctggagttaatgctcaaagcaggcaggtctgaattccctcataaccgacaattagtaaacattttctctgaaagccaaacatataacaacttatttatcaataattcatgaagcttttgtctgagaatctctcctgcaaacagcatgagagaactaaaacaaacattcacaaacaaaaataagttaaaatagaaggtaccagtttgggctcgaagatgttgtcatccattgccatctgcattatattatcaactgccaaaatgttaattggttttcttttacaagtgggccaagtatagacagttaagtgaacatcactatgaaaatcttaactttgtgcttctagatttttagataatcatttgtattttctctattaaattgtgggtatgtatgggaatactatattgacttttcagttactttcagtaagtatcttaattttgtcccacaaaatttatgtaatattaatccatggttttaaacaacagtattcagtttgggcagcagttttaagtctaactagcttaaaccaatctgaataagtctggacagttttcctaccatatgtttaactttgattggcatatgataatgtttagtgttttcttttttcagttgacaactgagaaaataatagttctctctaacatgttaatatattatcaaaaggttttcaaaaagtactttgatttcagcaactttttttattcaataactagacaaaagatctaagataatattaaactcaaaacagtttgtttcaaagaacaattggttaataactcagctggcacagggattcatacacagtttttcaataaatatttaaatgaacaattcatgtcacacaacttgcttttaccctagtactgagtctcacatcaaagaaatttgaaagatctataacctatgtgaaatgaagtctctgctttaccagaataatatgtggcaggtaataaatatgtaaagtacaccaaatgaaacatattttgcatagataacagtccatatcactattataattaaagaaatatatgtacagacatgtaccaatccttttaattaattttagaagatgaacagtgattcttagaagtgagtaattagactccttttagtcttatgctgttagatctttgtggaccagctgagtaaatgaatcttcaaatcaacctttctttttctgctgctcttagagcagatttataaaaatcctaagaatgtcttcaaattagaaaaatttactacattttaacctacctcatcagtttctttgtgataatagctgaaaataactcaaactgtacccatcttagttaggctatatctctgtgaaatgaaaggaaccacttaattttttttatataaattagtgaatcatttgctggagcttagaaaatattaacataccaaaatttcattatgatgatatttatattgctttttgacatgccaaaggtacatttacatattaccatatttggatgacttacatagtctggtgtaatgaaaattcccctgggattggaattttaagactcatgatgtcaactgggctggtcattttatttctctgagtctttgtttcttcaatgtaaaatgtggataaggtaatttttggttttagcctccctcactggatattgtaaggatcaaatgaaatagtatttattataatgctctgtaacccataaattattctacttaaaaaaattttttatagagacagggtcttgctctgtcacacaggctggagagcagtggcataatcatagttcattataaccttgaactcctaggctcaagcagtcctccagcttcagcctcccaagtagctaagactgtaggcatgcaccactacacctggctaattttaatttttttttctttttttgagacggagtctggctttgttgcccaggctggagtgcagtggcacaatctcagctcactgcaacctccacctcccaggttcaagtgattcttctgtctcagcctcccgagtaactgggactacaggtgcgtgccaccacatccagctagtttttgtatttttagtggagatggagttttgccatgttggtctcaaactcctgacctcaagtgatctgcccacctcagcctcccaaagtgctaggattacaggcatgagtcactgcacctggcttaattttaatttttttaattttttgtagagatgagtctcactatgttgaccaggctggtcttgaactcctggcctcctaaagcactgggattacaagcatgagccaccatgcctgatccataaattgttctactgataccatttggttttgttagaatttgggggggctatagaaaacaaggttacagtcttcattagtatttctttttagcaataacaacaaaataggcaattagaccagtgttcatttggtacagtctttaaatcggtcatccaattaacctttaaaaagtaggttatgctcttaaattgtattggttctttaatatgtgttataccagagtatgcctcaaattttatgtagttgaatttgtagaacaaatttggggatattcattttatttttccttttatatgaaattgtataagtacattagcttgacttaaattataaaaaaaaatatatatgaagaagaatgtagaccctataatgttttttgtctttgactttttggcttttatgtacctcattttttctgattgagaaaaagttttgaaaaagtgattcacttgttggttttcattgtggcaaaactttaaattttaagtcatcacactatgagaattgtttgtacacatttataatttttttaaagtatgtaaagtaaggattttttctccattcttcactcacaaaggatagcatttttatggaacctagatttacaaaggaacttgtgattcttttcaatgcttttgtgtcgttttacagctgattaagaaaaaatgtttacatttaattcagctgtatttcctagtagctgtataatcttacacattattcttatataattttgacctattttatatgaaaataattgtattggcatctcttcataatttaattctcttctctccttcttttgttccgattagatgaatttgggaaaggagtaggaagactaggtatcgcatgccttccgtctgattgtaatcagtctcctgggttttttactaatttaatcttaatcctgtgcttctttagtcatcaaattgatataggattacaattttctctcaggatccaagtcttctaagaatgaaaatgttgaagtctacccagaaccagccatccttgtagacatttctatttggttgatttataaagatttaatatataaagatttaatatgagttaaacatgtttcttattctgtgatctctaattagaaagtaaaattctgttgccataaatataaaagaaagttttcacttatattttagtcaaacaccaaaccactgcattacttacttcctataagacacagtagttcaatctgttgaaaggcattgaaggataatttccttcagattactttttaaatcatcatctgcctcaggaaattctttcttgaatttttttgttggtgtgaaagcgttgcttatactttatgctcattttattggtcactgtcaccagtttttcccgataaagattaaaaatgttttttaccttgaaataattcagattttgaagattcactgtttcattattttgctaattaccattaactagtaaagttagtttttaaagtttttttaaggttgatattttatcatattcctggagtaggatggattactttattattattgtagctttaaggttttttgttgtataagtcagcttgtttgtatatgctaaattgcagatatttctttgtgttgtgcttattggtttttttttttaacttagagcttaataatttctattttctatcctggagtctaaaattaaacaaaaaaatctattttctaaattggcaggatttttttaatgattagtaaaactgtattattttatttttaaaaatacaataggattttgagtcaggaaacttgacttctactcttgcctctcttttgcagttagctgtgtaactttggataaggcattttatctcgtggtgcctccatttttctcattctctagggaacaagagaattagtttaggtagcgtctaaaattccgcccagctctcatttggttctcatttgaccattttataatcattattttggtctcatttttattcttcttattcatcccatgaactagatcaacttgtattattttactagatcaacctgtattattaacgtcatttacatgtaaattgatgggattcagatattttatcaactgtttttccattagtgattttaagtaattttaaagaaggaaaattatattacagataataaaaatgaaagaaagttataaatattggacatggcttttttaaatgggaaagtcttcttaagcaccaatataagcaccttaaattgatacatagaaaagaatgacataacgttttgtggtctttgttctcttaaatatgaatatagctagttagcctaaaatttacacaaaatgtattcaagatcaaattagtgaacaaagcaatggttcgtatggctaatttaaaagcaattcaatttaccaatattaaaataattataaaatgtaaaagaaatttcagaggagttgattgaaaattttttgttcagtaattattcttaaactgcattcttaggtttattacataaatatagttgccagattgccatgggcaagtgaatgtcttcatttgaaatattattagagatcaatgtggcttgttatttttaatttttttctggctatacagaaaatgtttctggaaaaattccttaattgtcatctgatataatgtagagattgaggccagacgcagtggctcacgcctgtaatcccagcactttgggaggccaaggtgggcagatcacctgaggtcaggagttcgagaccagcctgatgaacatggcaaatccccttctgtactaaaaatacaaaaattagccaggcgcagtggctcacgcctgtaatcccaacactttgggaggccgaggcgggcggatcacgaggtcaggagatcaagaccgtcctggctaacatggtgagaccctgtctctactaaaaacaaaaaaattagttgggcatggtggcgggcacctgtagtcccagccactcgggaggctgaggcaggagaatggcgtgaacccgggaggcggagcttgcagtgagctgagatcgcaccgctgcactccagcctgggcaacggagcgagactctatctcaaaaaaaaaaaaagaaaaaaaaaaaagtagagattgcattagttccatatctccgcagagttctctggtagattaaatgttctctgtgcactaggccaaggaagttcctgttacctttgaaaatcattgtgtttgctctgattgtctacattagctcatatcagtcttttgaacactggttcaaatctgggtgttgggttaggatctgatgagtagagaatagtggaaagttgatataggaaggtatactggtttctggtgtgattctttagctacatttattccttgtcttatgtcatttcactggatcatgtaactgtcctggctttcagaaattatattagatgcccagcctttctcattcagagatgcctgtattattatgttatttcgattgcctaccaaaaaaaaaaaaaaaagaaaaggtttgtttttagttctctgcctctgcaagtctttgtgatcacatttgttaaattgaatctgagattcaaatatttcatttaatattttctgggttttgataatgggatattctgtaagataaagcaagtaatcctagagtgatttactttatgtttagccatccaccattttcctatttctctactcctcccattctccatttttaaaaggaaattaacaaatgtcttcctttatccctgcctcagataatttttccctgaactcatcttgtcagcagaaacatttaatgtgaaataattctgtatttctgagacaagatcaacacagtagttctttacattgagctgaggtgaatgtatacttaaaaatactctattttctttttatatgaacttaaaatttttaaaatcatatatgggactccccaatgtgaaaatattagtctggacattctcttgccatcaggtgctatttctaccttagctgtgagttagactaaatccaaatttcgtatcattcatctttttataatatttaacttccctagaatcaccccatttcatgtctttaaccccaacttccaacaacttttctgcttttattttcaaatgtcaaattgtatttttgtgttttattttctcattgaagtgtaaaagtatcacatatatgaaggaatggctggtttagacatttactttggcatagtaaagattgatattgataccacccaccatcctttcctctagccccagaaagaaaagtttgacaactcaaaaacgattaaattatcttatcttgttatttaatagaacaatggaagctgtttcgtcaaaattaaaatactttaccaaaaaaatacttttttgtattttaatctgatagtgaatttggggattatttatgtaaatgtatcataattaatagtaattatgagttatttcactctctgtaatttgtgatacccaagattcatatttatttaatgtgaggtgttttttgaggcttttttgttttatcttgttttcttaactttttacagtgttgttagattatcgcggtcatctcggcatgtggatcgctcctcctgtagatcagctgttctctcttagagtcaggacaaggaggtttttgctacatggtcgtagttggataatacagcattattctgaactatctgaaattgctggttttattggtcaaaaatgatcagatgctagcaatttcataatagatatattcaagaaggaaccaaactttaaaagatcttttagaataggtatgttaacttctcatcctaaccctatcaatatatcagaggctttatgaaggagactctacagataaccacaaatcttatcaagaaaattctccttaaaaaaagttatcctttattttgttgttaaatttcccagtttttaaaagtgttttatcaaaatgacttcataattgaagcaaataccttttggaagtatatatgttacataagactttcactaaatctgtgcgtaaagcttttataatctgagatattgttatgtattaggtttgtgcaaacctaatataaaagggttcatctgtaagtatcatttagaggcaaaataatttccccctcacatctaatgtggactcaaattttggcaactggaatgttatcctcttggtaggcattctaaattaatgaatactgctatgtggtgtagtaaacaaatttgccataaaatgccatttaaggattttctttttacctttatttcattataaaagtatatgagttgaagatcatataaaaaatatgaaactcctacacaggaaatccccaattttgtgatttaataggttgtaaaaagagttgttccaaattcagactacatctcatcatataaataatattatgaataataagggtaaaagattagccaacaaaagctaatctagtacaccccatagaggtactccaggtgtcttggttttggataaatttttatagtggagaaaggttactttgatctctcaataattgcttggtacacttcttcctaggcaatatgctcatgataccctcttcatgtgacctattcctcaaatgctgcattctccaaaacttccttacctgccttctatcccctagtcattcttatcaatacttccaaaatataacctatctcaagtgttagaaatttgctttaactaatttatattaaagtgttagtgactatagcccttttatctctcttaaagagaaatctgcattaaaagcaaacacattgctgttagctcaaattaatgtcagtgagtagaatcttaagctttaaaacaaaagtggaaataatttaaattagtgttgatgggactattttgaggcaagagataccattaagtgacctagcttggaaatctgccccctttgcccaaacccatgtgatgtctgaaactactgtatattttcaatgaccttgagaaagggagctagtcatttgtatttatgggccttatgaagtcagggcctgctgatcctgttttttaagttcaagcgcaatgcctgaagcatcctagatctccttcaccctcattctacctgacagacagctaggtctgtcttccagctctttctcattgatactacctttacatatgaatactatccatgcttgttaaaaaaaaaaaaagtctttccccattttactgttacaatttttcaagagctataaaggtagaaaaagtattccttttcattattctaaaaaatatgtcatttttaaatagctggcacttagcagtttagttttccaaactttattctgaatcaaattgctgaggtgattctaaatgtctaatgttgatttatcatataaacatctaattagaaagtgtttatgctaaagacttgtattttgtggcattagttcttcatgtttcttttttatatgtttattaaaattgttcacttccaaatgagtggaaaagttgctgttgttgggatgtacagggcaagtgcacttggttagagcatgaactgggaatttcacattctctgatgtgctttgcactctgctcttgtagatttattttgtttacagtagactgatgtcagtttttgtaaatgttttttcttagcactttaactgtgagtgtacaaactgattttaaatgtagtggttgtatattttggttataaattggagatttttaataaaattaaataattctc

SEQ ID NO: 241888 - DNA, 3101 bp, Artificial Sequence
  derived and/or modified sequence
gcgaaagctcgctgtcgctgggaggcgcgcgccggcgttcctcggccgctccgggtacctgagggacgcgcggccgcccgcggcaggcggtgcagcccccccaccccttggagccaggcgccggggtctgagatatttcagttgaaggaagaaatagctcttctcctaagatggaatctgtggtttgggaatgtggttgatcaacttgatatgttggccaaatgtgccccatgtaataaaatgaaaagaagagacaagatgatgtcattttcccatattgtgaaaccaaaaacaaacgccttttgtgagaccaagctaacaaacctctgacggtgcgaagagtatttaactgtttgaagaatttaacagtaagatacagaagaagtaccttcgagctgagacctgcaggtgtataaatatctaaaatacatattgaataggcctgatcatctgaatctccttcagacccaggaaggatggctatgacttggattgtcttctctctttggcccttgactgtgttcatggggcatataggtgggcacagtttgttttcttgtgaacctattaccttgaggatgtgccaagatttgccttataatactaccttcatgcctaatcttctgaatcattatgaccaacagacagcagctttggcaatggagccattccaccctatggtgaatctggattgttctcgggatttccggccttttctttgtgcactctacgctcctatttgtatggaatatggacgtgtcacacttccctgtcgtaggctgtgtcagcgggcttacagtgagtgttcgaagctcatggagatgtttggtgttccttggcctgaagatatggaatgcagtaggttcccagattgtgatgagccatatcctcgacttgtggatctgaatttagctggagaaccaactgaaggagccccagtggcagtgcagagagactatggtttttggtgtccccgagagttaaaaattgatcctgatctgggttattcttttctgcatgtgcgtgattgttcacctccttgtccaaatatgtacttcagaagagaagaactgtcatttgctcgctatttcataggattgatttcaatcatttgcctctcggccacattgtttacttttttaacttttttgattgatgtcacaagattccgttatcctgaaaggcctattatattttatgcagtctgctacatgatggtatccttaattttcttcattggatttttgcttgaagatcgagtagcctgcaatgcatccatccctgcacaatataaggcttccacagtgacacaaggatctcataataaagcctgtaccatgctttttatgatactctatttttttactatggctggcagtgtatggtgggtaattcttaccatcacatggtttttagcagctgtgccaaagtggggtagtgaagctattgagaagaaagcattgctgtttcacgccagtgcatggggcatccccggaactctaaccatcatccttttagcgatgaataaaattgaaggtgacaatattagtggcgtgtgttttgttggcctctacgatgttgatgcattgagatattttgttcttgctcccctctgcctgtatgtggtagttggggtttctctcctcttagctggcattatatccctaaacagagttcgaattgagattccattagaaaaggagaaccaagataaattagtgaagtttatgatccggatcggtgttttcagcattctttatctcgtaccactcttggttgtaattggatgctacttttatgagcaagcttaccggggcatctgggaaacaacgtggatacaagaacgctgcagagaatatcacattccatgtccatatcaggttactcaaatgagtcgtccagacttgattctctttctgatgaaatacctgatggctctcatagttggcattccctctgtattttgggttggaagcaaaaagacatgctttgaatgggccagtttttttcatggtcgtaggaaaaaagagatagtgaatgagagccgacaggtactccaggaacctgattttgctcagtctctcctgagggatccaaatactcctatcataagaaagtcaaggggaacttccactcaaggaacatccacccatgcttcttcaactcagctggctatggtggatgatcaaagaagcaaagcaggaagcatccacagcaaagtgagcagctaccacggcagcctccacagatcacgtgatggcaggtacacgccctgcagttacagaggaatggaggagagactacctcatggcagcatgtcacgactaacagatcactccaggcatagtagttctcatcggctcaatgaacagtcacgacatagcagcatcagagatctcagtaataatcccatgactcatatcacacatggcaccagcatgaatcgggttattgaagaagatggaaccagtgcttaatttgtcttgtctaaggtggaaatcttgtgctgtttaaaaagcagattttattctttgccttttgcatgactgatagctgtaactcacagttaacatgctttcagtcaagtacagattgtgtccactggaaaggtaaatgattgcttttttatattgcatcaaacttggaacatcaaggcatccaaaacactaagaattctatcatcacaaaaataattcgtctttctaggttatgaagagataattatttgtctggtaagcatttttataaacccactcattttatatttagaaaaatcctaaatgtgtggtgactgctttgtagtgaactttcatatactataaactagttgtgagataacattctggtagctcagttaataaaacaatttcagaattaaagaaattttctatgcaaggtttacttctcagatgaacagtaggactttgtagttttatttccactaagtgaaaaaagaactgtgtttttaaactgtaggagaatttaataaatcagcaagggtattttagctaatagaataaaagtgcaacagaagaatttgattagtctatgaaaggttctcttaaaattctatcgaaataatcttcatgcagagatattca

SEQ ID NO: 241889 - DNA, 2001 bp, Artificial Sequence
  derived and/or modified sequence
atggccatgacctggattgtgttctctttgtggccattgactgtgtttatgggccacataggcgggcatagccttttttcatgtgagcctatcaccttgaggatgtgccaagaccttccttacaacaccactttcatgcctaatctgctgaaccattatgatcagcaaaccgcggccctggctatggagccattccatcccatggttaatctcgactgtagcagggacttccggccatttctttgtgctttgtacgcgcccatctgtatggagtacggcagggtgaccctgccttgtcggagactctgccagagggcatactctgagtgcagcaaactcatggagatgtttggagtaccttggcccgaagatatggagtgctcacggttccccgattgcgatgagccttaccctcgattggttgacttaaacctggctggagagccgactgagggagcccctgttgctgtgcaacgcgactacgggttctggtgtcctcgagagctcaagatcgaccccgacctaggctactcctttttgcacgtaagggattgcagcccaccgtgccctaatatgtatttccgacgcgaagagctcagttttgcacgctactttattggcttaataagcatcatttgcctgtctgccactttgttcaccttcctgacctttttgatagatgtcactcgatttagatatcccgagcggcccataatattctacgccgtatgttatatgatggtgtctctgatcttttttattgggttcctccttgaggatcgagtggcttgtaacgcaagcattcccgctcagtacaaagcgagtactgtaacacagggttcccacaacaaagcgtgcaccatgttattcatgattctttacttctttaccatggctggttctgtgtggtgggtgattcttacaattacttggttcctggccgcggtgcccaagtgggggtctgaggcaatagagaaaaaagctctgctgttccatgcctcagcctggggaatcccaggaacgctgacaattattctgcttgccatgaataaaattgagggcgacaatatctcaggtgtctgcttcgtgggtctgtacgatgtggacgcccttcggtatttcgtgctggccccgctctgcctttatgtggtcgttggtgtttcattgttactggcaggcatcatctctcttaatagagtgaggatcgagataccactagagaaggagaaccaagacaagctggtgaaattcatgattcgaatcggagtgttctcaatcctgtatttagtacccctcctggttgtcattgggtgttacttctacgaacaggcttatcgcggcatttgggaaaccacttggatacaggagaggtgtcgcgaataccacatcccttgtccttatcaggtgactcagatgtcaaggccagacctgattctcttcctgatgaagtacctgatggcattgatcgttggcattcctagcgtattctgggtcggttctaagaagacatgcttcgaatgggcaagcttcttccacggaaggcggaaaaaggaaattgtgaatgagtcacgccaagtgctgcaggagccggattttgcccaatccttactccgcgacccaaacacccccatcattaggaaatctcgagggacaagcacccaaggcacatctacacacgcttcttctacccaattagccatggtggacgatcaaagatctaaagctgggtcaatacattccaaggtgtcgagctatcatggcagtcttcacaggtcacgggatggccggtacaccccctgttcttacagagggatggaagaaaggctgccgcatgggagcatgagtcgccttaccgaccacagtcgccatagttctagtcaccgcctgaatgagcaatctaggcattcctccatcagagacttatcaaacaatcctatgacccacatcacacacggcacgagcatgaacagagtaattgaggaggatggcacgtcagcttag

SEQ ID NO: 241890 - DNA, 2001 bp, Artificial Sequence
  derived and/or modified sequence
atggcaatgacatggatagtgttctccctatggcctctgacagtgttcatgggtcatattggtggccactctttattcagctgtgagcccatcacactgcgtatgtgtcaggacttaccctataataccactttcatgcctaatctgttgaaccactatgaccagcagaccgccgccctggctatggagccatttcaccctatggtaaatctcgactgctccagagacttccgcccatttttgtgcgccctgtacgctccaatttgtatggaatacggacgcgtaacactgccctgccgcagactctgccaaagagcttattccgagtgctctaagctcatggaaatgttcggcgttccttggccggaggatatggaatgtagccgcttccccgactgtgatgaaccctacccaagactggtcgacctcaacctggccggggagcccaccgagggggccccggtggccgttcaacgcgactacgggttttggtgtccccgggaattaaaaatcgatcccgacctaggatactcctttctccacgttcgcgattgcagccccccttgcccgaacatgtacttcaggcgggaggaattatcctttgcccggtacttcatcgggttaatttctatcatatgcttgagtgcaactcttttcacatttcttaccttcttaatcgatgtcacacgtttcaggtatcctgaaagaccaataatcttttatgccgtgtgttacatgatggtgagcctgatcttctttattgggtttctactggaagaccgagttgcgtgcaacgcttctataccagcacagtacaaagccagcacagtgacacaaggcagtcacaacaaagcgtgcaccatgttgttcatgatactgtacttcttcaccatggccgggtctgtctggtgggtgatccttaccatcacatggttcctggctgctgtgcccaaatgggggtctgaggctattgaaaagaaggccctgctgttccatgcctccgcgtggggaattccagggacacttactattattcttcttgcgatgaacaaaatcgagggggataacatttcaggcgtgtgcttcgtggggctctatgatgtagacgctctgagatactttgtccttgccccgttgtgcttgtacgtggtggtgggcgtgagcttacttctggctgggattatcagcctgaatcgcgtccggatcgaaattccattagaaaaggaaaaccaagataagctcgtcaagtttatgatcagaatcggtgtatttagtatactatacttggtccccttgctcgtggttattgggtgttatttttacgagcaggcctaccgggggatctgggagacaacgtggatccaggaacgttgtcgcgaataccacattccatgcccatatcaggtgactcaaatgagccgccccgatttaatcttgttcctgatgaaatatctcatggccctgatcgtgggaatcccttcagtgttctgggtaggaagcaagaaaacctgcttcgaatgggcctcgttctttcatggcaggcggaagaaggaaattgtgaacgaaagtaggcaagtgctgcaggagcccgacttcgcccagtctctcctgagggaccccaacacccctattattcggaagtctagagggacctcaactcaaggcacaagtactcacgccagctctacccagcttgcgatggtcgacgaccagcgcagtaaagcgggctctatacatagcaaggtgagtagctatcacgggtctttgcatcgcagccgggatggaagatacacaccgtgctcttataggggaatggaagagaggcttcctcacggaagtatgagccgacttactgatcattcaagacattcctcatctcaccggctcaatgagcagtcgcggcactcctcaattagggatctttccaacaaccctatgactcacatcacacatgggacatctatgaacagagtaatcgaggaggacggtacctccgcttag

SEQ ID NO: 241891 - DNA, 2001 bp, Artificial Sequence
  derived and/or modified sequence
atggccatgacctggatcgtgttcagcctgtggcccctgaccgtcttcatgggccacatcggcggccacagcctcttcagctgtgagcccatcaccctgaggatgtgccaggacctgccctacaacaccaccttcatgcccaacctgctgaaccactatgaccagcagacagctgccctggccatggagcccttccaccccatggtgaacctggactgcagccgggacttccggcccttcctgtgtgccctgtatgcccccatctgcatggagtatggccgggtgaccctgccctgccggcggctgtgccagagggcctacagtgaatgttccaagctgatggagatgtttggagtgccctggccagaggacatggagtgcagccgcttcccagactgtgatgagccctacccccggctggtggacctgaacctggccggggagcccacagagggcgcccctgtggccgtgcagagggactatggcttctggtgcccccgggagctgaagattgatcctgacctgggctacagcttcctgcacgtgcgggactgcagccccccctgccccaacatgtacttcagaagagaggagctgagctttgcccgctacttcatcggcctcatcagcatcatctgcctgagcgccaccctcttcaccttcctgaccttcctgattgatgtgacccgcttccgctacccagagcggcccatcatcttctatgctgtgtgctacatgatggtgtccctcatcttcttcatcggcttcctgctggaggacagagtggcctgcaatgccagcatcccagcccagtacaaggccagcacagtgacccagggcagccacaacaaggcctgcaccatgctgttcatgatcctgtacttcttcaccatggccggctctgtgtggtgggtgatcctgaccatcacctggttcctggccgctgtgcccaagtggggcagcgaggccatcgagaagaaggccctgctcttccacgccagcgcctggggcatccctggcaccctgaccatcatcctgctggccatgaacaagattgaaggagacaacatcagcggcgtgtgctttgtgggcctgtatgatgtggatgccctgcgctactttgtgctggcccccctgtgcctgtatgtggtggtgggcgtgtccctgctgctggccggcatcatcagcctgaacagagtgcgcatcgagatccccctggagaaggagaaccaggacaagctggtgaagttcatgatcagaattggagtcttcagcatcctgtacctggtgcccctgctggtggtgattggctgctacttctatgagcaggcctaccggggcatctgggagaccacctggatccaggagcgctgccgggagtaccacatcccctgcccctaccaggtgacccagatgagcaggccagacctgatcctcttcctgatgaagtacctgatggccctgattgtgggcatccccagcgtcttctgggtgggcagcaagaagacctgctttgagtgggccagcttcttccacggccgcaggaagaaggagatcgtgaatgaaagccggcaggtgctgcaggagccagactttgcccagagcctgctgcgggaccccaacacccccatcatcaggaagagccggggcaccagcacccagggcaccagcacccacgccagcagcacccagctggccatggtggatgaccagaggagcaaggccggcagcatccacagcaaggtgagcagctaccacggcagcctgcacaggagcagagatggccgctacaccccctgcagctaccggggcatggaggagcggctgccccacggctccatgagccggctgacagaccacagccgccacagcagcagccaccggctgaatgagcagagccgccacagcagcatccgggacctgagcaacaaccccatgacccacatcacccacggcacctccatgaacagagtgattgaagaagatggcaccagcgcctag

SEQ ID NO: 241892 - DNA, 2001 bp, Artificial Sequence
  derived and/or modified sequence
atggccatgacctggatcgtgttcagcctgtggcccctgaccgtgttcatgggacacattggaggtcattccttattttcatgcgagccaataacactgcgaatgtgccaggaccttccatataatacaaccttcatgccaaacttgctgaaccactacgatcagcaaaccgctgcacttgcgatggagccctttcaccccatggtgaatctcgactgttctcgggatttccggcccttcctgtgcgctctatatgcaccaatttgcatggaatacgggcgggtaaccttgccttgtcggagactgtgccagagggcatactccgaatgttccaaacttatggagatgtttggagtgccttggcctgaggatatggagtgctctcgattcccagactgtgatgagccctatcccagactggtcgatctgaatctggctggagaacccactgagggggctcctgtggccgtgcaaagagactatgggttttggtgtccacgggaactgaaaattgatcccgatctgggttacagctttctgcatgttagggattgttccccaccttgtccaaatatgtatttcaggcgcgaggagctgtcgttcgcccgttattttatcggcttgattagcattatctgcttatcagctaccctgtttacgtttttaacattccttattgatgtcacacgttttcgctatcccgagcggcctataatcttctatgccgtgtgctatatgatggtgagtctcatttttttcattggatttctcctcgaagatagagtagcctgcaacgcttcaatccccgcccagtataaggcatcgacagtcacccaaggcagccacaacaaggcctgcacgatgctgtttatgatcctgtactttttcactatggccgggtcagtttggtgggtcatcctcaccattacatggtttttggctgccgtccccaagtggggtagtgaagcaattgagaaaaaagccctgctcttccacgctagtgcctggggaatccccggtactctgaccatcatactcctggctatgaataagatagaaggtgacaacatttctggagtatgctttgtgggtctgtatgacgttgacgctctccgctactttgtattggccccactctgtctctacgtggtggtaggcgtaagcctgctgctggctggaatcatttcccttaatcgggtgcggatcgaaatccctctggaaaaagaaaaccaggacaaactcgtgaagtttatgataaggataggggttttttccattctctatctggtcccccttttggtagtcattggctgctacttttacgagcaggcctatcgcgggatttgggaaacaacttggattcaggagcggtgccgcgagtaccacatcccttgtccataccaggtgactcaaatgtcccggccggatcttattctttttctaatgaagtatctgatggcacttatcgtgggcatcccatccgtgttttgggtggggtccaagaagacgtgcttcgaatgggcgagcttctttcatgggaggcgtaagaaagagattgtgaatgaatcccgccaggttctgcaagagcctgacttcgctcagtcgctactgcgggatcctaacacaccaattatacgaaaaagtcgggggacctccacccaggggacttcaacccacgcatcttctacgcaattggccatggtggacgaccaaaggagcaaggccggaagcattcatagtaaggtctcctcttatcatggcagcctccatcgctcccgtgacgggagatacaccccctgcagttatcggggcatggaggagaggcttcctcacggatccatgtctcggcttactgatcactctagacacagctcctcacacagactgaacgaacagagtcggcactccagtatcagggacttatcgaacaatccaatgacgcacatcactcatgggacctctatgaatcgcgtcattgaagaagacggcaccagcgcttag

SEQ ID NO: 241893 - DNA, 2001 bp, Artificial Sequence
  derived and/or modified sequence
atggccatgacctggatcgtgttcagcctgtggcccctgaccgtgttcatgggccacattggcggccatagtcttttttcgtgtgagcccataactctgcggatgtgccaagacctgccctataataccacttttatgccaaacctcttgaaccattatgatcagcagactgcagctctggctatggaacccttccatccaatggtgaacctcgactgttctagggattttcgtccctttctgtgcgctctctacgcgcctatttgcatggagtatggaagggtgactctgccctgcaggcgcctgtgtcagcgagcctacagcgaatgcagcaaattgatggaaatgtttggcgttccatggccagaagatatggagtgcagcagattcccagactgcgacgaaccgtaccctcggctggtggatctgaacctcgccggagagcccactgaaggcgctcccgtcgctgttcagagagactatggcttctggtgtccgagagagctgaaaattgatccagatctgggctactctttcctacatgtgagagattgctctcccccatgtcctaatatgtattttaggcgcgaagaactcagttttgctcggtattttattggtctgatatctatcatttgtctcagcgcaaccttattcacattcctcacttttctgatagatgtcacaagattcagatacccagagagacctatcattttctatgcagtttgttatatgatggtatccctgatcttttttatcggattcttgttagaagaccgcgtggcctgtaatgcatcaatccctgcgcagtacaaggccagcactgtgacacagggaagccataataaagcctgcacgatgctgttcatgatactttatttttttaccatggccggaagtgtgtggtgggttattctgactattacctggtttctagcagccgtgcccaagtggggatctgaagccattgaaaagaaagcactgctgttccacgcatccgcttgggggatcccaggtacactgacaattatactgctggctatgaacaagattgagggggataacatatcgggcgtttgttttgtcggcctctatgatgtggatgctctgcggtatttcgtgctggcccctctgtgcctgtacgtcgtggtcggcgtatctctgctactggccggaattattagtctgaacagagtcagaatcgaaatcccgttggagaaagagaaccaagacaagttggtaaagttcatgatccgcatcggagtatttagcatcctttaccttgtgcccttgctggtggtaattggatgttacttttatgaacaggcgtatcggggcatttgggagacaacatggattcaggagcgctgtagggaataccacataccctgtccttatcaggtgacccaaatgtctaggccagatctcatcttgttcctcatgaaatatttgatggcactgatcgtgggaatacccagcgtattttgggtggggtccaagaagacctgtttcgagtgggcatcctttttccatggcagacgaaaaaaggagattgtgaatgagtctcggcaagtgcttcaggagccagacttcgcccagtctttgctacgggaccctaacacaccaattattcgcaaaagccgcggcactagcacacagggaacctctacccacgcttcttctacccaactggccatggtagacgaccagcgctccaaggcaggctctatccactctaaggtctccagctaccatggcagtctacatagaagccgggacgggaggtacacgccttgcagttataggggcatggaagagcgcctgcctcatggatccatgtcccgactgactgaccattcacggcattcctcttcccatcgactgaacgagcagagccggcattccagtatcagggatctgtccaataaccctatgacacacattacccacggtaccagtatgaatcgcgtaatagaggaagacggcacctctgcctag

SEQ ID NO: 241894 - DNA, 2001 bp, Artificial Sequence
  derived and/or modified sequence
atggcaatgacatggatcgtattctcactctggcctctcacagtttttatgggtcacatcgggggacattctctcttttcttgcgaacccattacactgaggatgtgtcaggacttaccttataacaccacgtttatgccaaacctgctcaatcattatgaccagcaaacggcagcactcgccatggaacccttccaccctatggtgaatcttgactgctcccgggacttccgaccttttctgtgtgcactttacgcccctatctgcatggagtatggaagggtcaccctgccttgccgacgcctgtgccagagagcgtattccgagtgtagcaagctgatggagatgttcggggtcccctggcccgaggacatggaatgctcaagattcccagattgcgacgaaccctatccacgactggtggatttgaatctcgcaggcgaacccacggagggtgccccagtggcagtccagagagactacggtttctggtgtccgcgtgaactgaaaattgatcccgacctcggttactcttttctgcacgtgcgggattgctcacctccatgccccaacatgtactttcgcagggaagagctgtcattcgcacgatatttcattgggctgatctcaattatctgtctgtcggcgacgctgttcacttttctcacctttctcatcgatgttacgcgcttcagataccccgagcgcccaataattttttacgcagtttgttatatgatggtgtccctgatatttttcattggcttcctgctggaggatagggtcgcctgcaacgcatccatccctgcacagtacaaggcctcaaccgtgacccagggctcacacaacaaagcatgtaccatgctcttcatgatactgtacttcttcacaatggctggcagcgtgtggtgggtcatcctgaccattacctggttcttagcggctgtccccaagtggggttccgaagcgatcgagaaaaaagccttgttgttccacgctagtgcttgggggattcccggtacacttaccatcattcttttggccatgaacaagattgagggagataacatcagcggcgtgtgttttgtaggcctctacgacgttgacgcactcaggtatttcgtgcttgcccctctttgcctgtacgtcgtggtgggagtgagtctgctcctagctggtattatcagcctaaatcgtgttcgcatagagatcccgcttgagaaagagaatcaagataagctagtgaaattcatgataagaataggggtgtttagcattttgtatctagtccccctgcttgtggtgatagggtgctacttctacgagcaggcgtatcgaggaatttgggaaacgacttggatacaggaacgctgccgtgagtatcacatcccgtgcccataccaggtaactcagatgtcgcgtcctgacttaatacttttcttaatgaaatacctaatggccctcatcgtaggtattccctctgtgttctgggtcggttctaaaaaaacttgcttcgagtgggcttctttttttcacgggaggcgtaagaaggagatcgtcaacgaaagtcgccaggtgctgcaagaaccagacttcgctcagtcgctcttgagagaccccaatactccaatcattagaaagagcagaggcaccagcacccaggggaccagtacccacgcctcatccacccaactcgcaatggtagatgaccagcgttctaaagccggaagcattcattccaaggtctccagttatcacggttctctgcatcggtctcgtgatgggagatacacaccttgtagctacagaggcatggaggagcggttgcctcatggcagcatgtcccggctaaccgatcactcacggcatagctctagtcacagactgaacgaacagtctcggcacagcagcattcgggatctgtctaacaatccgatgacacacatcacacatggcaccagcatgaaccgcgtcatcgaagaggacggaacgtcagcttag

SEQ ID NO: 241895 - DNA, 2001 bp, Artificial Sequence
  derived and/or modified sequence
atggcaatgacgtggatcgtgttcagcctgtggcccctgaccgtgttcatgggacatatcggcggacacagcctgttctcttgtgaacctattacactgagaatgtgtcaagatctcccatacaatactactttcatgccaaatttgcttaaccattacgatcagcaaacagctgccttggccatggaaccgtttcaccccatggtgaaccttgactgcagccgcgacttccgtccatttttatgtgcgctctacgcccctatctgcatggagtatgggagggtaactttaccatgccggcgtttgtgccagagagcatactcagaatgctcaaaactgatggaaatgttcggcgtcccatggcctgaggatatggagtgttcacgatttcctgactgtgatgagccttatcctaggttggttgatctcaacttagcaggtgagcccaccgaaggcgcacccgtggcagtgcagcgggactatggtttttggtgccctagggagctgaaaatcgatccagacttagggtatagttttttacacgttcgggactgtagcccaccatgtccaaatatgtatttccgccgtgaggagctttcctttgccagatacttcatagggctgatcagcattatatgcctgtccgctaccctgttcacatttctcactttcctcattgatgtgacgaggttccgataccccgagagaccaattatcttttacgctgtatgttatatgatggtttcactgatatttttcattggttttctgctggaagacagggtagcatgcaacgcttcaatccctgcccaatataaggcatccactgttactcagggcagccacaacaaagcttgcaccatgttatttatgattctatatttcttcacaatggccggtagtgtgtggtgggttatcctgacaatcacatggtttttggctgcggtccccaaatggggcagcgaggctatcgagaaaaaagctcttttgttccatgcaagcgcttggggcatcccgggaacactcacaatcatcctcctggccatgaataagattgagggcgataacatcagcggcgtgtgtttcgtcgggctgtacgacgtggacgctctgaggtattttgtcctcgcacccctgtgcctttacgtggtggtcggtgttagcctacttttagcaggtataatcagtctgaaccgcgtgagaatcgagattcctctcgagaaagagaaccaggacaagttagtgaagttcatgatccggattggagtttttagtattctgtatttggttcctctgttggtggtgatcggatgctacttttatgagcaggcatataggggcatctgggagacaacatggattcaggaaagatgtagagaataccatattccatgtccttaccaggttacacagatgagccggccagatctgatattgtttttgatgaagtatttaatggcactaattgtcgggattccgtcagttttctgggttgggtctaagaaaacctgttttgaatgggccagcttcttccacggcaggcggaaaaaggaaatagtaaacgagagcagacaagtcctccaagagccagactttgctcagtctctcttgcgggatcctaacaccccaattattcgaaagtcgcgcggaacctctacccagggcactagtacacacgcctcgagtacccagctggcaatggtggacgaccaaaggtctaaggcaggctccattcactccaaggtgagctcataccacggctccctccatcggtcccgggatggcaggtacacaccatgttcttatcgcggaatggaagaacggctgccacacgggagtatgtccagattaaccgaccattcccgccactctagcagtcaccgtctgaatgagcaatcaagacacagcagcattagggacctcagtaataatcctatgacgcacattacccatggcacgtctatgaacagggtgattgaagaagatgggacctcagcctag

SEQ ID NO: 241896 - DNA, 2001 bp, Artificial Sequence
  derived and/or modified sequence
atggccatgacctggatcgtgttcagcctgtggcccctgaccgtgttcatgggccacatcggcggccacagcctgttcagctgcgagcccatcaccctgagaatgtgccaggacctgccctacaacaccaccttcatgcccaacctgctgaaccactacgaccagcagaccgccgccctggccatggagcccttccaccccatggtgaacctggactgcagcagagacttcagacccttcctgtgcgccctgtacgcccccatctgcatggagtacggcagagtgaccctgccctgcagaagactgtgccagagagcctacagcgagtgcagcaagctgatggagatgttcggcgtgccctggcccgaggacatggagtgcagcagattccccgactgcgacgagccctaccccagactggtggacctgaacctggccggcgagcccaccgagggcgcccccgtggccgtgcagagagactacggcttctggtgccccagagagctgaagatcgaccccgacctgggctacagcttcctgcacgtgagagactgcagccccccctgccccaacatgtacttcagaagagaggagctgagcttcgccagatacttcatcggcctgatcagcatcatctgcctgagcgccaccctgttcaccttcctgaccttcctgatcgacgtgaccagattcagataccccgagagacccatcatcttctacgccgtgtgctacatgatggtgagcctgatcttcttcatcggcttcctgctggaggacagagtggcctgcaacgccagcatccccgcccagtacaaggccagcaccgtgacccagggcagccacaacaaggcctgcaccatgctgttcatgatcctgtacttcttcaccatggccggcagcgtgtggtgggtgatcctgaccatcacctggttcctggccgccgtgcccaagtggggcagcgaggccatcgagaagaaggccctgctgttccacgccagcgcctggggcatccccggcaccctgaccatcatcctgctggccatgaacaagatcgagggcgacaacatcagcggcgtgtgcttcgtgggcctgtacgacgtggacgccctgagatacttcgtgctggcccccctgtgcctgtacgtggtggtgggcgtgagcctgctgctggccggcatcatcagcctgaacagagtgagaatcgagatccccctggagaaggagaaccaggacaagctggtgaagttcatgatcagaatcggcgtgttcagcatcctgtacctggtgcccctgctggtggtgatcggctgctacttctacgagcaggcctacagaggcatctgggagaccacctggatccaggagagatgcagagagtaccacatcccctgcccctaccaggtgacccagatgagcagacccgacctgatcctgttcctgatgaagtacctgatggccctgatcgtgggcatccccagcgtgttctgggtgggcagcaagaagacctgcttcgagtgggccagcttcttccacggcagaagaaagaaggagatcgtgaacgagagcagacaggtgctgcaggagcccgacttcgcccagagcctgctgagagaccccaacacccccatcatcagaaagagcagaggcaccagcacccagggcaccagcacccacgccagcagcacccagctggccatggtggacgaccagagaagcaaggccggcagcatccacagcaaggtgagcagctaccacggcagcctgcacagaagcagagacggcagatacaccccctgcagctacagaggcatggaggagagactgccccacggcagcatgagcagactgaccgaccacagcagacacagcagcagccacagactgaacgagcagagcagacacagcagcatcagagacctgagcaacaaccccatgacccacatcacccacggcaccagcatgaacagagtgatcgaggaggacggcaccagcgcctag

SEQ ID NO: 241897 - protein, 150 aa, Artificial Sequence
  derived and/or modified sequence
MKDEVALLAAVTLLGVLLQAYFSLQVISARRAFRVSPPLTTGPPEFERVYRAQVNCSEYFPLFLATLWVAGIFFHEGAAALCGLVYLFARLRYFQGYARSAQLRLAPLYASARALWLLVALAALGLLAHFLPAALRAALLGRLRTLLPWA

SEQ ID NO: 241898 - DNA, 453 bp, Artificial Sequence
  derived and/or modified sequence
atgaaggacgaggtagctttgcttgccgcagtaacgctgctcggagtcctactgcaggcctacttcagcctacaggtgattagcgccagacgcgcgttccgagtgagtcccccacttacaaccggccccccagaattcgaacgcgtttatcgagcccaggtgaattgtagcgagtactttccactcttcttggccacactttgggtggccggaatcttcttccatgagggggccgcagcactctgcggcctagtgtatctgtttgcccggctgcgctactttcagggctatgcccggagtgctcagttgcgacttgccccgctgtacgcttcggcgcgcgcactctggcttctggtggccctcgccgccctcgggcttttggcgcatttcctccccgccgccctgagagccgctcttttgggtcggttgagaaccctgctcccatgggcttag

SEQ ID NO: 241899 - DNA, 453 bp, Artificial Sequence
  derived and/or modified sequence
atgaaggatgaggtggccctgctggccgctgtgaccctgctgggcgtgctgctgcaggcctacttcagcctgcaggtgatcagcgcccggcgggccttccgggtgtccccacccctgaccactggacctcctgagtttgagcgggtgtaccgggcccaggtgaactgcagcgagtacttccccctcttcctggccaccctgtgggtggccggcatcttcttccatgaaggagctgctgccctgtgtggcctggtgtacctgtttgcccggctgcgctacttccagggctacgcccggagcgcccagctgcggctggcccccctgtatgccagcgcccgggccctgtggctgctggtggccctggccgccctgggcctgctggcccacttcctgcctgctgccctgcgggccgccctgctgggccgcctgcggaccctgctgccctgggcctag

SEQ ID NO: 241900 - DNA, 666 bp, Artificial Sequence
  derived and/or modified sequence
cttcctctcctgggccgtcctctgagcagcagacggggctaagcgttccccagctcgccttcacacacagcccgtgccaccacaccgacggtaccatgaaggacgaggtagctctactggctgctgtcaccctcctgggagtcctgctgcaagcctacttctccctgcaggtgatctcggcgcgcagggccttccgcgtgtcgccgccgctcaccaccggcccacccgagttcgagcgcgtctaccgagcccaggtgaactgcagcgagtacttcccgctgttcctcgccacgctctgggtcgccggcatcttctttcatgaaggggcggcggccctgtgcggcctggtctacctgttcgcgcgcctccgctacttccagggctacgcgcgctccgcgcagctcaggctggcaccgctgtacgcgagcgcgcgcgccctctggctgctggtggcgctggctgcgctcggcctgctcgcccacttcctcccggccgcgctgcgcgccgcgctcctcggacggctccggacgctgctgccgtgggcctgagaccaaggcccccgggccgacggagccgggaaagaagagccggagcctccagctgccccggggaggggcgctcgcttccgcatcctagtctctatcattaaagttctagtgaccgaga

SEQ ID NO: 241901 - DNA, 453 bp, Artificial Sequence
  derived and/or modified sequence
atgaaggacgaggtggccctgctggccgccgtgaccctgctgggcgtgctgctgcaggcttacttttcacttcaagtgatttccgctagaagggcttttagagtgtctcccccgttgactaccggccccccggaattcgaacgagtgtatagagctcaagtgaattgttccgagtacttcccgttgttcctggctactctgtgggtggccggcatcttttttcatgaaggagctgccgcgttgtgtggtctagtgtaccttttcgcacgcctacgctattttcaggggtatgccagatcagctcagctgcgtctggccccgctgtatgccagtgccagggccttgtggttgctggtagccctggccgcccttgggctgttggcacatttcctgcccgccgcacttagagctgcactgttgggccgactacgcacgctgctcccatgggcttag

SEQ ID NO: 241902 - DNA, 453 bp, Artificial Sequence
  derived and/or modified sequence
atgaaagacgaagttgccttattggccgctgtaacccttttgggggttctccttcaggcctactttagcttgcaggtgatttctgccaggcgggctttcagagtgtccccccctctcacaaccggacctcccgagttcgagcgcgtgtaccgcgctcaagtgaactgttctgagtattttcccctgtttttggcgaccctgtgggtggcagggattttctttcacgagggcgcagcagccctctgtggcctggtgtacctcttcgcacgcctgcgatatttccaggggtacgcacgttctgcgcagctgaggctcgcacccctttatgcttcagccagggcgttgtggttactggtggccctcgccgcactcgggctccttgcccatttcttgcccgcagccctccgtgcagctttgcttggccgtctacggaccctgctcccttgggcgtag

SEQ ID NO: 241903 - DNA, 453 bp, Artificial Sequence
  derived and/or modified sequence
atgaaggacgaggtggccctgctggccgccgtgaccctgctgggcgtgctgctgcaggcctacttcagcctgcaggtgatcagcgccagaagagccttcagagtgagcccccccctgaccaccggcccccccgagttcgagagagtgtacagagcccaggtgaactgcagcgagtacttccccctgttcctggccaccctgtgggtggccggcatcttcttccacgagggcgccgccgccctgtgcggcctggtgtacctgttcgccagactgagatacttccagggctacgccagaagcgcccagctgagactggcccccctgtacgccagcgccagagccctgtggctgctggtggccctggccgccctgggcctgctggcccacttcctgcccgccgccctgagagccgccctgctgggcagactgagaaccctgctgccctgggcctag

SEQ ID NO: 241904 - protein, 216 aa, Artificial Sequence
  derived and/or modified sequence
MQAGKPILYSYFRSSCSWRVRIALALKGIDYETVPINLIKDGGQQFSKDFQALNPMKQVPTLKIDGITIHQSLAIIEYLEEMRPTPRLLPQDPKKRASVRMISDLIAGGIQPLQNLSVLKQVGEEMQLTWAQNAITCGFNALEQILQSTAGIYCVGDEVTMADLCLVPQVANAERFKVDLTPYPTISSINKRLLVLEAFQVSHPCRQPDTPTELRA

SEQ ID NO: 241905 - protein, 59 aa, Artificial Sequence
  derived and/or modified sequence
MKQVPTLKIDGITIHQSLAIIEYLEEMRPTPRLLPQDPKKRASVRMISDLIAGGIQPLQ

SEQ ID NO: 241906 - protein, 38 aa, Artificial Sequence
  derived and/or modified sequence
MKQVPTLKIDGITIHQSLAIIEYLEEMRPTPRLLPQDP

SEQ ID NO: 241907 - DNA, 651 bp, Artificial Sequence
  derived and/or modified sequence
atgcaggccggcaagcccatcctgtacagctacttcagaagcagctgcagctggagagtgagaatcgccctggccctgaagggcatcgactacgagaccgtgcccatcaacctgatcaaggacggcggccagcagttcagcaaggacttccaggccctgaaccccatgaagcaggtgcccaccctgaagatcgacggcatcaccatccaccagagcctggccatcatcgagtacctggaggagatgagacccacccccagactgctgccccaggaccccaagaagagagccagcgtgagaatgatcagcgacctgatcgccggcggcatccagcccctgcagaacctgagcgtgctgaagcaggtgggcgaggagatgcagctgacctgggcccagaacgccatcacctgcggcttcaacgccctggagcagatcctgcagagcaccgccggcatctactgcgtgggcgacgaggtgaccatggccgacctgtgcctggtgccccaggtggccaacgccgagagattcaaggtggacctgaccccctaccccaccatcagcagcatcaacaagagactgctggtgctggaggccttccaggtgagccacccctgcagacagcccgacacccccaccgagctgagagcctag

SEQ ID NO: 241908 - DNA, 651 bp, Artificial Sequence
  derived and/or modified sequence
atgcaggccggcaaaccgattctctactcgtactttcgttccagctgcagttggcgggtgcgtatcgcacttgcccttaagggcattgattacgaaaccgttcctatcaatctgattaaagacggcggccaacaattcagcaaggacttccaggcgttaaaccctatgaagcaagtgcccacactgaaaatcgatgggattaccatccaccagagtttggcgatcatcgagtacctggaggaaatgcgaccaacaccccgactgctccctcaggatccgaagaagagggcttctgtgaggatgatttctgatctgatagccggtggtattcagcccttacagaatttgtccgttctgaagcaagttggcgaggagatgcagctcacatgggcacaaaatgcgataacttgtggatttaacgctctggagcagatcctgcaatcgaccgctggaatctattgtgtcggggatgaagtgactatggcagacttatgccttgtgccccaggtcgccaacgctgagagatttaaagtggacctgacaccctatccaaccataagctcaatcaacaaaagactccttgtcctcgaggccttccaggtctctcatccctgccggcaacctgacactccaaccgaactgagggcatag

SEQ ID NO: 241909 - DNA, 651 bp, Artificial Sequence
  derived and/or modified sequence
atgcaggccggcaagcccatcctgtacagctacttccgcagcagctgctcctggagggtgcgcatcgccctggccctgaagggcattgattatgaaacagtgcccatcaacctgatcaaggatggcggccagcagttcagcaaggacttccaggccctgaaccccatgaagcaggtgcccaccctgaagattgatggcatcaccatccaccagagcctggccatcatcgagtacctggaggagatgaggcccaccccccggctgctgccccaggaccccaagaagagggcctctgtgaggatgatcagtgacctgattgctgggggcatccagcccctgcagaacctgtctgtgctgaagcaggtgggggaggagatgcagctgacctgggcccagaatgccatcacctgtggcttcaatgccctggagcagatcctgcagagcacagctggcatctactgtgtgggagatgaggtgaccatggctgacctgtgcctggtgccccaggtggccaatgctgagcgcttcaaggtggacctgaccccctaccccaccatcagcagcatcaacaagaggctgctggtgctggaggccttccaggtgagccacccctgccggcagcctgacacccccacagagctgcgggcctag

SEQ ID NO: 241910 - DNA, 651 bp, Artificial Sequence
  derived and/or modified sequence
atgcaggccggcaagcccatcctgtacagctacttccggagcagctgctcatggagggttaggatcgccctcgcactgaagggaatcgactacgagacagtccccataaatttgattaaggacgggggtcaacagtttagtaaggattttcaggcccttaaccccatgaaacaagtgcctactctcaagattgacgggataactatccatcagtctttagccattattgaatacctcgaggagatgcgtcccaccccccgcctcctgccccaggaccccaaaaagagggcctccgttcgaatgattagtgacttgatagctggtggtattcagcctttacagaatctgtccgtgctcaaacaggtcggcgaagagatgcagcttacatgggcgcagaacgccattacgtgcggctttaacgccttggaacagatcctccagtctacggctgggatttattgcgtgggcgatgaagtaacaatggcagatttgtgtctggtaccacaggtggctaacgccgagcgatttaaagtagacctaacaccatatcctacaatttcttcaattaacaaaagactgttggtattagaggcatttcaggtctcccacccatgccgccagccagatacccctactgagctgagagcgtag

SEQ ID NO: 241911 - DNA, 651 bp, Artificial Sequence
  derived and/or modified sequence
atgcaagccggaaagccaattctctatagctatttccgttcatcttgctcgtggcgggtgcggatagccctggctctgaaaggcattgattatgagaccgttcctatcaatctgattaaagatggaggccaacagttcagcaaggattttcaagcacttaatcctatgaaacaggttcctacgctgaagattgatggaatcactattcatcagtctcttgccatcatcgaatacctggaagagatgaggccaactccacgacttcttccacaggatccaaagaaacgggcttcagttcgcatgatatccgacctgatcgccggtggcatacagcccctgcagaacctgtcggtgttgaagcaggtgggagaggaaatgcagctgacctgggcgcaaaacgccatcacgtgtgggtttaatgctctggaacagatcctgcagtccactgcaggtatctattgtgtaggagatgaggtcaccatggcagacctgtgtttggtcccgcaggtagcaaacgcggagcgctttaaagtcgacctgacaccttaccctaccatttcgtcaattaataaacggctgctggttctcgaggctttccaggtgagccacccatgcaggcagccagatacacccaccgagcttcgcgcttag

SEQ ID NO: 241912 - DNA, 1338 bp, Artificial Sequence
  derived and/or modified sequence
agagcatgtcgggaccgggagggccggccggcccggggcgggggggactgggcaggaggggtcgggctcagggaactgcaactcccagcagcccccaggtacggggcgtggcgggagagctgggcgagccagaggcgaccggaaggatctttctagtccagcccctcgctttacccggacgaaagacacgggcctgattcgtcgagtctcactgagccttagtcgtcggcaggtcccaggcgcgaagtttctcggcctggaggagggggtcgcgcgaagtgccagatgcaggcggggaagcccatcctctattcctatttccgaagctcctgctcatggagagttcgaattgctctggccttgaaaggcatcgactacgagacggtgcccatcaatctcataaaggatgggggccaacagttttctaaggacttccaggcactgaatcctatgaagcaggtgccaaccctgaagattgatggaatcaccattcaccagtcactggccatcattgagtatctagaggagatgcgtcccactccgcgacttctgcctcaggacccaaagaagagggccagcgtgcgtatgatttctgacctcatcgctggtggcatccagcccctgcagaacctgtctgtcctgaagcaagtgggagaggagatgcagctgacctgggcccagaacgccatcacttgtggctttaacgccctggagcagatcctacagagcacagcgggcatatactgtgtaggagacgaggtgaccatggctgatctgtgcttggtgcctcaggtggcaaatgctgaaagattcaaggtggatctcaccccctaccctaccatcagctccatcaacaagaggctgctggtcttggaggccttccaggtgtctcacccctgccggcagccagatacacccactgagctgagggcctagctcccaaatcctgccccgttggcacagggccacaggagcagaagctgggtgggctgaagaggcctggaaacgagagtcttaattgaggagatgggagactcgaactctagccctggatctgccttcctgctgaaacttgttccacctcagtcccctcatctgtcacacgcatgtggggtggagtagggagatgcggggagcagggtgggcaggaatactgttatctatgtgacggggcagtcgtgaggctgagatgagaatgcggattaaaatgcctggcgtgctcaccgtaacaccacggggaaggctgtgtgccttttctcatccgcttttgttgtgtgtgactccaaagaatgcccgcgctgaaatttggcgtgaattaaactgaagcccaggcctcta

SEQ ID NO: 241913 - DNA, 1010 bp, Artificial Sequence
  derived and/or modified sequence
gggagagctgggcgagccagaggcgaccggaaggatctttctagtccagcccctcgctttacccggacgaaagacacgggcctgattcgtcgagtctcactgagccttagtcgtcggcaggtcccaggcgcgaagtttctcggcctggaggagggggtcgcgcgaagtgccagatgcaggcggggaagtggtcaccagcagtccctgtcccttggcaccaggagtccctgtagcctggctaggtaaggaaagggagttgcatctccaaataaggaagatccagttgtggccacccaattcctcctcttcgaaagacactttctgcccatcacctgctttctgtgccaggaccatctttactttctccacaaaagcccatcctctattcctatttccgaagctcctgctcatggagagttcgaattgctctggccttgaaaggcatcgactacgagacggtgcccatcaatctcataaaggatgggggccaacagttttctaaggacttccaggcactgaatcctatgaagcaggtgccaaccctgaagattgatggaatcaccattcaccagtcactggccatcattgagtatctagaggagatgcgtcccactccgcgacttctgcctcaggacccaaagaagagggccagcgtgcgtatgatttctgacctcatcgctggtggcatccagcccctgcagaacctgtctgtcctgaagcaagtgggagaggagatgcagctgacctgggcccagaacgccatcacttgtggctttaacgccctggagcagatcctacagagcacagcgggcatatactgtgtaggagacgaggtgaccatggctgatctgtgcttggtgcctcaggtggcaaatgctgaaagattcaaggtggatctcaccccctaccctaccatcagctccatcaacaagaggctgctggtcttggaggccttccaggtgtctcacccctgccggcagccagatacacccactgagctgagggcctag

SEQ ID NO: 241914 - DNA, 1424 bp, Artificial Sequence
  derived and/or modified sequence
ccgggagggttgggccagaggaggcggtcctggtagggagtgcgtagcagggtggagtcgctgtccggtcgcgcttcacttctgctccgccctccctgctccccataacagacccctccctccactaaggcttccaaacgtcgccccaagcctcccaatttctcgcagcccttcatgctcttctcttggccctagcaggagtggtcaccagcagtccctgtcccttggcaccaggagtccctgtagcctggctaggtaaggaaagggagttgcatctccaaataaggaagatccagttgtggccacccaattcctcctcttcgaaagacactttctgcccatcacctgctttctgtgccaggaccatctttactttctccacaaaagcccatcctctattcctatttccgaagctcctgctcatggagagttcgaattgctctggccttgaaaggcatcgactacgagacggtgcccatcaatctcataaaggatgggggccaacagttttctaaggacttccaggcactgaatcctatgaagcaggtgccaaccctgaagattgatggaatcaccattcaccagtcactggccatcattgagtatctagaggagatgcgtcccactccgcgacttctgcctcaggacccaaagaagagggccagcgtgcgtatgatttctgacctcatcgctggtggcatccagcccctgcagaacctgtctgtcctgaagcaagtgggagaggagatgcagctgacctgggcccagaacgccatcacttgtggctttaacgccctggagcagatcctacagagcacagcgggcatatactgtgtaggagacgaggtgaccatggctgatctgtgcttggtgcctcaggtggcaaatgctgaaagattcaaggtggatctcaccccctaccctaccatcagctccatcaacaagaggctgctggtcttggaggccttccaggtgtctcacccctgccggcagccagatacacccactgagctgagggcctagctcccaaatcctgccccgttggcacagggccacaggagcagaagctgggtgggctgaagaggcctggaaacgagagtcttaattgaggagatgggagactcgaactctagccctggatctgccttcctgctgaaacttgttccacctcagtcccctcatctgtcacacgcatgtggggtggagtagggagatgcggggagcagggtgggcaggaatactgttatctatgtgacggggcagtcgtgaggctgagatgagaatgcggattaaaatgcctggcgtgctcaccgtaacaccacggggaaggctgtgtgccttttctcatccgcttttgttgtgtgtgactccaaagaatgcccgcgctgaaatttggcgtgaattaaactgaagcccaggcctct

SEQ ID NO: 241915 - DNA, 714 bp, Artificial Sequence
  derived and/or modified sequence
ccgggagggttgggccagaggaggcggtcctggtagggagtgcgtagcagggtggagtcgctgtccggtcgcgcttcacttctgctccgccctccctgctccccataacagacccctccctccactaaggcttccaaacgtcgccccaagcctcccaatttctcgcagcccttcatgctcttctcttggccctagcaggagtggtcaccagcagtccctgtcccttggcaccaggagtccctgtagcctggctaggtaaggaaagggagttgcatctccaaataaggaagatccagttgtggccacccaattcctcctcttcgaaagacactttctgcccatcacctgctttctgtgccaggaccatctttactttctccacaaaagcccatcctctattcctatttccgaagctcctgctcatggagagttcgaattgctctggccttgaaaggcatcgactacgagacggtgcccatcaatctcataaaggatgggggccaacagttttctaaggacttccaggcactgaatcctatgaagcaggtgccaaccctgaagattgatggaatcaccattcaccagtcactggccatcattgagtatctagaggagatgcgtcccactccgcgacttctgcctcaggacccaaagaagagggccagcgtgcgtatgatttctgacctcatcgctggtggcatccagcccctgcag

SEQ ID NO: 241916 - DNA, 564 bp, Artificial Sequence
  derived and/or modified sequence
acatttcctgggaggctgagggtcaccacgataccatgacagagtctggcaaggtatggaaggcactctcaggctagctgcccctttgggggcctcttggacctcaggagctcaaaccagcataattttggagccaagggacctcatgagcctctcagagagcttggagtctgccctgatttgcacagatgcaggcctgagagaggaggcctggcaggacaggaagaaatggttgactcctcccaagctggagcccacccagcatgggttaacacgcgccttcatcctctctctcctcagcccatcctctattcctatttccgaagctcctgctcatggagagttcgaattgctctggccttgaaaggcatcgactacgagacggtgcccatcaatctcataaaggatgggggccaacagttttctaaggacttccaggcactgaatcctatgaagcaggtgccaaccctgaagattgatggaatcaccattcaccagtcactggccatcattgagtatctagaggagatgcgtcccactccgcgacttctgcctcaggaccca

SEQ ID NO: 241917 - DNA, 873 bp, Artificial Sequence
  derived and/or modified sequence
gaccggaaggatctttctagtccagcccctcgctttacccggacgaaagacacgggcctgattcgtcgagtctcactgagccttagtcgtcggcaggtcccaggcgcgaagtttctcggcctggaggagggggtcgcgcgaagtgccagatgcaggcggggaagctctggccttgaaaggcatcgactacgagacggtgcccatcaatctcataaaggatgggggccaacagttttctaaggacttccaggcactgaatcctatgaagcaggtgccaaccctgaagattgatggaatcaccattcaccagtcactggccatcattgagtatctagaggagatgcgtcccactccgcgacttctgcctcaggacccaaagaagagggccagcgtgcgtatgatttctgacctcatcgctggtggcatccagcccctgcagaacctgtctgtcctgaagcaagtgggagaggagatgcagctgacctgggcccagaacgccatcacttgtggctttaacgccctggagcagatcctacagagcacagcgggcatatactgtgtaggagacgaggtgaccatggctgatctgtgcttggtgcctcaggtggcaaatgctgaaagattcaaggtggatctcaccccctaccctaccatcagctccatcaacaagaggctgctggtcttggaggccttccaggtgtctcacccctgccggcagccagatacacccactgagctgagggcctagctcccaaatcctgccccgttggcacagggccacaggagcagaagctgggtgggctgaagaggcctggaaacgagagtcttaattgaggagatgggagactcgaactctagccctggatctgcctt

SEQ ID NO: 241918 - protein, 174 aa, Artificial Sequence
  derived and/or modified sequence
MQAGKPILYSYFRSSCSWRVRIALALKGIDYETVPINLIKDGGQQFSKDFQALNPMKQVPTLKIDGITIHQSNLSVLKQVGEEMQLTWAQNAITCGFNALEQILQSTAGIYCVGDEVTMADLCLVPQVANAERFKVDLTPYPTISSINKRLLVLEAFQVSHPCRQPDTPTELRA

SEQ ID NO: 241919 - DNA, 525 bp, Artificial Sequence
  derived and/or modified sequence
atgcaggcaggaaagccaatactttattcatactttcggtccagctgtagttggagggttaggatagccctggctctgaagggtattgactatgagacggtgcctattaatctgataaaggacgggggccagcagttctccaaagacttccaggccttaaatccgatgaaacaagttcctaccttgaagatcgacgggattaccattcaccagagcaatctgagcgtgctgaaacaggtgggcgaggagatgcaactgacgtgggcccagaatgctattacatgtgggttcaacgccctggagcagatcctgcagtcaacggctgggatctactgcgtgggggacgaagtcaccatggctgatctgtgtctcgtcccacaggtggccaatgctgaacgatttaaggttgacctgactccctatccaaccatatcatcaatcaataaacgcctcctggtattagaggcgttccaggtgtcacacccttgcagacagccagacacccccacggagcttcgcgcgtag

SEQ ID NO: 241920 - DNA, 867 bp, Artificial Sequence
  derived and/or modified sequence
gaaggatctttctagtccagcccctcgctttacccggacgaaagacacgggcctgattcgtcgagtctcactgagccttagtcgtcggcaggtcccaggcgcgaagtttctcggcctggaggagggggtcgcgcgaagtgccagatgcaggcggggaagcccatcctctattcctatttccgaagctcctgctcatggagagttcgaattgctctggccttgaaaggcatcgactacgagacggtgcccatcaatctcataaaggatgggggccaacagttttctaaggacttccaggcactgaatcctatgaagcaggtgccaaccctgaagattgatggaatcaccattcaccagtcaaacctgtctgtcctgaagcaagtgggagaggagatgcagctgacctgggcccagaacgccatcacttgtggctttaacgccctggagcagatcctacagagcacagcgggcatatactgtgtaggagacgaggtgaccatggctgatctgtgcttggtgcctcaggtggcaaatgctgaaagattcaaggtggatctcaccccctaccctaccatcagctccatcaacaagaggctgctggtcttggaggccttccaggtgtctcacccctgccggcagccagatacacccactgagctgagggcctagctcccaaatcctgccccgttggcacagggccacaggagcagaagctgggtgggctgaagaggcctggaaacgagagtcttaattgaggagatgggagactcgaactctagccctggatctgccttcctgctgaaacttgttccacctcagtcccctcatctgtcacacgcatgtggggtggagtagggagatgcgggg

SEQ ID NO: 241921 - DNA, 525 bp, Artificial Sequence
  derived and/or modified sequence
atgcaggccggcaagcccatcctgtacagctacttccgcagcagctgctcctggagggtgcgcatcgccctggccctgaagggcattgattatgaaacagtgcccatcaacctgatcaaggatggcggccagcagttcagcaaggacttccaggccctgaaccccatgaagcaggtgcccaccctgaagattgatggcatcaccatccaccagagcaacctgtctgtgctgaagcaggtgggggaggagatgcagctgacctgggcccagaatgccatcacctgtggcttcaatgccctggagcagatcctgcagagcacagctggcatctactgtgtgggagatgaggtgaccatggctgacctgtgcctggtgccccaggtggccaatgctgagcgcttcaaggtggacctgaccccctaccccaccatcagcagcatcaacaagaggctgctggtgctggaggccttccaggtgagccacccctgccggcagcctgacacccccacagagctgcgggcctag

SEQ ID NO: 241922 - DNA, 525 bp, Artificial Sequence
  derived and/or modified sequence
atgcaggccggcaagcccatcctgtacagctacttccggagcagctgtagctggcgggtgcggatcgcactggctctgaaaggcatagactacgaaaccgtgccaatcaacctgattaaagacggaggtcagcagttctccaaggactttcaggcacttaacccaatgaaacaggtgcctactctcaagatcgatgggatcacaatccaccagtccaacctgagcgtgctaaagcaggtcggcgaggagatgcagctgacttgggcccagaatgctattacatgcggttttaacgcactggaacagatactgcagtccacagctggcatttattgtgtgggcgacgaagtaactatggcagatctgtgcttagtgcctcaggtggctaatgcggagagattcaaggtggacctgactccatatcccacaattagctctataaacaagcggctgctcgtcctggaagcctttcaggtatctcatccttgtaggcagccagacacaccgaccgagctgagggcctag

SEQ ID NO: 241923 - DNA, 525 bp, Artificial Sequence
  derived and/or modified sequence
atgcaagctggaaaaccaattctttattcctactttaggtcgagctgcagttggcgtgtgaggatcgccttggccctcaaagggattgattatgagacagttcctattaacttgatcaaagatgggggtcagcagtttagcaaggattttcaggcactcaatccaatgaaacaggtgcctaccttgaaaattgacgggataacaatccatcagtctaacctgtctgtattgaaacaggtgggagaagagatgcagctgacctgggctcaaaatgccatcacttgcggcttcaacgccttggagcaaattttgcaatctaccgccggaatttattgcgttggggatgaggttaccatggccgacctctgtttggtcccacaagtggcgaacgcagagcgttttaaagtggatctgaccccatacccgacaatctcatcgatcaataaaaggttgctggtgctggaggccttccaggtgagtcacccatgcagacagccagataccccgaccgaacttcgcgcttag

SEQ ID NO: 241924 - DNA, 525 bp, Artificial Sequence
  derived and/or modified sequence
atgcaggccggcaagcccatcctgtacagctacttcagaagcagctgcagctggagagtgagaatcgccctggccctgaagggcatcgactacgagaccgtgcccatcaacctgatcaaggacggcggccagcagttcagcaaggacttccaggccctgaaccccatgaagcaggtgcccaccctgaagatcgacggcatcaccatccaccagagcaacctgagcgtgctgaagcaggtgggcgaggagatgcagctgacctgggcccagaacgccatcacctgcggcttcaacgccctggagcagatcctgcagagcaccgccggcatctactgcgtgggcgacgaggtgaccatggccgacctgtgcctggtgccccaggtggccaacgccgagagattcaaggtggacctgaccccctaccccaccatcagcagcatcaacaagagactgctggtgctggaggccttccaggtgagccacccctgcagacagcccgacacccccaccgagctgagagcctag

SEQ ID NO: 241925 - protein, 418 aa, Artificial Sequence
  derived and/or modified sequence
MLASQGVLLHPYGVPMIVPAAPYLPGLIQGNQEAAAAPDTMAQPYASAQFAPPQNGIPAEYTAPHPHPAPEYTGQTTVPEHTLNLYPPAQTHSEQSPADTSAQTVSGTATQTDDAAPTDGQPQTQPSENTENKSQPKRLHVSNIPFRFRDPDLRQMFGQFGKILDVEIIFNERGSKGFGFVTFENSADADRAREKLHGTVVEGRKIEVNNATARVMTNKKTVNPYTNGWKLNPVVGAVYSPEFYAGTVLLCQANQEGSSMYSAPSSLVYTSAMPGFPYPAATAAAAYRGAHLRGRGRTVYNTFRAAAPPPPIPAYGGVVYQEPVYGNKLLQGGYAAYRYAQPTPATAAAYSDSYGRVYAADPYHHALAPAPTYGVGAMNAFAPLTDAKTRSHADDVGLVLSSLQASIYRGGYNRFAPY

SEQ ID NO: 241926 - DNA, 3268 bp, Artificial Sequence
  derived and/or modified sequence
accttccattttggtagcttcaactttgcagctgctgtgtctcttcgtcgtctgggaagaaaactttcacattaagagttgctgatgcggattttctttctttcctctcccggcgttgatgagtgcttggctcctgacagaagggatttggctcccagctttgtagttcggaagaagttgggtctatagatttccccctaactctccattgatgtgttgagcttcagagggaataataactctacgtaaagcatgctggcgtctcaaggagttctcctgcatccttatggcgtgcctatgattgtaccggcagctccttaccttcctggactgattcagggtaatcaggaagcagccgctgcccctgacacaatggctcagccttacgcttcggcccagtttgctcccccgcagaacggtatccccgcggaatacacggcccctcatccccaccccgcgccagagtacacaggccagaccacggttcccgagcacacattaaacctgtaccctcccgcccagacgcactccgagcagagcccggcggacacgagcgctcagaccgtctctggcaccgccacacagacagatgacgcagcaccgacggatggccagccccagacacaaccttctgaaaacacggaaaacaagtctcagcccaagcggctgcatgtctccaatatccccttcaggttccgggatccggacctcagacaaatgtttggtcaatttggtaaaatcttagatgttgaaattatttttaatgagcgaggctcaaagggatttggtttcgtaactttcgaaaatagtgccgatgcggacagggcgagggagaaattacacggcaccgtggtagagggccgtaaaatcgaggtaaataatgccacagcacgtgtaatgacaaataaaaagaccgtcaacccttatacaaatggctggaaattgaatccagttgtgggtgcagtctacagtcccgaattctatgcaggcacggtcctgttgtgccaggccaaccaggagggatcttccatgtacagtgcccccagttcacttgtatatacttctgcaatgccaggcttcccgtatccagcagccaccgccgcggccgcctaccgaggggcgcacctgcgaggccgcggtcgcaccgtgtacaacaccttcagggccgcggcgcccccgcccccgatcccggcctacggcggagtagtgtatcaagagcctgtgtatggcaataaattgctgcagggtggttatgctgcataccgctacgcccagcctacccctgccactgccgctgcctacagtgacagttacggacgagtttatgctgccgacccctaccaccacgcacttgctccagcccccacctacggcgttggtgccatgaatgcttttgcacctttgactgatgccaagactaggagccatgctgatgatgtgggtctcgttctttcttcattgcaggctagtatataccgagggggatacaaccgttttgctccatactaaatgacaaaaccataaaaaccttccaatgtggggagaaaggaagctttccgaggcctgagtattgcaatacatgcagtagtacatcattttagcaactctaaaaaaaaaaaaaatacaaataaaaaggaaaaaaaattacattttttatcttatacctcagatattttgttctgtgtattttaatattgtgggtctttaatttctgaaggttccgtagtttggttgctggctgtaggagtttttgtggttgatctagacagatgctagataatgaataaaaactggtttagggccatatccagagtgctatattatgtaaatgaattatatatgctgaatattaagctactggggttatcagctatttgggaagagtgtaagtgactacagtagtcatttttttctgcacctgcattattttattttgcgaaaggggaggttgggaggggcttaggggattggaactggggtttggctgaaagaaaaaaaaaaaaatgtaactgatgaatctaaacgacccactgcaccaacaatcatttatcaatggttctaagttactcattgccagttcaagccaaaggtcatgttgttaagggggtgcttctagtagcacttgtgcatctgagttgaatgaagctgtgcaaacccaccctttaaaccattccacccggcagtattcagcttcttaaccagtcgctatttaggaaaaaaaacccactagttaggccatcaacaagcattctttttatatttcttccagtataataaattattgatatcactgctgacttttatattatgggagggaaaaaataacattaataaaaaggtgataaaaaagcactgtttctatttttttctttttttccaaaaaaagaaagtaataaaaacttaaattctttgtaccagttaaaaaaaatgtataaaatttacatctgtgcagtggagttgttaagttctagaaacagtctatgaagctttagttttagcctagtagaacaactgttagagacagacgtataatttttatggaattacatgataatcatattcggatttatagaagcattttacaagtattgcaatcattgagtagagataatcatggtattttcatcagcttggtactttttgaaacgtgactgcgttgtgtgaacaatctgcaatttttcagtccgtgagatcctgcccttccacctctttcccatacccccaaggattatctcaaaatgatctctttagttctgtctccaaggcccaggacacttgtcagaaggatgcaaaaaaagaaaaaagtacatccaccctcttaatcccaaaagaacaaagtctccccacctttctcggatgcagggccagagtgacacagccgaaaaattgcagtttgtctgtacttctgtttgaactttccacgttgtcctgtttacaagttaacttaagttggggtatccgtcacgggtcttcctgttttgtatttaaataaaaacaacagcagcaggctgtccctgagtagttttgctgccataggttaagtcctcatgtgtacagtgcaggccctgtggcccgcacttcagtaagttatcaactctcaccgctgtgaacctgccaatccgctgtaacaactctgctttaaaacaaaaccaaacaaaactttaaaaaaaaatgtgtgatccagctttctcttgccatcctatgtgcatgccgtaagatcagttggatattaaaccatcaataaagtttcacaagatttgaaaacaaa

SEQ ID NO: 241927 - DNA, 1257 bp, Artificial Sequence
  derived and/or modified sequence
atgttggcatctcaaggcgttttattgcatccatatggcgttccaatgatcgtgcctgccgctccttatttgccaggcttgatccagggaaatcaagaggcggccgccgcccccgataccatggcccaaccttacgcctcagctcaattcgcccccccgcagaacggtatacctgctgaatataccgccccccacccacaccctgcgccagagtataccgggcaaaccacggttccagagcatacactgaatctgtacccacccgctcagacacactctgaacagtcacctgctgacacatcagcgcaaacggtcagcggaacagctacccaaaccgacgatgcagcgccaaccgatggccagcctcagacacaaccctccgagaataccgaaaacaagagtcagcccaaaaggcttcacgtgtccaacataccatttcgctttcgggatcccgacttgagacagatgttcggtcagtttggtaagatcctcgatgtggaaatcatattcaacgaaaggggcagcaaaggcttcggcttcgtgacctttgaaaactctgctgacgccgatagagcaagggagaagttgcacggcaccgtcgttgaaggaagaaaaatcgaggttaacaatgcgacggctagggtgatgacaaataagaaaaccgtgaatccttatacaaatggctggaagctcaaccccgttgtgggggccgtgtattcccccgagttttacgctgggaccgtcttactgtgccaggctaaccaggaaggctctagtatgtatagcgcccccagttcccttgtctacacatccgcgatgccagggtttccttaccccgccgcgaccgccgccgccgcctatcgcggagcccaccttaggggccgcggccgcaccgtgtataatacatttagagcggccgcacccccacccccaattcccgcctacggcggtgttgtttaccaggagccggtctacgggaacaagctgctgcagggaggttacgccgcctacagatacgcacagccaactccggccacagccgccgcctactccgatagctacgggagagtgtacgctgcagacccttatcatcatgccctggccccagccccaacatatggtgtgggcgctatgaacgcctttgcacccttgaccgatgcgaaaactcgctcacacgctgatgacgttgggcttgttctctcaagtctgcaggcctccatttaccggggaggctataaccgatttgctccctattag

SEQ ID NO: 241928 - DNA, 1257 bp, Artificial Sequence
  derived and/or modified sequence
atgctggccagccagggcgtgctgctgcacccctacggcgtgcccatgattgtgcctgctgccccctacctgcccggcctcatccagggcaaccaggaggccgccgccgccccagacaccatggcccagccctatgccagcgcccagtttgccccaccccagaatggcatcccagctgagtacacagccccccacccccacccagcccctgagtacacaggccagaccaccgtgcctgagcacaccctgaacctgtaccccccagcccagacccacagcgagcagagccctgctgacaccagcgcccagacagtgtctggaacagccacccagacagatgatgctgcccccacagatggccagccccagacccagcccagcgagaacacagagaacaagagccagcccaagaggctgcacgtgagcaacatccccttccgcttccgggaccctgacctgcggcagatgtttggccagtttgggaagatcctggatgtggagatcatcttcaatgaaagaggcagcaagggcttcggctttgtgacctttgagaacagcgcagatgctgaccgggcccgggagaagctgcatggaacagtggtggagggcaggaagattgaggtgaacaatgccacagcccgggtgatgaccaacaagaagacagtgaacccctacaccaacggctggaagctgaaccctgtggtgggcgctgtgtacagccctgagttctacgccggcaccgtgctgctgtgccaggccaaccaggagggcagctccatgtacagcgcccccagcagcctggtgtacaccagcgccatgcctggcttcccctacccagctgccacagctgctgctgcctacagaggagcccacctgcggggccggggccgcacagtgtacaacaccttccgggccgccgcccctcctccacccatcccagcctatggaggagtggtgtaccaggagcctgtgtatggcaacaagctgctgcagggcggctatgctgcctaccgctatgcccagcccaccccagccacagctgctgcctacagcgacagctatggccgggtgtatgctgctgacccctaccaccacgccctggccccagcccccacctatggagtgggcgccatgaatgcctttgcccccctgacagatgccaagaccaggagccatgctgatgatgtgggcctggtgctgagcagcctgcaggccagcatctaccggggcggctacaacagatttgccccctactag

SEQ ID NO: 241929 - DNA, 1257 bp, Artificial Sequence
  derived and/or modified sequence
atgctggccagccagggcgtgctgctgcacccctacggcgtgcccatgatcgtcccagcagccccatacttacctggtttaatacagggtaaccaggaagccgccgcagccccagacaccatggcccaaccgtatgcctcagcacagtttgcccccccccagaatgggatccctgctgaatacacagcccctcaccctcatcccgccccagagtataccggccagaccacggtgcccgaacacaccctgaacctgtacccaccagctcagactcatagtgagcagtcacctgccgatacctccgcacaaactgtttcaggtaccgcgacacagacagacgacgccgctccaaccgacggtcagcctcagactcagccttccgagaacactgaaaacaaaagtcagcctaaacggctacacgtgtccaatatccccttccgtttcagggaccccgacttacgccaaatgttcggacaatttggcaagattttggacgttgaaatcatttttaacgaaagaggttccaagggctttggctttgtaacatttgagaactcagcggacgctgaccgtgcacgtgagaagttacatggcacagtagttgagggaaggaaaatcgaagtgaataatgccacagcgcgagtcatgaccaataaaaagacagttaacccctacaccaatggctggaaattgaatcccgtcgtgggggcagtatattcccccgagttctacgcaggaaccgtgcttctgtgccaggcgaatcaggaaggatccagtatgtatagtgcaccatccagtctggtttacacctcagctatgccagggtttccttaccccgctgccaccgctgccgcagcttaccgcggcgcgcatttgaggggcagggggcgcaccgtgtacaacaccttcagagctgcagcccctccacccccaattcctgcatacggcggcgtggtgtaccaggagccagtgtacggaaataagctcctccagggagggtacgccgcctatcgatacgctcagccaacccctgcaactgcggctgcatactcagactcctatgggagggtgtacgccgccgatccgtaccaccacgctctagcccctgcacccacttatggggtgggcgcaatgaatgccttcgctcctctgacagatgcaaagaccaggagccacgccgacgatgtggggttagtgctgtcttcacttcaggccagtatctacagggggggctacaaccgtttcgctccctattag

SEQ ID NO: 241930 - DNA, 1257 bp, Artificial Sequence
  derived and/or modified sequence
atgctagcctctcaaggagtgttgctgcacccttacggagtgcccatgatcgtccccgctgccccttatctccccggattgatacagggaaatcaggaggctgcagccgcacccgataccatggcccagccatacgccagtgcccagtttgcacctccccaaaatgggatccctgctgagtacaccgcccctcacccacatccggctcctgaatacaccggacagacaacggtgcccgaacatacactgaatctgtaccccccagcacagacacactccgaacagagtcctgcagatacatccgcgcagaccgtctctgggacagccacccagactgatgatgctgcacctaccgacgggcaaccccagacgcagcccagcgagaacactgaaaataaatcccagcctaaacgcctgcatgtgtctaatatcccatttcgctttagggaccccgacctccgccaaatgttcgggcagttcggcaaaattctcgatgtggagattatttttaatgagaggggctcgaagggttttgggtttgtgaccttcgaaaacagcgcagatgcggaccgagccagagaaaagctccacgggaccgtggtcgaagggagaaagattgaagttaataacgccacggcgagagtgatgacgaataagaaaaccgtaaatccatacacaaacgggtggaaattgaacccggtggtgggagcagtttactccccagaattctacgctggtacagttcttctgtgccaggccaatcaggaaggcagctccatgtactccgccccatccagcctggtgtacacctctgccatgcccggtttcccttatcccgcagccaccgctgcggctgcttaccggggagctcatctccgaggacggggtaggacagtctacaacacttttagagcagcggctcctccgcctcctatccctgcttacgggggagtggtatatcaggaacccgtctacgggaacaaactgctgcaagggggttacgccgcatatcggtatgcccagcccacccccgcaaccgctgctgcgtatagtgattcatacgggagagtgtacgcagccgatccatatcaccacgctctggccccagccccaacctacggcgtcggggctatgaacgccttcgctcctctgacagacgcaaagacacgaagtcacgcagatgacgtggggcttgtgttatcctcattacaggcaagcatctaccgcggagggtacaaccgcttcgccccttactag

SEQ ID NO: 241931 - DNA, 1257 bp, Artificial Sequence
  derived and/or modified sequence
atgctggccagccagggcgtgctgctgcacccctacggcgtgcccatgatcgtgcccgccgccccctacctgcccggcctgatccagggcaaccaggaggccgccgccgcccccgacaccatggcccagccctacgccagcgcccagttcgcccccccccagaacggcatccccgccgagtacaccgccccccacccccaccccgcccccgagtacaccggccagaccaccgtgcccgagcacaccctgaacctgtacccccccgcccagacccacagcgagcagagccccgccgacaccagcgcccagaccgtgagcggcaccgccacccagaccgacgacgccgcccccaccgacggccagccccagacccagcccagcgagaacaccgagaacaagagccagcccaagagactgcacgtgagcaacatccccttcagattcagagaccccgacctgagacagatgttcggccagttcggcaagatcctggacgtggagatcatcttcaacgagagaggcagcaagggcttcggcttcgtgaccttcgagaacagcgccgacgccgacagagccagagagaagctgcacggcaccgtggtggagggcagaaagatcgaggtgaacaacgccaccgccagagtgatgaccaacaagaagaccgtgaacccctacaccaacggctggaagctgaaccccgtggtgggcgccgtgtacagccccgagttctacgccggcaccgtgctgctgtgccaggccaaccaggagggcagcagcatgtacagcgcccccagcagcctggtgtacaccagcgccatgcccggcttcccctaccccgccgccaccgccgccgccgcctacagaggcgcccacctgagaggcagaggcagaaccgtgtacaacaccttcagagccgccgccccccccccccccatccccgcctacggcggcgtggtgtaccaggagcccgtgtacggcaacaagctgctgcagggcggctacgccgcctacagatacgcccagcccacccccgccaccgccgccgcctacagcgacagctacggcagagtgtacgccgccgacccctaccaccacgccctggcccccgcccccacctacggcgtgggcgccatgaacgccttcgcccccctgaccgacgccaagaccagaagccacgccgacgacgtgggcctggtgctgagcagcctgcaggccagcatctacagaggcggctacaacagattcgccccctactag

SEQ ID NO: 241932 - protein, 392 aa, Artificial Sequence
  derived and/or modified sequence
MLASQGVLLHPYGVPMIVPAAPYLPGLIQGNQEAAAAPDTMAQPYASAQFAPPQNGIPAEYTAPHPHPAPEYTGQTTVPEHTLNLYPPAQTHSEQSPADTSAQTVSGTATQTDDAAPTDGQPQTQPSENTENKSQPKRLHVSNIPFRFRDPDLRQMFGQFGKILDVEIIFNERGSKGFGFVTFENSADADRAREKLHGTVVEGRKIEVNNATARVMTNKKTVNPYTNGWKLNPVVGAVYSPEFYAGTVLLCQANQEGSSMYSAPSSLVYTSAMPGFPYPAATAAAAYRGAHLRGRGRTVYNTFRAAAPPPPIPAYGGVVYQEPVYGNKLLQGGYAAYRYAQPTPATAAAYSDSYGRVYAADPYHHALAPAPTYGVGAMASIYRGGYNRFAPY

SEQ ID NO: 241933 - DNA, 1530 bp, Artificial Sequence
  derived and/or modified sequence
accttccattttggtagcttcaactttgcagctgctgtgtctcttcgtcgtctgggaagaaaactttcacattaagagttgctgatgcggattttctttctttcctctcccggcgttgatgagtgcttggctcctgacagaagggatttggctcccagctttgtagttcggaagaagttgggtctatagatttccccctaactctccattgatgtgttgagcttcagagggaataataactctacgtaaagcatgctggcgtctcaaggagttctcctgcatccttatggcgtgcctatgattgtaccggcagctccttaccttcctggactgattcagggtaatcaggaagcagccgctgcccctgacacaatggctcagccttacgcttcggcccagtttgctcccccgcagaacggtatccccgcggaatacacggcccctcatccccaccccgcgccagagtacacaggccagaccacggttcccgagcacacattaaacctgtaccctcccgcccagacgcactccgagcagagcccggcggacacgagcgctcagaccgtctctggcaccgccacacagacagatgacgcagcaccgacggatggccagccccagacacaaccttctgaaaacacggaaaacaagtctcagcccaagcggctgcatgtctccaatatccccttcaggttccgggatccggacctcagacaaatgtttggtcaatttggtaaaatcttagatgttgaaattatttttaatgagcgaggctcaaagggatttggtttcgtaactttcgaaaatagtgccgatgcggacagggcgagggagaaattacacggcaccgtggtagagggccgtaaaatcgaggtaaataatgccacagcacgtgtaatgacaaataaaaagaccgtcaacccttatacaaatggctggaaattgaatccagttgtgggtgcagtctacagtcccgaattctatgcaggcacggtcctgttgtgccaggccaaccaggagggatcttccatgtacagtgcccccagttcacttgtatatacttctgcaatgccaggcttcccgtatccagcagccaccgccgcggccgcctaccgaggggcgcacctgcgaggccgcggtcgcaccgtgtacaacaccttcagggccgcggcgcccccgcccccgatcccggcctacggcggagtagtgtatcaagagcctgtgtatggcaataaattgctgcagggtggttatgctgcataccgctacgcccagcctacccctgccactgccgctgcctacagtgacagttacggacgagtttatgctgccgacccctaccaccacgcacttgctccagcccccacctacggcgttggtgccatggctagtatataccgagggggatacaaccgttttgctccatactaaatgacaaaaccataaaaaccttccaatgtggggagaaaggaagctttccgaggcctgagtattgcaatacatgcagtagtacatcattttagcaactct

SEQ ID NO: 241934 - DNA, 1179 bp, Artificial Sequence
  derived and/or modified sequence
atgcttgcctcacagggggtgctactccacccgtacggcgtgccgatgatagtgccagcagccccttatctacctggcctgattcaaggcaaccaagaggccgcagcagctcctgacaccatggcgcagccatatgccagcgcccagtttgctccaccccaaaacggaatccccgccgaatacactgccccccaccctcaccctgccccggagtacactggtcagaccaccgtgcctgagcacacacttaatctttaccctcccgctcaaacacatagcgaacagagcccggccgatacctctgcccagacggtctctgggactgctactcaaaccgatgatgcagcccccaccgatggacagcctcagactcaaccttccgagaataccgagaataaatcacagccgaagcggttacacgttagcaatatccctttccgctttagagacccagacctgcggcagatgttcggtcagttcggaaaaatcctggacgtcgagatcatatttaatgaacggggaagtaagggctttgggtttgtaacatttgagaactcagccgatgccgaccgggctcgcgaaaaactgcacgggaccgtggtagaggggcggaaaattgaggtcaacaacgcaaccgctagggtgatgacaaataaaaagactgttaacccgtacaccaacggatggaaactcaatcctgtggtgggagccgtgtacagcccagagttctatgccggtactgttctgctctgccaggccaaccaagagggcagtagtatgtatagtgcaccttcttcactcgtatatacctctgccatgccaggtttcccttaccctgctgccaccgccgccgcggcatataggggtgcccacttaaggggtagggggcgcaccgtttacaacacctttagggcagcagccccgccgcctccaatcccagcttatggcggagtcgtttatcaagagcccgtgtatggcaacaaactgctacagggcggatatgctgcctatcgatacgcgcagcccacacccgctactgctgcggcctactctgattcttatgggcgggtctatgctgctgacccctaccaccatgcgctcgcccccgctcccacgtatggggtcggtgccatggcttctatctaccgggggggctataatcgattcgccccatactag

SEQ ID NO: 241935 - DNA, 1179 bp, Artificial Sequence
  derived and/or modified sequence
atgctggccagccagggcgtgctgctgcacccctacggcgtgcccatgattgtgcctgctgccccctacctgcccggcctcatccagggcaaccaggaggccgccgccgccccagacaccatggcccagccctatgccagcgcccagtttgccccaccccagaatggcatcccagctgagtacacagccccccacccccacccagcccctgagtacacaggccagaccaccgtgcctgagcacaccctgaacctgtaccccccagcccagacccacagcgagcagagccctgctgacaccagcgcccagacagtgtctggaacagccacccagacagatgatgctgcccccacagatggccagccccagacccagcccagcgagaacacagagaacaagagccagcccaagaggctgcacgtgagcaacatccccttccgcttccgggaccctgacctgcggcagatgtttggccagtttgggaagatcctggatgtggagatcatcttcaatgaaagaggcagcaagggcttcggctttgtgacctttgagaacagcgcagatgctgaccgggcccgggagaagctgcatggaacagtggtggagggcaggaagattgaggtgaacaatgccacagcccgggtgatgaccaacaagaagacagtgaacccctacaccaacggctggaagctgaaccctgtggtgggcgctgtgtacagccctgagttctacgccggcaccgtgctgctgtgccaggccaaccaggagggcagctccatgtacagcgcccccagcagcctggtgtacaccagcgccatgcctggcttcccctacccagctgccacagctgctgctgcctacagaggagcccacctgcggggccggggccgcacagtgtacaacaccttccgggccgccgcccctcctccacccatcccagcctatggaggagtggtgtaccaggagcctgtgtatggcaacaagctgctgcagggcggctatgctgcctaccgctatgcccagcccaccccagccacagctgctgcctacagcgacagctatggccgggtgtatgctgctgacccctaccaccacgccctggccccagcccccacctatggagtgggcgccatggccagcatctaccggggcggctacaacagatttgccccctactag

SEQ ID NO: 241936 - DNA, 1179 bp, Artificial Sequence
  derived and/or modified sequence
atgctggccagccagggcgtgctgctgcacccctacggcgtgcccatgattgtcccggcggctccctacctgcccggcttgatacagggaaaccaagaggccgccgccgctcctgatactatggcacagccctatgcttcagcacaattcgctcccccacaaaatgggatccctgcagagtatacagcgccacacccacaccctgcccccgaatatacaggacagaccaccgtgcccgagcacaccctcaatctctatccacccgctcaaacgcattcagaacagtcacccgccgacaccagcgcacagacagtgtcaggcaccgctactcagaccgacgatgcagccccaacagacggccagccccagactcagccttcagaaaataccgagaataaaagccagcctaagagactgcacgttagcaatataccgtttcgctttagggacccggacttacgccaaatgttcgggcagttcggcaaaatcttagacgtggaaatcattttcaatgagagaggctctaaaggtttcggatttgtaaccttcgaaaacagcgccgatgccgaccgagctcgcgaaaaactgcacggaaccgttgtcgagggacgcaagattgaggtcaataacgccactgcccgagtcatgacaaacaaaaaaaccgtgaacccatataccaatggatggaagctgaatccagtggtgggagctgtttatagcccggaattctacgcagggaccgtgttactttgccaggccaatcaagagggaagttcgatgtatagtgctcccagttccctggtctatacgagcgcaatgcctggcttcccctacccggccgccaccgcggctgccgcatacagaggcgcacatctgcgaggcaggggccgaacggtctacaataccttccgtgcggctgctccccccccaccaattcccgcttacggcggcgtggtgtaccaggagcctgtatacgggaacaagctgctccagggaggatacgcagcttacaggtacgcacaacccacacctgcaacagcagcggcctactctgacagttacgggcgggtctatgcagcagatccataccatcatgcgctcgctcccgcaccaacctatggagttggagccatggcctccatatatcgcggtgggtataatcgttttgctccatactag

SEQ ID NO: 241937 - DNA, 1179 bp, Artificial Sequence
  derived and/or modified sequence
atgctggcttctcagggcgtcctcttgcacccttatggagttcctatgatcgtgccagctgcaccctatctaccgggtctgattcaaggaaaccaagaagccgctgccgcaccagatactatggcacagccttacgcttcagcccagtttgctccgcctcagaacggaatccctgcggaatacaccgcccctcacccacaccccgctcctgagtacaccggccagactacggtccctgaacacactctgaacttgtatcccccagcccagacccattcagaacagtctcccgcagatacatctgctcagaccgtgagcggcaccgcaactcagacagacgatgctgctccgaccgacggccaacctcagacccagccatccgaaaacactgaaaacaaaagtcagccaaagaggctccatgtttcaaacatccctttccgatttcgcgaccccgatcttcgccagatgttcggccagttcggaaaaatactagacgtggaaatcatctttaacgagcgtggctctaagggcttcggctttgtgacattcgagaatagtgccgacgccgacagggccagggagaagctacacggcactgtcgtcgaaggcagaaagatagaggtcaacaatgccaccgcaagagtcatgactaataaaaagacagtaaacccgtacaccaatggctggaagctaaaccccgtagtcggggcagtttattcccctgagttctatgccggaacggtcttattgtgccaggcaaaccaagagggatcttccatgtacagcgccccttcttccctagtttatacatccgctatgcccggttttccatatcctgctgcaacggccgcagctgcttatcggggagcccacctgcgaggcagaggcagaacagtgtacaacacctttcgtgctgctgctcctcctccacccatcccagcctacgggggagttgtataccaggagccggtgtacggaaataagctccttcaaggtggctatgctgcatacagatacgcacagcccacccccgcaactgcagccgcatactctgattcctacgggagagtctacgcagctgatccctaccaccacgcactggcgcctgctcccacatacggggtgggcgctatggcctctatctatcggggtggctataataggtttgccccatactag

SEQ ID NO: 241938 - DNA, 1179 bp, Artificial Sequence
  derived and/or modified sequence
atgctggccagccagggcgtgctgctgcacccctacggcgtgcccatgatcgtgcccgccgccccctacctgcccggcctgatccagggcaaccaggaggccgccgccgcccccgacaccatggcccagccctacgccagcgcccagttcgcccccccccagaacggcatccccgccgagtacaccgccccccacccccaccccgcccccgagtacaccggccagaccaccgtgcccgagcacaccctgaacctgtacccccccgcccagacccacagcgagcagagccccgccgacaccagcgcccagaccgtgagcggcaccgccacccagaccgacgacgccgcccccaccgacggccagccccagacccagcccagcgagaacaccgagaacaagagccagcccaagagactgcacgtgagcaacatccccttcagattcagagaccccgacctgagacagatgttcggccagttcggcaagatcctggacgtggagatcatcttcaacgagagaggcagcaagggcttcggcttcgtgaccttcgagaacagcgccgacgccgacagagccagagagaagctgcacggcaccgtggtggagggcagaaagatcgaggtgaacaacgccaccgccagagtgatgaccaacaagaagaccgtgaacccctacaccaacggctggaagctgaaccccgtggtgggcgccgtgtacagccccgagttctacgccggcaccgtgctgctgtgccaggccaaccaggagggcagcagcatgtacagcgcccccagcagcctggtgtacaccagcgccatgcccggcttcccctaccccgccgccaccgccgccgccgcctacagaggcgcccacctgagaggcagaggcagaaccgtgtacaacaccttcagagccgccgccccccccccccccatccccgcctacggcggcgtggtgtaccaggagcccgtgtacggcaacaagctgctgcagggcggctacgccgcctacagatacgcccagcccacccccgccaccgccgccgcctacagcgacagctacggcagagtgtacgccgccgacccctaccaccacgccctggcccccgcccccacctacggcgtgggcgccatggccagcatctacagaggcggctacaacagattcgccccctactag

SEQ ID NO: 241939 - DNA, 3321 bp, Artificial Sequence
  derived and/or modified sequence
accttccattttggtagcttcaactttgcagctgctgtgtctcttcgtcgtctgggaagaaaactttcacattaagagttgctgatgcggattttctttctttcctctcccggcgttgatgagtgcttggctcctgacagaagggatttggctcccagctttgtagttcggaagaagttgggtctatagatttccccctaactctccattgatgtgttgagcttcagagggaataataactctacgtaaagcatgctggcgtctcaaggagttctcctgcatccttatggcgtgcctatgattgtaccggcagctccttaccttcctggactgattcagggtaatcaggaagcagccgctgcccctgacacaatggctcagccttacgcttcggcccagtttgctcccccgcagaacggtatccccgcggaatacacggcccctcatccccaccccgcgccagagtacacaggccagaccacggttcccgagcacacattaaacctgtaccctcccgcccagacgcactccgagcagagcccggcggacacgagcgctcagaccgtctctggcaccgccacacagacagatgacgcagcaccgacggatggccagccccagacacaaccttctgaaaacacggaaaacaagtctcagcccaagcggctgcatgtctccaatatccccttcaggttccgggatccggacctcagacaaatgtttggtcaatttggtaaaatcttagatgttgaaattatttttaatgagcgaggctcaaagggatttggtttcgtaactttcgaaaatagtgccgatgcggacagggcgagggagaaattacacggcaccgtggtagagggccgtaaaatcgaggtaaataatgccacagcacgtgtaatgacaaataaaaagaccgtcaacccttatacaaatggctggaaattgaatccagttgtgggtgcagtctacagtcccgaattctatgcaggcacggtcctgttgtgccaggccaaccaggagggatcttccatgtacagtgcccccagttcacttgtatatacttctgcaatgccaggcttcccgtatccagcagccaccgccgcggccgcctaccgaggggcgcacctgcgaggccgcggtcgcaccgtgtacaacaccttcagggccgcggcgcccccgcccccgatcccggcctacggcggagtagtgtatcaagagcctgtgtatggcaataaattgctgcagggtggttatgctgcataccgctacgcccagcctacccctgccactgccgctgcctacagtgacagaaatcagttcgtcttcgttgcagcagatgaaatttcttgtaacacctctgcagttacggacgagtttatgctgccgacccctaccaccacgcacttgctccagcccccacctacggcgttggtgccatgaatgcttttgcacctttgactgatgccaagactaggagccatgctgatgatgtgggtctcgttctttcttcattgcaggctagtatataccgagggggatacaaccgttttgctccatactaaatgacaaaaccataaaaaccttccaatgtggggagaaaggaagctttccgaggcctgagtattgcaatacatgcagtagtacatcattttagcaactctaaaaaaaaaaaaaatacaaataaaaaggaaaaaaaattacattttttatcttatacctcagatattttgttctgtgtattttaatattgtgggtctttaatttctgaaggttccgtagtttggttgctggctgtaggagtttttgtggttgatctagacagatgctagataatgaataaaaactggtttagggccatatccagagtgctatattatgtaaatgaattatatatgctgaatattaagctactggggttatcagctatttgggaagagtgtaagtgactacagtagtcatttttttctgcacctgcattattttattttgcgaaaggggaggttgggaggggcttaggggattggaactggggtttggctgaaagaaaaaaaaaaaaatgtaactgatgaatctaaacgacccactgcaccaacaatcatttatcaatggttctaagttactcattgccagttcaagccaaaggtcatgttgttaagggggtgcttctagtagcacttgtgcatctgagttgaatgaagctgtgcaaacccaccctttaaaccattccacccggcagtattcagcttcttaaccagtcgctatttaggaaaaaaaacccactagttaggccatcaacaagcattctttttatatttcttccagtataataaattattgatatcactgctgacttttatattatgggagggaaaaaataacattaataaaaaggtgataaaaaagcactgtttctatttttttctttttttccaaaaaaagaaagtaataaaaacttaaattctttgtaccagttaaaaaaaatgtataaaatttacatctgtgcagtggagttgttaagttctagaaacagtctatgaagctttagttttagcctagtagaacaactgttagagacagacgtataatttttatggaattacatgataatcatattcggatttatagaagcattttacaagtattgcaatcattgagtagagataatcatggtattttcatcagcttggtactttttgaaacgtgactgcgttgtgtgaacaatctgcaatttttcagtccgtgagatcctgcccttccacctctttcccatacccccaaggattatctcaaaatgatctctttagttctgtctccaaggcccaggacacttgtcagaaggatgcaaaaaaagaaaaaagtacatccaccctcttaatcccaaaagaacaaagtctccccacctttctcggatgcagggccagagtgacacagccgaaaaattgcagtttgtctgtacttctgtttgaactttccacgttgtcctgtttacaagttaacttaagttggggtatccgtcacgggtcttcctgttttgtatttaaataaaaacaacagcagcaggctgtccctgagtagttttgctgccataggttaagtcctcatgtgtacagtgcaggccctgtggcccgcacttcagtaagttatcaactctcaccgctgtgaacctgccaatccgctgtaacaactctgctttaaaacaaaaccaaacaaaactttaaaaaaaaatgtgtgatccagctttctcttgccatcctatgtgcatgccgtaagatcagttggatattaaaccatcaataaagtttcacaagatttgaaaacaaa

SEQ ID NO: 241940 - DNA, 1188 bp, Artificial Sequence
  derived and/or modified sequence
atgctggctagccagggagttctattgcacccctatggcgttccgatgatcgtccccgccgcaccatatctgcccggtctaatccagggtaatcaggaagctgcagcagccccggataccatggcccaaccttatgcctcagcccagttcgcaccaccgcagaatggtatccctgccgaatacaccgcaccacacccgcacccagccccagagtacactggacaaacaacagtgccagagcacactttgaacctataccctcctgcacagacgcactccgagcagagccccgccgacaccagtgctcagaccgtgtcggggacggcaacacagacagacgatgctgctccaaccgatggacagcctcaaacccagccatcggagaataccgagaataaatcgcagccaaaaagactgcacgtgtctaacatccctttcagattcagagacccagacttaaggcagatgttcggccaattcgggaagatccttgatgtagagatcattttcaatgagagaggatctaaaggtttcggattcgtgacctttgaaaattcggctgacgccgatagggctagggagaagctgcacggaactgtcgtggagggccgcaaaatcgaagtgaataatgccacggccagagtcatgaccaacaaaaaaacggtcaatccatatacgaatggctggaagctgaatcctgtcgtgggggctgtctactcaccagaattttatgccggcactgtattgctgtgtcaggccaatcaggagggatcttctatgtactctgctccatcttctttagtctacaccagcgccatgcctgggtttccctaccccgcggctaccgctgccgctgcttatagaggcgcccacctgaggggccggggaaggactgtgtacaatacatttagagcagctgcccccccacccccgattcccgcctacggcggtgtggtttatcaggaaccagtctacggaaacaagttgctccaaggaggctacgccgcctataggtacgcacagccaaccccagccacggccgccgcatatagcgaccgcaaccaattcgtctttgtggccgctgatgaaataagttgcaatacttccgccgtgaccgacgaattcatgttgccgacccccacaaccacccacctcttgcagccaccccctacagccttggtgccttag

SEQ ID NO: 241941 - DNA, 1188 bp, Artificial Sequence
  derived and/or modified sequence
atgctggccagccagggcgtgctgctgcacccctacggcgtgcccatgattgtgcctgctgccccctacctgcccggcctcatccagggcaaccaggaggccgccgccgccccagacaccatggcccagccctatgccagcgcccagtttgccccaccccagaatggcatcccagctgagtacacagccccccacccccacccagcccctgagtacacaggccagaccaccgtgcctgagcacaccctgaacctgtaccccccagcccagacccacagcgagcagagccctgctgacaccagcgcccagacagtgtctggaacagccacccagacagatgatgctgcccccacagatggccagccccagacccagcccagcgagaacacagagaacaagagccagcccaagaggctgcacgtgagcaacatccccttccgcttccgggaccctgacctgcggcagatgtttggccagtttgggaagatcctggatgtggagatcatcttcaatgaaagaggcagcaagggcttcggctttgtgacctttgagaacagcgcagatgctgaccgggcccgggagaagctgcatggaacagtggtggagggcaggaagattgaggtgaacaatgccacagcccgggtgatgaccaacaagaagacagtgaacccctacaccaacggctggaagctgaaccctgtggtgggcgctgtgtacagccctgagttctacgccggcaccgtgctgctgtgccaggccaaccaggagggcagctccatgtacagcgcccccagcagcctggtgtacaccagcgccatgcctggcttcccctacccagctgccacagctgctgctgcctacagaggagcccacctgcggggccggggccgcacagtgtacaacaccttccgggccgccgcccctcctccacccatcccagcctatggaggagtggtgtaccaggagcctgtgtatggcaacaagctgctgcagggcggctatgctgcctaccgctatgcccagcccaccccagccacagctgctgcctacagcgacaggaaccagtttgtgtttgtggccgcagatgagatcagctgcaacaccagcgctgtgacagatgagttcatgctgcccacccccaccaccacccacctgctgcagcccccacccacagccctggtgccctag

SEQ ID NO: 241942 - DNA, 1188 bp, Artificial Sequence
  derived and/or modified sequence
atgctggccagccagggcgtgctgctgcacccctacggcgtgcccatgatcgttcctgcggccccgtatctgcctggattgatccagggtaatcaagaggccgcagccgcgccagataccatggctcagccctacgcgtccgctcagttcgcacctcctcagaacgggataccagcggagtacactgcaccccaccctcaccccgccccagagtataccggccagacaactgtacctgagcacaccctgaacctgtatccccctgctcagacccatagtgagcagtccccggcggatacctctgcccagaccgtgtccggaacggccacgcaaactgatgatgcagccccgaccgacgggcagccacaaactcagcccagtgagaataccgagaataaaagccagcctaaacgtctgcacgtctcaaacattcccttccggtttcgcgatccagacttgagacaaatgtttgggcagtttgggaagattctggacgttgaaataatttttaatgagcgggggagcaagggatttggtttcgtgactttcgaaaattctgcagatgctgatcgcgcgcgggagaagctccatggcaccgtcgtggagggacgcaagatcgaagtgaacaacgcaaccgccagggtgatgaccaataagaaaaccgttaacccgtatacaaacggttggaagctcaaccctgtggtgggggccgtttacagtccggaattctatgctggcactgtcctactgtgtcaggccaaccaggagggatctagcatgtactcagcacctagctcactggtgtacacctccgcgatgcctggctttccttaccctgccgcaaccgccgccgctgcgtatcgcggagcgcacctgaggggcagggggcgcacagtttacaacacattccgcgctgcagcaccccctcctcctatccctgcatatggtggggtagtctaccaggagcctgtctacggtaacaaattactccagggtgggtatgccgcataccgttatgcgcaacctacgcccgccaccgccgccgcatactccgacagaaatcaattcgtgtttgtcgcggcggacgaaatttcctgtaatacttccgcagtcaccgatgagttcatgctaccaaccccaactactacacatttgctgcagcctccccccactgctctggtcccctag

SEQ ID NO: 241943 - DNA, 1188 bp, Artificial Sequence
  derived and/or modified sequence
atgctcgcctctcagggagtgctcctccacccttatggggtcccaatgattgtgcctgcagcaccctaccttcctggcttgatacagggaaaccaggaggccgctgcagctccagataccatggcacaaccatacgcctccgcccagtttgcccctccccaaaatggtattcctgctgagtatactgcacctcacccacatcccgcacccgagtacaccggtcagaccacggtacctgaacatactctcaacctgtatccaccagcccagacccactccgagcagagcccagccgatacctcagctcaaacagtctccggcaccgcaacccagaccgacgacgcagcacctacagatgggcagccgcagactcagccgagcgagaatacagaaaacaagtctcagcccaaacgtctccacgtctccaacatacccttccggttccgcgatcctgaccttcgccaaatgttcggtcagttcggcaagatcctggatgtggagattatcttcaacgagcgcggaagtaagggcttcggctttgttactttcgagaattctgccgatgctgaccgtgcaagggagaaactgcatggaacagtagtggaaggcagaaaaattgaggtgaataacgccacagctagggtgatgaccaataagaaaacagtgaatccgtataccaacggctggaagctcaatcctgtcgtcggagccgtgtactcccccgaattttatgcgggtactgtcctgctctgtcaggctaatcaggaaggctcctctatgtattcagccccatccagcctcgtttataccagtgctatgccaggattcccctatccggcagcaacagctgctgccgcttaccggggagcacacctgcgcggtaggggcagaactgtgtacaatacattccgtgccgcagcgccacctccgccaatccctgcctatggcggtgtcgtttatcaggaacccgtgtatggcaacaaacttttgcagggcggttacgccgcatatcgatacgcccagccaactccagcaactgcggcagcctattccgataggaatcaatttgtgttcgtggctgccgatgaaatcagttgtaacacaagcgcagtgactgacgaattcatgctgcccaccccaacaactacccatttactccagcccccaccaaccgcactagtcccatag

SEQ ID NO: 241944 - DNA, 1188 bp, Artificial Sequence
  derived and/or modified sequence
atgctggccagccagggcgtgctgctgcacccctacggcgtgcccatgatcgtgcccgccgccccctacctgcccggcctgatccagggcaaccaggaggccgccgccgcccccgacaccatggcccagccctacgccagcgcccagttcgcccccccccagaacggcatccccgccgagtacaccgccccccacccccaccccgcccccgagtacaccggccagaccaccgtgcccgagcacaccctgaacctgtacccccccgcccagacccacagcgagcagagccccgccgacaccagcgcccagaccgtgagcggcaccgccacccagaccgacgacgccgcccccaccgacggccagccccagacccagcccagcgagaacaccgagaacaagagccagcccaagagactgcacgtgagcaacatccccttcagattcagagaccccgacctgagacagatgttcggccagttcggcaagatcctggacgtggagatcatcttcaacgagagaggcagcaagggcttcggcttcgtgaccttcgagaacagcgccgacgccgacagagccagagagaagctgcacggcaccgtggtggagggcagaaagatcgaggtgaacaacgccaccgccagagtgatgaccaacaagaagaccgtgaacccctacaccaacggctggaagctgaaccccgtggtgggcgccgtgtacagccccgagttctacgccggcaccgtgctgctgtgccaggccaaccaggagggcagcagcatgtacagcgcccccagcagcctggtgtacaccagcgccatgcccggcttcccctaccccgccgccaccgccgccgccgcctacagaggcgcccacctgagaggcagaggcagaaccgtgtacaacaccttcagagccgccgccccccccccccccatccccgcctacggcggcgtggtgtaccaggagcccgtgtacggcaacaagctgctgcagggcggctacgccgcctacagatacgcccagcccacccccgccaccgccgccgcctacagcgacagaaaccagttcgtgttcgtggccgccgacgagatcagctgcaacaccagcgccgtgaccgacgagttcatgctgcccacccccaccaccacccacctgctgcagcccccccccaccgccctggtgccctag

SEQ ID NO: 241945 - protein, 248 aa, Artificial Sequence
  derived and/or modified sequence
MGLSIFLLLCVLGLSQAATPKIFNGTECGRNSQPWQVGLFEGTSLRCGGVLIDHRWVLTAAHCSGSRYWVRLGEHSLSQLDWTEQIRHSGFSVTHPGYLGASTSHEHDLRLLRLRLPVRVTSSVQPLPLPNDCATAGTECHVSGWGITNHPRNPFPDLLQCLNLSIVSHATCHGVYPGRITSNMVCAGGVPGQDACQGDSGGPLVCGGVLQGLVSWGSVGPCGQDGIPGVYTYICKYVDWIRMIMRNN

SEQ ID NO: 241946 - DNA, 747 bp, Artificial Sequence
  derived and/or modified sequence
atgggcctttcaatctttctgctcctctgtgtactcggcctgtctcaggcagctactcctaagatatttaatggtaccgagtgtggacgcaattctcagccttggcaagtggggttgttcgagggtacttccctgagatgtggaggagtgcttattgatcacagatgggtgctgacggccgcccactgtagcggtagtcggtattgggtgagacttggcgagcacagcctgtcccagcttgattggactgaacaaatccggcactccgggttttccgtgacccaccccggctacctgggggccagcacttcccacgagcacgatctaaggctgcttcgacttcgccttcctgtcagagtgacatcaagtgtgcaacctctccccctacctaacgattgtgccactgccgggacggaatgccatgtgtctggatggggtattacgaaccaccctaggaacccctttcctgatctcctgcagtgtctgaacctgtctatcgtttcccatgctacttgtcatggcgtgtatcccggtaggatcactagtaacatggtgtgcgctggcggcgtcccgggacaggatgcttgtcagggagatagcggcggaccactggtttgtggaggagtcctccaagggctggtgtcctggggaagcgttgggccttgcggacaagacggaatccccggtgtgtacacctacatatgtaagtacgtcgactggattcggatgatcatgcggaataattag

SEQ ID NO: 241947 - DNA, 747 bp, Artificial Sequence
  derived and/or modified sequence
atgggactgtctatcttcctactactgtgcgtgcttggactgtcacaggccgcaacacccaagatattcaacggcactgagtgcggaagaaacagtcagccttggcaggtgggtctcttcgaaggcacttcactccgatgcggtggcgttttgatcgatcatcgatgggtattaacagctgcacattgcagtggctcgagatattgggtgcggctaggtgagcactcactgtcacagcttgactggactgaacagattcgccattctgggttctccgtgactcaccctggttatctgggtgccagcactagtcacgaacacgacttaaggctgctccgcctaaggctgcctgttagagtaacttcatctgttcagcccctccctctccctaatgattgtgcaaccgccggtaccgagtgtcacgtctcaggctggggtatcaccaatcaccctcgtaacccgttcccagatcttttgcagtgcctgaacttgagcatcgtgtcccacgccacctgtcacggcgtttatcccgggaggattacatcaaacatggtgtgcgctggcggtgttcccggccaggatgcctgccaaggggattctggtgggcccctcgtctgcggaggagtgctgcagggactcgtttcgtggggatccgttggaccttgtggacaggatggcatccccggagtgtatacgtacatctgtaaatacgtcgattggatacggatgattatgcggaacaattag

SEQ ID NO: 241948 - DNA, 1074 bp, Artificial Sequence
  derived and/or modified sequence
gcaggtaggtggacggagagatagcagcgacgaggacaggccaaacagtgacagccacgtagaggatctggcagacaaagagacaaggtgagaaggagactttggaagtgacccaccatggggctcagcatctttttgctcctgtgtgttcttgggctcagccaggcagccacaccgaagattttcaatggcactgagtgtgggcgtaactcacagccgtggcaggtggggctgtttgagggcaccagcctgcgctgcgggggtgtccttattgaccacaggtgggtcctcacagcggctcactgcagcggcagcaggtactgggtgcgcctgggggaacacagcctcagccagctcgactggaccgagcagatccggcacagcggcttctctgtgacccatcccggctacctgggagcctcgacgagccacgagcacgacctccggctgctgcggctgcgcctgcccgtccgcgtaaccagcagcgttcaacccctgcccctgcccaatgactgtgcaaccgctggcaccgagtgccacgtctcaggctggggcatcaccaaccacccacggaacccattcccggatctgctccagtgcctcaacctctccatcgtctcccatgccacctgccatggtgtgtatcccgggagaatcacgagcaacatggtgtgtgcaggcggcgtcccggggcaggatgcctgccagggtgattctgggggccccctggtgtgtgggggagtccttcaaggtctggtgtcctgggggtctgtggggccctgtggacaagatggcatccctggagtctacacctatatttgcaagtatgtggactggatccggatgatcatgaggaacaactgacctgtttcctccacctccacccccaccccttaacttgggtacccctctggccctcagagcaccaatatctcctccatcacttcccctagctccactcttgttggcctgggaacttcttggaactttaactcctgccagcccttctaagacccacgagcggggtgagagaagtgtgcaatagtctggaataaatataaatgaaggaggggc

SEQ ID NO: 241949 - DNA, 1077 bp, Artificial Sequence
  derived and/or modified sequence
caagcaggtcatccccttggtgaccttcaaagagaagcagagagggcagaggtggggggcacagggaaagggtgacctctgagattccccttttcccccagactttggaagtgacccaccatggggctcagcatctttttgctcctgtgtgttcttgggctcagccaggcagccacaccgaagattttcaatggcactgagtgtgggcgtaactcacagccgtggcaggtggggctgtttgagggcaccagcctgcgctgcgggggtgtccttattgaccacaggtgggtcctcacagcggctcactgcagcggcagcaggtactgggtgcgcctgggggaacacagcctcagccagctcgactggaccgagcagatccggcacagcggcttctctgtgacccatcccggctacctgggagcctcgacgagccacgagcacgacctccggctgctgcggctgcgcctgcccgtccgcgtaaccagcagcgttcaacccctgcccctgcccaatgactgtgcaaccgctggcaccgagtgccacgtctcaggctggggcatcaccaaccacccacggaacccattcccggatctgctccagtgcctcaacctctccatcgtctcccatgccacctgccatggtgtgtatcccgggagaatcacgagcaacatggtgtgtgcaggcggcgtcccggggcaggatgcctgccagggtgattctgggggccccctggtgtgtgggggagtccttcaaggtctggtgtcctgggggtctgtggggccctgtggacaagatggcatccctggagtctacacctatatttgcaagtatgtggactggatccggatgatcatgaggaacaactgacctgtttcctccacctccacccccaccccttaacttgggtacccctctggccctcagagcaccaatatctcctccatcacttcccctagctccactcttgttggcctgggaacttcttggaactttaactcctgccagcccttctaagacccacgagcggggtgagagaagtgtgcaatagtctggaataaatataaatgaaggaggggc

SEQ ID NO: 241950 - DNA, 747 bp, Artificial Sequence
  derived and/or modified sequence
atgggcctgagcatcttcctgctgctgtgtgtgctgggcctgagccaggccgccacccccaagatcttcaacggcacagaatgtggcaggaacagccagccctggcaggtgggcctgtttgagggcaccagcctgcgctgtggcggcgtgctgattgaccaccgctgggtgctgacagctgcccactgcagcggcagccgctactgggtgcggctgggggagcacagcctgagccagctggactggacagagcagatccgccacagcggcttctctgtgacccaccctggctacctgggcgccagcaccagccatgaacatgacctgcggctgctgcggctgcggctgcctgtgcgggtgaccagctctgtgcagcccctgcccctgcccaatgactgtgccacagctggaacagaatgtcatgtgtctggctggggcatcaccaaccaccccaggaaccccttcccagacctgctgcagtgcctgaacctgagcatcgtgtcccatgccacctgccacggcgtgtacccaggccgcatcaccagcaacatggtgtgtgccggcggcgtgcccggccaggatgcctgccagggcgacagcggcggccccctggtgtgtggcggcgtgctgcagggcctggtgtcctggggctctgtgggcccctgtggccaggacggcatccctggggtgtacacctacatctgcaagtatgtggactggatccgcatgatcatgaggaacaactag

SEQ ID NO: 241951 - DNA, 747 bp, Artificial Sequence
  derived and/or modified sequence
atgggcctgagcatcttcctgctgctgtgcgtgctgggcctgagccaggccgcaacgccgaaaatctttaacggaaccgaatgcggtaggaactctcagccgtggcaggtgggcttgttcgaagggactagtctgcggtgtggcggagtgctgatcgaccataggtgggtcctgaccgcagcccactgcagcggctcacgctactgggtacgcctgggagagcattccctcagccaactggactggaccgagcaaatacgacactcaggcttcagtgtgacgcaccctggctacctcggcgcatctacgtcacacgaacatgatctgcggctactgcgcctgagactgcccgtccgcgtgacgagttctgtgcagccactgccgctgccaaacgattgtgcaaccgcaggaactgaatgccacgttagtgggtggggaattactaatcacccacgaaacccattccctgacttactgcaatgtcttaatctgtctatagtttcccacgcgacctgccatggggtgtatcccggccgtattacttcgaatatggtatgtgccgggggggtccccggtcaagacgcatgccagggtgacagcggcgggccattggtgtgtggaggagtcctccaggggttggtttcctggggctcagtgggcccctgcgggcaagacggaatacctggagtctatacttatatctgtaaatacgtggactggatacggatgatcatgagaaataactag

SEQ ID NO: 241952 - DNA, 747 bp, Artificial Sequence
  derived and/or modified sequence
atgggcctgagcatcttcctgctgctgtgcgtgctgggcctgagccaggctgccacccccaagatcttcaatgggaccgaatgtggacgaaacagccagccatggcaagtggggctgttcgaggggacatctttacgatgtggtggtgttctgattgatcataggtgggttcttactgccgctcactgcagtggtagccgctactgggtgcgactaggcgagcattctttgtctcagcttgactggaccgagcagatccgacattcaggattctcagtcacacatccagggtacctcggagcctcaaccagccacgagcacgatctcagattattaaggctgaggctgcccgtgcgggttacttctagcgtccagcccctgcccctgcccaatgactgtgccacagcgggaactgagtgtcatgtgagtgggtggggcattacgaatcatccccggaaccccttccccgacctgttacagtgtctgaacttatctatcgtgtcccatgccacatgccatggcgtctatccagggagaatcacatcaaacatggtgtgcgcagggggtgtgcccggtcaggacgcctgccagggagacagcggaggtccactggtctgcggcggcgttctccagggcctggtgtcctggggttcggtcggcccctgtggccaagacggcatccccggggtgtacacttatatttgtaagtatgttgattggatccgcatgattatgaggaataactag

SEQ ID NO: 241953 - DNA, 299 bp, Artificial Sequence
  derived and/or modified sequence
gtgggtccgcgcagagagctcctgctaggcctgcgcgtcccgttctaaattcttaccctttagtccttgtcaccacccccgccgtgggaacggcctgacagtcactcgtcaaaggaagtggctgccggcagctcttgacccggaatcggatcctagtcccaccccctccgctccaggcttccttctgcaacaggcgtgggtcacgctctcgctcggtctttctgccgccatcttggttccgcgttccctgcacagcctcctttttattcccttccttcagaaatgcccggcgaagccac

SEQ ID NO: 241954 - DNA, 747 bp, Artificial Sequence
  derived and/or modified sequence
atggggctgtccatcttcctgctgttgtgtgtgttgggcctctcgcaggcagccacgcccaaaatatttaatggaacagaatgcggcaggaactcgcaaccctggcaagtgggactgttcgaaggcacatccctccgttgcggtggtgtgctgatcgatcatcgctgggtgctgaccgctgcccactgttctggcagccggtactgggtgaggctcggcgaacactccctgtcccagttggattggaccgagcagattaggcattcagggttctcggttacacatccaggatatctgggagccagcacatcccacgagcatgacctgaggctgttgagattgcgccttcccgtgcgcgttacgtcatcagtgcagccactccctttaccaaatgactgcgcaacagctggaacggaatgtcatgtctcagggtggggcattaccaatcaccctcgaaatcctttccctgacctcctccagtgcctcaatttatcaatcgtgagtcacgctacttgtcatggcgtctacccaggcaggattacaagtaacatggtgtgcgccggaggtgtgcccggtcaggatgcctgtcaaggtgattccggtggtccattagtgtgtggtggtgttttacagggccttgtgagctgggggagcgtgggcccttgcggacaagatggaatccctggggtgtacacttatatttgcaaatacgtggactggatccggatgatcatgaggaataattag

SEQ ID NO: 241955 - DNA, 747 bp, Artificial Sequence
  derived and/or modified sequence
atgggactttctatctttctgttgctatgcgttcttggactgagtcaagccgctaccccaaagatatttaatggaacagaatgtggtcggaacagtcagccatggcaagtcggactgttcgaaggaaccagcctgcgctgtggaggggtgcttatcgatcacaggtgggttctgaccgctgcacattgttccggcagtcgctattgggtgcggctcggggagcattctctgagccagctggactggacggaacagatcaggcactctggtttttcggtgacgcatcccggatacctgggcgcttcgacttcgcacgaacacgatctgcgccttctcagattgcgactgcccgtccgagtgacgagttctgtgcagcctctccccctcccaaacgattgtgctaccgccggtacggaatgccacgtgtcaggatggggcataaccaatcaccctcgtaatccatttcctgatctgctgcagtgcctgaatctgagcatcgtatcccacgccacgtgccacggcgtctatccgggaagaattacctctaacatggtgtgcgcaggcggagtccctggccaagacgcttgccagggagacagcggaggcccattagtgtgcggcggagttctccagggccttgttagctggggctccgtgggcccatgcggccaagatggaattcctggagtatacacatatatttgtaaatacgtggactggataaggatgatcatgcgcaacaactag

SEQ ID NO: 241956 - DNA, 747 bp, Artificial Sequence
  derived and/or modified sequence
atgggcctgagcatcttcctgctgctgtgcgtgctgggcctgagccaggccgccacccccaagatcttcaacggcaccgagtgcggcagaaacagccagccctggcaggtgggcctgttcgagggcaccagcctgagatgcggcggcgtgctgatcgaccacagatgggtgctgaccgccgcccactgcagcggcagcagatactgggtgagactgggcgagcacagcctgagccagctggactggaccgagcagatcagacacagcggcttcagcgtgacccaccccggctacctgggcgccagcaccagccacgagcacgacctgagactgctgagactgagactgcccgtgagagtgaccagcagcgtgcagcccctgcccctgcccaacgactgcgccaccgccggcaccgagtgccacgtgagcggctggggcatcaccaaccaccccagaaaccccttccccgacctgctgcagtgcctgaacctgagcatcgtgagccacgccacctgccacggcgtgtaccccggcagaatcaccagcaacatggtgtgcgccggcggcgtgcccggccaggacgcctgccagggcgacagcggcggccccctggtgtgcggcggcgtgctgcagggcctggtgagctggggcagcgtgggcccctgcggccaggacggcatccccggcgtgtacacctacatctgcaagtacgtggactggatcagaatgatcatgagaaacaactag

SEQ ID NO: 241957 - protein, 111 aa, Artificial Sequence
  derived and/or modified sequence
MGLSIFLLLCVLGLSQAATPKIFNGTECGRNSQPWQVGLFEGTSLRCGGVLIDHRWVLTAAHCSGRPIPGSAPVPQPLHRLPCHLPWCVSRENHEQHGVCRRRPGAGCLPG

SEQ ID NO: 241958 - DNA, 336 bp, Artificial Sequence
  derived and/or modified sequence
atgggattgtcaatctttcttcttctgtgtgtcctcggtctcagtcaggcggcaacgccaaaaattttcaacggaaccgaatgtggtagaaacagccagccctggcaagttggtctgttcgaaggcaccagtttacgctgcggaggggtgctgatagatcaccggtgggttcttacggcagcccattgtagcggaagacccattcctgggagtgctcccgtgccccaacccctgcatcggcttccttgtcacctgccctggtgcgtctccagagagaatcatgaacagcacggcgtgtgccggcgaaggcctggcgcaggctgcctccctggctag

SEQ ID NO: 241959 - DNA, 336 bp, Artificial Sequence
  derived and/or modified sequence
atgggcctgagcatcttcctgctgctgtgtgtgctgggcctgagccaggccgccacccccaagatcttcaacggcacagaatgtggcaggaacagccagccctggcaggtgggcctgtttgagggcaccagcctgcgctgtggcggcgtgctgattgaccaccgctgggtgctgacagctgcccactgcagcggccggcccatccctggcagcgcccctgtgccccagcccctgcaccggctgccctgccacctgccctggtgtgtgtcccgggagaaccacgagcagcacggcgtgtgcagaagaagacctggggccggctgcctgcccggctag

SEQ ID NO: 241960 - DNA, 336 bp, Artificial Sequence
  derived and/or modified sequence
atgggcctgagcatcttcctgctgctgtgcgtgctgggcctgagccaagcagcgaccccaaagatctttaacgggaccgaatgtgggcggaactcccagccttggcaggtgggactcttcgaaggtacatcattgcgctgtggtggcgtgctcatcgatcaccgctgggttctgactgccgcccattgctccggcaggccaatccctggaagcgctcctgttcctcaacctctccacagactgccatgtcacctgccctggtgtgtgtcccgcgaaaatcatgagcagcatggcgtctgccgccgtcggccaggagccgggtgtctaccggggtag

SEQ ID NO: 241961 - DNA, 336 bp, Artificial Sequence
  derived and/or modified sequence
atgggattaagcatcttcctgctgctctgcgtcctgggtctgagtcaggcagcaaccccgaagatctttaacggtactgaatgtgggagaaattctcagccttggcaggtcggtttatttgagggaacctctttaagatgtggcggagtcctgatcgaccatcggtgggtgctcacagcagctcactgttccggcaggccaatccccggatctgccccagtcccccaaccgctccatcggctgccatgccacctcccctggtgcgtgtcacgggaaaaccatgaacagcacggagtttgtaggagaaggccgggagcagggtgccttcctggttag

SEQ ID NO: 241962 - DNA, 336 bp, Artificial Sequence
  derived and/or modified sequence
atgggcctgagcatcttcctgctgctgtgcgtgctgggcctgagccaggccgccacccccaagatcttcaacggcaccgagtgcggcagaaacagccagccctggcaggtgggcctgttcgagggcaccagcctgagatgcggcggcgtgctgatcgaccacagatgggtgctgaccgccgcccactgcagcggcagacccatccccggcagcgcccccgtgccccagcccctgcacagactgccctgccacctgccctggtgcgtgagcagagagaaccacgagcagcacggcgtgtgcagaagaagacccggcgccggctgcctgcccggctag

SEQ ID NO: 241963 - protein, 109 aa, Artificial Sequence
  derived and/or modified sequence
MAQSINITELNLPQLEMLKNQLDQMYVPGKLHDVEHVLIDVGTGYYVEKTAEDAKDFFKRKIDFLTKQMEKIQPALQEKHAMKQAVMEMMSQKIQQLTALGAAQATAKA

SEQ ID NO: 241964 - DNA, 330 bp, Artificial Sequence
  derived and/or modified sequence
atggctcagagcatcaatattacagagcttaatttaccccagctggaaatgttgaagaaccagcttgaccagatgtatgtgcccggtaaactccacgatgtggaacatgtgttgattgacgtgggcacagggtactatgtggagaagactgcagaggatgctaaagacttctttaagaggaaaatagacttcctgacaaagcaaatggaaaaaattcagccagctttgcaggagaagcacgccatgaagcaggctgtaatggagatgatgtcacagaaaattcaacagttgaccgccctgggtgctgctcaggctaccgctaaggcctag

SEQ ID NO: 241965 - DNA, 330 bp, Artificial Sequence
  derived and/or modified sequence
atggcccagagcatcaacatcacagagctgaacctgccccagctggagatgctgaagaaccagctggaccagatgtatgtgcctgggaagctgcatgatgtggagcacgtgctgattgatgtgggcaccggctactacgtggagaagacagcagaagatgccaaggacttcttcaagaggaagattgacttcctgaccaagcagatggagaagatccagcctgccctgcaggagaagcacgccatgaagcaggccgtgatggagatgatgagccagaagatccagcagctgacagccctgggcgccgcccaggccacagccaaggcctag

SEQ ID NO: 241966 - DNA, 330 bp, Artificial Sequence
  derived and/or modified sequence
atggcccagagcatcaacatcaccgagctgaacctgccccagctggaaatgctgaagaatcagctggaccagatgtacgtcccgggcaaattgcacgatgtggagcacgtgctgatagacgttggcacgggctactacgtggagaagaccgctgaggatgctaaagacttctttaaaaggaagattgatttcttgacgaaacagatggagaaaatccagccagcactccaggagaagcacgccatgaaacaggccgtaatggagatgatgtcccagaaaatacaacagctaacagcactgggtgcagctcaggcaacggccaaggcatag

SEQ ID NO: 241967 - DNA, 478 bp, Artificial Sequence
  derived and/or modified sequence
gctcgccgagagacttcctcttcgttaagtcggccttcccaacatggcgcagtctattaacatcacggagctgaatctgccgcagctagaaatgctcaagaaccagctggaccagatgtatgtccctgggaagctgcatgatgtggaacacgtgctcatcgatgtgggaactgggtactatgtagagaagacagctgaggatgccaaggacttcttcaagaggaagatagattttctaaccaagcagatggagaaaatccaaccagctcttcaggagaagcacgccatgaaacaggccgtcatggaaatgatgagtcagaagattcagcagctcacagccctgggggcagctcaggctactgctaaggcctgagagtttttgcagaaatggggcagagggacaccctttgggcgtggcttcctggtgatgggaagggtcttgtgttttaatgccaataaatgtgccagctgggcagaa

SEQ ID NO: 241968 - DNA, 330 bp, Artificial Sequence
  derived and/or modified sequence
atggctcaaagcatcaatattactgagctcaacctgcctcagcttgaaatgctgaagaatcagctcgaccagatgtacgtgccaggaaagctgcacgacgtggagcacgtgctaatcgatgtgggtacggggtactatgtggagaaaacggccgaggatgcaaaggactttttcaagcgaaaaattgacttcctgaccaagcaaatggagaaaattcagcctgcactccaggaaaaacatgctatgaagcaggctgttatggagatgatgtcccaaaagatacagcaactgacagctttgggcgctgctcaggcaactgccaaagcctag

SEQ ID NO: 241969 - DNA, 330 bp, Artificial Sequence
  derived and/or modified sequence
atggcccagagcatcaacatcaccgagctgaacctgccccagctggagatgctgaagaaccagctggaccagatgtacgtgcccggcaagctgcacgacgtggagcacgtgctgatcgacgtgggcaccggctactacgtggagaagaccgccgaggacgccaaggacttcttcaagagaaagatcgacttcctgaccaagcagatggagaagatccagcccgccctgcaggagaagcacgccatgaagcaggccgtgatggagatgatgagccagaagatccagcagctgaccgccctgggcgccgcccaggccaccgccaaggcctag

SEQ ID NO: 241970 - protein, 120 aa, Artificial Sequence
  derived and/or modified sequence
MKVSVAALSCLMLVTALGSQARVTKDAETEFMMSKLPLENPVLLDRFHATSADCCISYTPRSIPCSLLESYFETNSECSKPGVIFLTKKGRRFCANPSDKQVQVCVRMLKLDTRIKTRKN

SEQ ID NO: 241971 - DNA, 363 bp, Artificial Sequence
  derived and/or modified sequence
atgaaggtgtccgtggctgcactgtcatgcttgatgcttgtaactgccctgggatcccaggccagggtgactaaagatgccgaaacggagtttatgatgagtaagttgcccttggagaacccagtgctgttagacagatttcatgctacctccgcagactgttgcatttcttacacgccaagatctatcccgtgttcactcttggagtcttatttcgagaccaactcagagtgtagcaaacccggcgtgatcttccttaccaagaagggtcggagattctgcgctaatccctccgacaaacaggtgcaggtttgcgttcgtatgctcaagttagacacaaggatcaaaaccagaaaaaactag

SEQ ID NO: 241972 - DNA, 363 bp, Artificial Sequence
  derived and/or modified sequence
atgaaggtgtctgtggccgccctgagctgcctgatgctggtgacagccctgggcagccaggcccgggtgaccaaggatgctgagacagagttcatgatgagcaagctgcccctggagaaccctgtgctgctggaccgcttccacgccaccagcgctgactgctgcatctcctacacccccaggagcatcccctgcagcctgctggagagctactttgagaccaacagtgaatgttccaagccaggagtcatcttcctgaccaagaagggccgccgcttctgtgccaaccccagcgacaagcaggtgcaggtgtgtgtgaggatgctgaagctggacacccgcatcaagaccaggaagaactag

SEQ ID NO: 241973 - DNA, 363 bp, Artificial Sequence
  derived and/or modified sequence
atgaaggtgagcgtggccgccctgagctgcctgatgctggtgaccgcactgggcagccaagctcgggtcaccaaggacgcagagacagaattcatgatgtcgaaactgcccctcgaaaatccggtgctgttagacagattccatgccacatccgctgattgctgcatcagttatacaccacggtccattccttgttctcttctggagtcttacttcgaaacgaattccgagtgcagtaagccgggcgtgattttcctgacgaagaaggggagacggttttgcgctaatcctagcgataaacaggttcaggtatgcgttcgtatgctgaaattggacacccgtatcaagacaaggaaaaactag

SEQ ID NO: 241974 - DNA, 363 bp, Artificial Sequence
  derived and/or modified sequence
atgaaagtcagtgtagccgctctgagctgcctcatgctggtaacagccttaggatctcaggctagggtcactaaggacgccgaaaccgaattcatgatgtccaagctgcccttggagaaccctgtcctcctcgataggtttcatgccacaagtgccgattgctgcatatcttacacgccacgatctatcccctgctccctgcttgagtcctacttcgagacgaactcagaatgctcaaaacctggggttattttcctgacgaagaagggccgacgcttctgcgcaaaccctagtgataagcaggtgcaggtctgtgtcaggatgctgaagctggacacgaggatcaagacccggaagaactag

SEQ ID NO: 241975 - DNA, 569 bp, Artificial Sequence
  derived and/or modified sequence
tcccgagaagccaggaagcagtgagcccaggagtcctcggccagccctgcctgcccaccaggaggatgaaggtctccgtggctgccctctcctgcctcatgcttgttactgcccttggatcccaggcccgggtcacaaaagatgcagagacagagttcatgatgtcaaagcttccattggaaaatccagtacttctggacagattccatgctactagtgctgactgctgcatctcctacaccccacgaagcatcccgtgttcactcctggagagttactttgaaacgaacagcgagtgctccaagccgggtgtcatcttcctcaccaagaaggggcgacgtttctgtgccaaccccagtgataagcaagttcaggtttgcgtgagaatgctgaagctggacacacggatcaagaccaggaagaattgaacttgtcaaggtgaagggacacaagttgccagccaccaactttcttgcctcaactaccttcctgaattattttttaaagaagcatttattcttgtgttctggatttagagcaattcatctaataaacagtttctcactttt

SEQ ID NO: 241976 - DNA, 363 bp, Artificial Sequence
  derived and/or modified sequence
atgaaggtgagcgtggccgccctgagctgcctgatgctggtgaccgccctgggcagccaggccagagtgaccaaggacgccgagaccgagttcatgatgagcaagctgcccctggagaaccccgtgctgctggacagattccacgccaccagcgccgactgctgcatcagctacacccccagaagcatcccctgcagcctgctggagagctacttcgagaccaacagcgagtgcagcaagcccggcgtgatcttcctgaccaagaagggcagaagattctgcgccaaccccagcgacaagcaggtgcaggtgtgcgtgagaatgctgaagctggacaccagaatcaagaccagaaagaactag

SEQ ID NO: 241977 - protein, 96 aa, Artificial Sequence
  derived and/or modified sequence
MSESSSKSSQPLASKQEKDGTEKRGRGRPRKQPPKEPSEVPTPKRPRGRPKGSKNKGAAKTRKTTTTPGRKPRGRPKKLEKEEEEGISQESSEEEQ

SEQ ID NO: 241978 - DNA, 291 bp, Artificial Sequence
  derived and/or modified sequence
atgagcgagagtagttctaaatcatcccaacctttggccagtaagcaagaaaaggatgggacagaaaagcgggggaggggccgccccagaaaacagccccctaaagagccttctgaggttcctacacctaaaaggccaagaggtcgcccgaaaggcagcaaaaataaaggggcagccaagacccggaagaccaccactacccccggacgcaagccaagaggtagacctaagaaattagaaaaagaggaggaagaaggaatttctcaggagagctcagaagaggagcagtag

SEQ ID NO: 241979 - DNA, 291 bp, Artificial Sequence
  derived and/or modified sequence
atgtccgagagctcatcaaaaagttcacagcctctagcctccaaacaggaaaaagacggcactgaaaagcgcgggcgcggaagaccaagaaagcaacctccaaaagagccctcagaagtcccaacacctaaacggccaagaggcaggccaaagggatccaaaaataagggcgccgctaagaccaggaaaacaacaacaacacctggcaggaagcctcgcggccgccctaagaaactggagaaagaggaggaagagggcatctctcaggagtctagcgaggaggaacagtag

SEQ ID NO: 241980 - DNA, 291 bp, Artificial Sequence
  derived and/or modified sequence
atgtcagaatccagttctaaaagttctcagcctctggcgtctaagcaggaaaaagacggaaccgaaaagagggggagggggagacctcggaagcagccgcccaaggaacctagtgaggttcccactccaaagcgtcccaggggtcgacctaagggatccaaaaataaaggtgctgccaagactagaaagaccacaacaacccctggaagaaaacccagggggaggcccaaaaaacttgaaaaggaggaagaagagggaatctcacaggagtccagcgaggaagaacaatag

SEQ ID NO: 241981 - DNA, 291 bp, Artificial Sequence
  derived and/or modified sequence
atgtctgagagcagcagcaagagcagccagcccctggccagcaagcaggagaaggatggaacagagaagaggggccggggccggcccaggaagcagccccccaaggagcccagcgaggtgcccacccccaagaggccccggggccggcccaagggcagcaagaacaagggggccgccaagaccaggaagaccaccaccaccccaggcaggaagccccggggccggcccaagaagctggagaaggaggaggaggagggcatcagccaggagagcagcgaggaggagcagtag

SEQ ID NO: 241982 - DNA, 291 bp, Artificial Sequence
  derived and/or modified sequence
atgagcgagagcagcagcaagagcagccagcccctggccagcaagcaggaaaaggacggcactgaaaaaagaggaagaggccgaccccggaaacagccacctaaggagcctagtgaggttccaactcctaagagacctagagggcgtcccaagggaagcaaaaacaagggagccgcaaagacacgcaaaactacaacgacaccaggcagaaagcctcggggccggcctaaaaaactggagaaggaggaagaagaaggcatatcgcaggagtcatcagaggaggaacagtag

SEQ ID NO: 241983 - DNA, 291 bp, Artificial Sequence
  derived and/or modified sequence
atgagcgagagcagcagcaagagcagccagcccctggccagcaagcaggaaaaagacggaacagaaaagagaggacggggacgacctaggaaacagcctcccaaggaacctagtgaagtgccaacaccgaaaagaccacggggacgaccaaaaggaagcaagaacaaaggcgcggctaagacccggaagacaaccacaacccctgggcggaaaccacgagggaggccaaagaagctagagaaagaggaagaagagggaatctcacaggagtcatctgaagaggagcaatag

SEQ ID NO: 241984 - DNA, 291 bp, Artificial Sequence
  derived and/or modified sequence
atgagcgagagcagcagcaagagcagccagcccctggccagcaagcaggagaaagacggcaccgaaaaacgcgggcgtggtagaccacggaagcagccaccaaaggaaccatccgaagttcctaccccaaagcgccctcgcggtcggcctaaagggtctaagaataaaggcgcagccaaaacccgaaaaactacaaccacccccggccgaaagccaagaggtagaccgaaaaagctggaaaaagaggaggaggaaggcatcagccaagagagcagcgaagaggagcagtag

SEQ ID NO: 241985 - DNA, 291 bp, Artificial Sequence
  derived and/or modified sequence
atgagcgagagcagcagcaagagcagccagcccctggccagcaagcaggaaaaggacggaacagaaaaaagaggacggggcaggcctcggaaacagccaccaaaggaacctagcgaggtgcctactccaaagagacccagaggtcggcctaaaggatcgaagaataaaggggccgccaagactaggaaaaccacaacaactcccggccgaaagcctagaggaaggcccaagaaacttgaaaaggaggaggaagagggcatctctcaggaatcctcagaagaagagcagtag

SEQ ID NO: 241986 - DNA, 291 bp, Artificial Sequence
  derived and/or modified sequence
atgtctgagagcagtagcaagtccagccagcccctagcttcaaagcaagaaaaggacggaacagagaagcgtggcagaggcaggcctcggaaacagcccccaaaggagccgtcagaggtgccaacgcccaagagaccacgcggtagacctaaggggagtaaaaacaagggcgcagcaaagacaaggaaaaccacgacaactcccggacggaaaccccgtggtcgccctaagaaactcgaaaaggaagaggaagagggtatatctcaggagagcagcgaggaagaacagtag

SEQ ID NO: 241987 - DNA, 291 bp, Artificial Sequence
  derived and/or modified sequence
atgtctgagagttcgagcaagtcctctcaaccgctggctagcaaacaggagaaggacggaaccgaaaagagaggtagaggcagacctagaaagcaacctcccaaggagccttccgaagttcctacacccaagcggccaaggggccgtcctaaggggagcaaaaataagggcgctgccaagacccgtaagaccacaactacacccggacgcaagcctcggggaagacccaaaaaattggagaaagaggaggaggagggtatttctcaggagagctcagaagaagagcagtag

SEQ ID NO: 241988 - DNA, 291 bp, Artificial Sequence
  derived and/or modified sequence
atgtctgaaagtagttcaaagtcttctcaacctctggcctcaaagcaggaaaaggatggcaccgagaaaagggggaggggaagacctcgcaagcagccccctaaggagcctagcgaggtacctacccctaaacggcctcgagggaggcccaagggaagtaagaataaaggagctgctaagacgcggaaaacgaccacgactccaggacggaagcccaggggcaggcctaaaaagctcgaaaaggaggaagaagagggcatcagtcaggagtcgtctgaggaggagcagtag

SEQ ID NO: 241989 - DNA, 291 bp, Artificial Sequence
  derived and/or modified sequence
atgtccgagtcctcctccaaatctagccagcctctggcctccaaacaggagaaagatggaacagagaaaagaggcagaggaaggcctcggaagcagccacctaaggagcctagcgaggtcccgacccctaagagaccccgagggaggccgaaggggtcaaagaacaaaggggctgcaaagacccgtaaaactacgaccacccccggaagaaagcctcgcggtagaccaaagaagttagaaaaggaagaagaggaggggatctcccaggaatcaagcgaggaagaacaatag

SEQ ID NO: 241990 - DNA, 291 bp, Artificial Sequence
  derived and/or modified sequence
atgagcgagagcagcagcaagagcagccagcccctggccagcaagcaggagaaggacggcaccgagaagagaggcagaggcagacccagaaagcagccccccaaggagcccagcgaggtgcccacccccaagagacccagaggcagacccaagggcagcaagaacaagggcgccgccaagaccagaaagaccaccaccacccccggcagaaagcccagaggcagacccaagaagctggagaaggaggaggaggagggcatcagccaggagagcagcgaggaggagcagtag

SEQ ID NO: 241991 - protein, 470 aa, Artificial Sequence
  derived and/or modified sequence
MLKFQEAAKCVSGSTAISTYPKTLIARRYVLQQKLGSGSFGTVYLVSDKKAKRGEELKVLKEISVGELNPNETVQANLEAQLLSKLDHPAIVKFHASFVEQDNFCIITEYCEGRDLDDKIQEYKQAGKIFPENQIIEWFIQLLLGVDYMHERRILHRDLKSKNVFLKNNLLKIGDFGVSRLLMGSCDLATTLTGTPHYMSPEALKHQGYDTKSDIWSLACILYEMCCMNHAFAGSNFLSIVLKIVEGDTPSLPERYPKELNAIMESMLNKNPSLRPSAIEILKIPYLDEQLQNLMCRYSEMTLEDKNLDCQKEAAHIINAMQKRIHLQTLRALSEVQKMTPRERMRLRKLQAADEKARKLKKIVEEKYEENSKRMQELRSRNFQQLSVDVLHEKTHLKGMEEKEEQPEGRLSCSPQDEDEERWQGREEESDEPTLENLPESQPIPSMDLHELESIVEDATSDLGYHATHS

SEQ ID NO: 241992 - DNA, 1413 bp, Artificial Sequence
  derived and/or modified sequence
atgctcaagttccaagaagctgcaaaatgtgtttcaggatctaccgccatcagtacatatccaaaaactctcattgcacgtcggtacgtcctccagcagaagctcgggtcagggagttttgggactgtgtatttagtgtccgacaaaaaagccaagaggggtgaggagttgaaagtcttaaaagaaatcagcgtgggcgagctgaaccctaacgagacagtacaggcaaatctggaggcccagcttttgagcaagctcgaccaccctgcaatcgtgaagttccacgccagttttgtagagcaggataatttctgtatcatcacggagtactgtgaagggagggatcttgacgataagattcaggaatacaaacaggccggcaagatctttccagagaatcagatcatcgaatggttcatccagcttctgctgggtgtagactacatgcacgaaaggcgcatcctgcatcgagatctgaagtcaaaaaacgtgttcctaaaaaacaatttgcttaagatcggcgacttcggagtgtcacgcctgctgatgggtagttgcgatttagcgaccactcttaccggtacaccgcactacatgtcccccgaagctttgaaacatcaagggtacgatacaaagtcggacatctggtcactcgcttgcatcctgtatgaaatgtgttgtatgaaccatgcctttgctgggtccaatttcctaagtatcgttctaaagattgtcgaaggcgatacaccatcactgcccgaaaggtaccctaaggaattgaatgccatcatggagtcgatgctgaataagaatccctcattgcgtccatcggctattgagattctgaagataccatatctagacgagcagttgcagaacctgatgtgcagatactctgaaatgactttagaggacaaaaatttagattgccagaaagaagccgcccacattatcaatgctatgcaaaaaagaatccacctgcagaccttaagggcactgtcagaggttcaaaagatgacccctcgagagcggatgaggcttcgcaaactccaggccgccgatgagaaggctcgtaaactaaagaaaatcgtcgaggagaaatacgaagaaaattctaaacgaatgcaggagctaaggagtagaaatttccagcagctgtccgttgatgtgctgcacgagaagacccacctgaaaggcatggaagagaaggaagagcagcctgagggtcggctaagctgtagcccccaggatgaggacgaggagagatggcagggcagggaggaagagtccgacgagcccaccctcgagaatcttcctgagtcacagccaatcccaagcatggatctccatgaattagaaagcatcgtcgaagacgcaacctccgaccttggctaccacgccactcacagctag

SEQ ID NO: 241993 - DNA, 1413 bp, Artificial Sequence
  derived and/or modified sequence
atgctgaagttccaggaggccgccaagtgtgtgtctggcagcacagccatcagcacctaccccaagaccctgattgccaggagatatgtgctgcagcagaagctgggcagcggcagctttggcaccgtgtacctggtgtctgacaagaaggccaagagaggagaggagctgaaggtgctgaaggagatctctgtgggggagctgaaccccaatgaaacagtgcaggccaacctggaggcccagctgctgagcaagctggaccacccagccatcgtgaagttccacgccagctttgtggagcaggacaacttctgcatcatcacagagtactgtgagggccgggacctggatgacaagatccaggagtacaagcaggccggcaagatcttccctgagaaccagatcatcgagtggttcatccagctgctgctgggcgtggactacatgcatgagcggcgcatcctgcaccgggacctgaagagcaagaatgtgttcctgaagaacaacctgctgaagattggagactttggagtgtcccggctgctgatgggcagctgtgacctggccaccaccctgaccggcaccccccactacatgagccctgaggccctgaagcaccagggctatgacaccaagagtgacatctggagcctggcctgcatcctgtatgagatgtgctgcatgaaccacgcctttgctggcagcaacttcctgagcatcgtgctgaagatcgtggagggggacacccccagcctgcctgagcgctaccccaaggagctgaatgccatcatggagagcatgctgaacaagaaccccagcctgcggcccagcgccatcgagatcctgaagatcccctacctggatgagcagctgcagaacctgatgtgccgctacagcgagatgaccctggaggacaagaacctggactgccagaaggaggccgcccacatcatcaatgccatgcagaagaggatccacctgcagaccctgcgggccctgtctgaggtgcagaagatgaccccccgggagaggatgaggctgaggaagctgcaggccgcagatgagaaggccaggaagctgaagaagatcgtggaggagaagtatgaggagaacagcaagaggatgcaggagctgcggagcaggaacttccagcagctgtctgtggatgtgctgcacgagaagacccacctgaagggcatggaggagaaggaggagcagcctgagggccgcctgagctgcagcccccaggatgaagatgaggagcgctggcagggccgggaggaggagagtgatgagcccaccctggagaacctgcctgagagccagcccatccccagcatggacctgcacgagctggagagcatcgtggaggatgccaccagtgacctgggctaccacgccacccacagctag

SEQ ID NO: 241994 - DNA, 1413 bp, Artificial Sequence
  derived and/or modified sequence
atgctgaagttccaggaggccgccaagtgcgtgagcggcagcaccgcaatttcgacatatcctaagactcttatagcacgcagatacgtgctccagcaaaagttgggtagcggcagctttggcaccgtgtacctggtgagcgataagaaagccaagcgaggggaagaactgaaggtgctgaaggaaataagcgtgggcgagttaaaccccaatgagacagtccaagccaatctggaggctcagctgttatcaaagctggaccaccccgctatagtcaaatttcatgcttcattcgtcgaacaggacaacttttgcattattacagaatattgtgagggcagggatctggacgataagattcaagagtataagcaggcgggcaagatctttcccgaaaatcagataattgagtggtttatacagctgctgctaggcgtggattatatgcacgaacggcgcattttgcacagggatctgaagtccaagaacgttttcctgaaaaataacctgctgaaaattggagacttcggcgtctcccggcttctgatgggctcatgcgaccttgcaacaactttgacagggacaccccattacatgtctcctgaggctttaaagcaccaaggctacgacaccaaatctgacatctggtcactggcctgtatcttatacgagatgtgttgcatgaatcacgcattcgctggctccaatttcctgtcaattgtactcaaaatagtggaaggtgacactccttctctccccgaacgctaccctaaggaactcaacgccattatggaaagcatgctcaataagaaccccagcttacggcctagtgctattgaaatcctgaagattccctatctcgatgagcagttacagaacttaatgtgtcggtacagtgagatgaccctcgaagacaaaaaccttgattgccaaaaagaggccgcacacatcataaatgctatgcaaaaacgaatacatctgcaaaccttgcgggcactttcagaggttcagaagatgacacccagagaacgcatgcggttaaggaaactgcaagcggccgacgagaaggcgcgtaagttgaaaaagatcgtggaggagaagtacgaggaaaattccaagcggatgcaggagctcagatccaggaattttcagcaattgtcagtagatgtgctccatgaaaaaacacacttgaaaggaatggaagagaaggaggagcaacctgagggacggctgtcctgtagcccacaagatgaagatgaagaaagatggcaggggagggaggaagagagtgatgagccgacgctcgagaatttgcctgaatctcagcctattccatctatggatcttcacgaactggaaagcattgtcgaggatgccactagcgacctgggctaccacgccactcattcttag

SEQ ID NO: 241995 - DNA, 2056 bp, Artificial Sequence
  derived and/or modified sequence
ccaaacagccgtggcccgcggtgtctggcgctcggtgggtgtggttgcccctagtttgaggcctgcccgattacccgcaagacttgggcagccccgggcgccgctccgaccacgacagggaaaggaaccttaatctcatctttaaaataaggagaattactgagtgacctgaaggacccttttcagctggaaagtctgaactgaccaacactggatgaatttgaccatttcttaggagactggaatgttaagtttctataaatgaatgaaccagttctctcttgtttggagcaatgctgaaattccaagaggcagctaagtgtgtgagtggatcaacagccatttccacttatccaaagaccttgattgcaagaagatacgtgcttcaacaaaaacttggcagtggaagttttggaactgtctatctggtttcagacaagaaagccaaacgaggagaggaattaaaggtacttaaggaaatatctgttggagaactaaatccaaatgaaactgtacaggccaatttggaagcccaactcctctccaagctggaccacccagccattgtcaagttccatgcaagttttgtggagcaagataatttctgcattatcacggagtactgtgagggccgagatctggacgataaaattcaggaatataaacaagctggaaaaatctttccagaaaatcaaataatagaatggtttatccagctgctgctgggagttgactacatgcatgagaggaggatacttcatcgagacttaaagtcaaagaatgtatttctgaaaaataatctccttaaaattggagattttggagtttctcgacttctaatgggatcctgtgacctggccacaactttaactggaactccccattatatgagtcctgaggctctgaaacaccaaggctatgacacaaagtcggacatctggtcactggcatgcattttgtatgagatgtgctgcatgaatcatgcattcgctggctccaatttcttatccattgttttaaaaattgttgaaggtgacacaccttctctccctgagagatatccaaaagaactaaatgccatcatggaaagcatgttgaacaagaatccttcattaagaccatctgctatcgaaattttaaaaatcccttaccttgatgagcagctacagaacctaatgtgtagatattcagaaatgactctggaagacaaaaatttggattgtcagaaggaggctgctcatataattaatgccatgcaaaaaaggatccacctgcagactctgagggcactgtcagaagtacagaaaatgacgccaagagaaaggatgcggctgaggaagctccaggcggctgatgagaaagccaggaagctgaaaaagattgtggaagaaaaatatgaagaaaatagcaaacgaatgcaagaattgagatctcggaactttcagcagctgagtgttgatgtactccatgaaaaaacacatttaaaaggaatggaagaaaaggaggagcaacctgagggaagactttcttgttcaccccaggacgaggatgaagagaggtggcaaggcagggaagaggaatctgatgaaccaactttagagaacctgcctgagtctcagcctattccttccatggacctccacgaacttgaatcaattgtagaggatgccacatctgaccttggataccatgcaactcacagctgactttcagagcagtgttttttccaaagctggaatagcctgagactctagggcctgggtctacaaggagcatgactccctaccccaccattcagatgtggagaatgcagtgaagtaggccttggctgcttacccacatcctgaccagctgtcacctcttcatttcctgttcagccactctttaagcaatcactgagcccaatgctcagagatagctcagacctgtaggtggttgtgctttgcttgcctgtaggagccccacatgccctttacagttctgggctgtctatgacttacgatatcacctcttctttttaaatgtccaagtggaaataaagtgatttgaactttgc

SEQ ID NO: 241996 - DNA, 1413 bp, Artificial Sequence
  derived and/or modified sequence
atgcttaagttccaggaggctgcaaaatgtgtgtccggatctacagctatttcaacgtaccccaagaccctcattgccagacggtatgtcctccagcagaagcttgggagcgggagcttcgggacagtctacctggtgtccgacaagaaggctaagcggggtgaggagctgaaggttctcaaggagatttctgtcggcgagctgaatcccaacgagacagtgcaggccaacctcgaggcacagctgttaagtaagctcgatcaccccgctatcgtcaagttccatgctagctttgtagaacaggataatttctgtatcatcacagagtattgtgagggcagggatctcgatgataaaatccaagagtataaacaagcagggaaaatcttccccgaaaaccagataattgaatggttcattcaattactcttgggagtggattatatgcacgagagacggatcctgcaccgcgaccttaagtctaaaaatgtctttctcaagaataacttgctgaagattggcgactttggggtatcacgcctcttgatgggttcctgcgatcttgcgaccaccctaaccggtacaccccactacatgagcccagaagcccttaaacatcaggggtacgacactaaatccgatatctggtcacttgcttgcatactgtatgaaatgtgctgcatgaatcacgccttcgctgggagtaactttctctctattgtgctgaaaattgtagaaggggacactcccagcctgccagagcgctaccctaaagagttgaatgccatcatggagtccatgctgaataaaaatccttcccttcgcccaagcgctattgagattttgaagattccatatctggacgaacaactgcagaaccttatgtgccgatatagtgaaatgacactggaggacaaaaacttagactgccagaaggaagcagctcatattatcaatgcaatgcagaaacgtattcacctgcagacactgcgcgcactgagcgaagtgcaaaagatgaccccacgggaaagaatgcgcttgagaaagctccaggcagccgatgagaaagctcgaaaacttaagaaaatcgtggaagaaaaatacgaagagaactccaaaaggatgcaggaactgcggagccgcaactttcagcaactatccgtggacgtcctccatgaaaagactcacctcaagggcatggaggaaaaggaggaacagccggaaggacgcctctcatgcagcccccaggacgaagatgaagagcgttggcagggacgagaggaggagtctgacgaacctacattggaaaacctgccagagtcccagcccattcccagtatggacttgcatgagttggaaagtattgtggaggatgctacctccgacttaggttatcacgctactcattcctag

SEQ ID NO: 241997 - DNA, 1413 bp, Artificial Sequence
  derived and/or modified sequence
atgctgaagttccaggaggccgccaagtgcgtgagcggcagcaccgccatcagcacctaccccaagaccctgatcgccagaagatacgtgctgcagcagaagctgggcagcggcagcttcggcaccgtgtacctggtgagcgacaagaaggccaagagaggcgaggagctgaaggtgctgaaggagatcagcgtgggcgagctgaaccccaacgagaccgtgcaggccaacctggaggcccagctgctgagcaagctggaccaccccgccatcgtgaagttccacgccagcttcgtggagcaggacaacttctgcatcatcaccgagtactgcgagggcagagacctggacgacaagatccaggagtacaagcaggccggcaagatcttccccgagaaccagatcatcgagtggttcatccagctgctgctgggcgtggactacatgcacgagagaagaatcctgcacagagacctgaagagcaagaacgtgttcctgaagaacaacctgctgaagatcggcgacttcggcgtgagcagactgctgatgggcagctgcgacctggccaccaccctgaccggcaccccccactacatgagccccgaggccctgaagcaccagggctacgacaccaagagcgacatctggagcctggcctgcatcctgtacgagatgtgctgcatgaaccacgccttcgccggcagcaacttcctgagcatcgtgctgaagatcgtggagggcgacacccccagcctgcccgagagataccccaaggagctgaacgccatcatggagagcatgctgaacaagaaccccagcctgagacccagcgccatcgagatcctgaagatcccctacctggacgagcagctgcagaacctgatgtgcagatacagcgagatgaccctggaggacaagaacctggactgccagaaggaggccgcccacatcatcaacgccatgcagaagagaatccacctgcagaccctgagagccctgagcgaggtgcagaagatgacccccagagagagaatgagactgagaaagctgcaggccgccgacgagaaggccagaaagctgaagaagatcgtggaggagaagtacgaggagaacagcaagagaatgcaggagctgagaagcagaaacttccagcagctgagcgtggacgtgctgcacgagaagacccacctgaagggcatggaggagaaggaggagcagcccgagggcagactgagctgcagcccccaggacgaggacgaggagagatggcagggcagagaggaggagagcgacgagcccaccctggagaacctgcccgagagccagcccatccccagcatggacctgcacgagctggagagcatcgtggaggacgccaccagcgacctgggctaccacgccacccacagctag

SEQ ID NO: 241998 - protein, 270 aa, Artificial Sequence
  derived and/or modified sequence
MENQPVRWRALPGLPRPPGLPAAPWLLLGVLLLPGTLRLAGGQSVTHTGLPIMASLANTAISFSCRITYPYTPQFKVFTVSYFHEDLQGQRSPKKPTNCHPGLGTENQSHTLDCQVTLVLPGASATGTYYCSVHWPHSTVRGSGTFILVRDAGYREPPQSPQKLLLFGFTGLLSVLSVVGTALLLWNKKRMRGPGKDPTRKCPDPRSASSPKQHPSESVYTALQRRETEVYACIENEDGSSPTAKQSPLSQERPHRFEDDGELNLVYENL

SEQ ID NO: 241999 - protein, 610 aa, Artificial Sequence
  derived and/or modified sequence
MDTPRGIGTFVVWDYVVFAGMLVISAAIGIYYAFAGGGQQTSKDFLMGGRRMTAVPVALSLTASFMSAVTVLGTPSEVYRFGAIFSIFAFTYFFVVVISAEVFLPVFYKLGITSTYEYLELRFNKCVRLCGTVLFIVQTILYTGIVIYAPALALNQVTGFDLWGAVVATGVVCTFYCTLGGLKAVIWTDVFQVGIMVAGFASVIIQAVVMQGGISTILNDAYDGGRLNFWNFNPNPLQRHTFWTIIIGGTFTWTSIYGVNQSQVQRYISCKSRFQAKLSLYINLVGLWAILTCSVFCGLALYSRYHDCDPWTAKKVSAPDQLMPYLVLDILQDYPGLPGLFVACAYSGTLSTVSSSINALAAVTVEDLIKPYFRSLSERSLSWISQGMSVVYGALCIGMAALASLMGALLQAALSVFGMVGGPLMGLFALGILVPFANSIGALVGLMAGFAISLWVGIGAQIYPPLPERTLPLHLDIQGCNSTYNETNLMTTTEMPFTTSVFQIYNVQRTPLMDNWYSLSYLYFSTVGTLVTLLVGILVSLSTGGRKQNLDPRYILTKEDFLSNFDIFKKKKHVLSYKSHPVEDGGTDNPAFNHIELNSDQSGKSNGTRL

SEQ ID NO: 242000 - DNA, 1833 bp, Artificial Sequence
  derived and/or modified sequence
atggacacccccagaggcatcggcaccttcgtggtgtgggactacgtggtgttcgccggcatgctggtgatcagcgccgccatcggcatctactacgccttcgccggcggcggccagcagaccagcaaggacttcctgatgggcggcagaagaatgaccgccgtgcccgtggccctgagcctgaccgccagcttcatgagcgccgtgaccgtgctgggcacccccagcgaggtgtacagattcggcgccatcttcagcatcttcgccttcacctacttcttcgtggtggtgatcagcgccgaggtgttcctgcccgtgttctacaagctgggcatcaccagcacctacgagtacctggagctgagattcaacaagtgcgtgagactgtgcggcaccgtgctgttcatcgtgcagaccatcctgtacaccggcatcgtgatctacgcccccgccctggccctgaaccaggtgaccggcttcgacctgtggggcgccgtggtggccaccggcgtggtgtgcaccttctactgcaccctgggcggcctgaaggccgtgatctggaccgacgtgttccaggtgggcatcatggtggccggcttcgccagcgtgatcatccaggccgtggtgatgcagggcggcatcagcaccatcctgaacgacgcctacgacggcggcagactgaacttctggaacttcaaccccaaccccctgcagagacacaccttctggaccatcatcatcggcggcaccttcacctggaccagcatctacggcgtgaaccagagccaggtgcagagatacatcagctgcaagagcagattccaggccaagctgagcctgtacatcaacctggtgggcctgtgggccatcctgacctgcagcgtgttctgcggcctggccctgtacagcagataccacgactgcgacccctggaccgccaagaaggtgagcgcccccgaccagctgatgccctacctggtgctggacatcctgcaggactaccccggcctgcccggcctgttcgtggcctgcgcctacagcggcaccctgagcaccgtgagcagcagcatcaacgccctggccgccgtgaccgtggaggacctgatcaagccctacttcagaagcctgagcgagagaagcctgagctggatcagccagggcatgagcgtggtgtacggcgccctgtgcatcggcatggccgccctggccagcctgatgggcgccctgctgcaggccgccctgagcgtgttcggcatggtgggcggccccctgatgggcctgttcgccctgggcatcctggtgcccttcgccaacagcatcggcgccctggtgggcctgatggccggcttcgccatcagcctgtgggtgggcatcggcgcccagatctacccccccctgcccgagagaaccctgcccctgcacctggacatccagggctgcaacagcacctacaacgagaccaacctgatgaccaccaccgagatgcccttcaccaccagcgtgttccagatctacaacgtgcagagaacccccctgatggacaactggtacagcctgagctacctgtacttcagcaccgtgggcaccctggtgaccctgctggtgggcatcctggtgagcctgagcaccggcggcagaaagcagaacctggaccccagatacatcctgaccaaggaggacttcctgagcaacttcgacatcttcaagaagaagaagcacgtgctgagctacaagagccaccccgtggaggacggcggcaccgacaaccccgccttcaaccacatcgagctgaacagcgaccagagcggcaagagcaacggcaccagactgtag

SEQ ID NO: 242001 - DNA, 1833 bp, Artificial Sequence
  derived and/or modified sequence
atggacacacctaggggaatcggtacctttgtggtgtgggattacgtcgtctttgcgggcatgctcgttataagcgccgctatcggcatttactacgcgttcgccgggggcggccaacagacatctaaggatttcctcatgggaggacgacggatgactgccgtgcccgtggccctatccctgactgcctcattcatgtcggcggtgaccgtgctgggtactccctctgaagtttaccgatttggcgcaattttctccatttttgccttcacatatttcttcgtggtggtgatctccgccgaagtcttcctgcccgtgttttacaagctcggcataacaagcacctacgagtatcttgagctgcgtttcaacaaatgtgtaagattatgcggcacagttttattcattgtacagactatactgtacaccggcatcgtgatttacgcacctgcattagcattgaaccaggttaccggtttcgatctatggggagctgtggtcgccactggagtggtctgcaccttctattgcactctaggcggcctgaaggccgtaatctggactgatgtgttccaagtgggaatcatggtggcgggattcgccagtgtcataatccaggccgtggtgatgcagggagggatctcaaccatactgaacgacgcttatgacggcggtagactgaacttttggaatttcaatcccaaccccctgcagcgacacaccttttggaccatcatcatcggcggaacctttacctggacttcgatttacggggtgaaccagagccaggtacagagatacatttcttgcaagtccagattccaggcaaaactgtctctttatatcaacctggtgggtttatgggccatcctcacctgctctgtcttctgcggattggcgttgtactctaggtatcatgactgcgacccatggaccgcgaaaaaagtatccgcacccgaccaactcatgccctacctggtgctagacatactgcaggactaccctggcttacctggcctgttcgtagcgtgtgcttactccggaactttgagcactgtgtcgagctccataaacgcactggctgctgttactgtggaagatctgattaagccctactttcggtcactaagcgagcgcagcctgagctggatctcccaagggatgtctgtagtgtatggtgctctatgcatcggcatggctgcactcgcaagcttgatgggcgctctcctgcaggctgcacttagtgtgttcggcatggttgggggcccacttatgggcttgttcgctctgggaattctggttcccttcgccaattccatcggagctctggtggggctgatggccggcttcgcgatcagtctctgggtgggaatcggagctcaaatatatccccccctcccagagaggaccttgccattacacttggacatacaaggctgtaactctacatacaacgagactaatctaatgactacaacagaaatgcccttcactactagcgtgtttcagatctacaacgtgcaaaggacgcctctaatggacaactggtatagcctgagttatctgtatttctccaccgtgggaacccttgtaacattactggtcggaatacttgtcagcctttcaacgggaggtaggaagcagaatctagacccaagatatatcctgactaaagaggatttcttatctaacttcgatatatttaagaagaagaagcatgtgcttagctacaagagccaccccgtcgaggacgggggaaccgacaatccagcatttaaccacattgagctgaattccgaccagagcgggaaatccaacggcaccaggctgtag

SEQ ID NO: 242002 - DNA, 1833 bp, Artificial Sequence
  derived and/or modified sequence
atggacaccccccggggcatcggcacctttgtggtgtgggactatgtggtgtttgctggcatgctggtgatctctgctgccatcggcatctactatgcctttgctgggggcggccagcagaccagcaaggacttcctgatgggcggccgcaggatgacagctgtgcctgtggccctgagcctgacagccagcttcatgtctgctgtgacagtgctgggcacccccagcgaggtgtacagatttggagccatcttcagcatctttgccttcacctacttctttgtggtggtgatctctgctgaggtgttcctgcctgtgttctacaagctgggcatcaccagcacctatgagtacctggagctgcgcttcaacaagtgtgtgcggctgtgtggcaccgtgctcttcatcgtgcagaccatcctgtacacaggaattgtcatctatgccccagccctggccctgaaccaggtgacaggctttgacctgtggggcgctgtggtggccactggagtggtgtgcaccttctactgcaccctgggcggcctgaaggccgtcatctggacagatgtgttccaggtgggcatcatggtggccggctttgccagcgtcatcatccaggccgtggtgatgcagggcggcatcagcaccatcctgaatgatgcctatgatggcggccgcctgaacttctggaacttcaaccccaaccccctgcagaggcacaccttctggaccatcatcattggaggcaccttcacctggaccagcatctatggagtgaaccagagccaggtgcagcgctacatcagctgcaagagccgcttccaggccaagctgagcctgtacatcaacctggtgggcctgtgggccatcctgacctgcagcgtcttctgtggcctggccctgtacagccgctaccatgactgtgacccctggacagccaagaaggtgtctgccccagaccagctgatgccctacctggtgctggacatcctgcaggactacccaggcctgcccggcctgtttgtggcctgtgcctacagcggcaccctgagcacagtgagcagcagcatcaatgccctggccgctgtgacagtggaggacctgatcaagccctacttccgcagcctgtctgagaggagcctgtcctggatcagccagggcatgtctgtggtgtatggagccctgtgcatcggcatggccgccctggccagcctgatgggcgccctgctgcaggccgccctgtctgtgtttggcatggtgggcggccccctgatgggcctgtttgccctgggcatcctggtgccctttgccaacagcatcggggccctggtgggcctgatggccggctttgccatcagcctgtgggtgggcatcggggcccagatctacccacccctgcctgagaggaccctgcccctgcacctggacatccagggctgcaacagcacctacaatgagaccaacctgatgaccaccacagagatgcccttcaccaccagcgtcttccagatctacaacgtgcagaggacccccctgatggacaactggtacagcctgagctacctgtacttcagcacagtgggcaccctggtgaccctgctggtgggcatcctggtgtccctgagcactggaggcaggaagcagaacctggacccccgctacatcctgaccaaggaggacttcctgagcaactttgacatcttcaagaagaagaagcacgtgctgagctacaagagccaccctgtggaggatggcggcacagacaacccagccttcaaccacatcgagctgaacagcgaccagagcggcaagagcaatggcacccggctgtag

SEQ ID NO: 242003 - DNA, 1833 bp, Artificial Sequence
  derived and/or modified sequence
atggacaccccccggggcatcggcaccttcgtggtgtgggactacgttgtgttcgctggtatgctggttattagcgctgccatcggaatttattacgcattcgcaggcggagggcaacaaacgtccaaggactttctcatgggcggtagacgaatgactgcggtccctgtggccctgtccctaactgcctccttcatgagcgccgtgaccgtcctcggaactccttcagaagtctatcggttcggcgccatcttcagcatttttgccttcacatacttttttgtggtcgtgattagtgctgaagtttttctgccggtgttctacaagctggggattactagcacatatgagtatctggagttgcgctttaacaagtgcgtacgcttatgtggcacagttcttttcattgtgcagaccatcctttataccggaatagtcatttacgcgcccgctctcgccctgaatcaggtgaccggctttgacctatggggcgcggttgttgctacaggtgtggtgtgtactttttattgtacgctgggtgggctgaaggccgtgatctggaccgacgtgtttcaggtggggatcatggtagctggattcgcttccgtgatcattcaagctgttgtaatgcaaggtggcatatctaccattctcaacgacgcatatgatggcggccgcctaaacttctggaatttcaacccaaatccactgcaacgccacaccttctggactatcattataggaggaacgttcacgtggacaagtatttacggtgtcaaccagagccaagttcagaggtatatcagttgtaaaagcaggtttcaggctaagctgagtctgtatatcaatctggtgggcttgtgggcaatactcacatgctccgtcttttgcgggctcgcactgtattcacggtatcacgactgtgacccatggaccgctaagaaggtcagtgcccccgatcagctgatgccctatctggtactggacattttgcaggattatccaggccttcctggactcttcgttgcctgtgcctactccggaacactgagcacagtgagtagctctattaatgctttggctgccgtcaccgtggaggatctcatcaagccatacttcagaagtttaagcgagagatccttgtcatggataagtcagggaatgtctgtggtctacggcgcactctgcattgggatggccgccctggcttctttaatgggcgcactgttacaggcagccctgagcgttttcggcatggttggggggcccttaatggggctatttgccctaggcatactggtgccattcgccaattctattggtgccctggtcgggcttatggctggcttcgcgatatctctgtgggtaggaatcggcgcacagatttatccgcctttgcccgagaggacactgcctcttcatctcgatatacagggttgtaattccacatataacgaaacaaatctgatgaccaccaccgaaatgccttttacgactagcgtgtttcagatttataatgtgcaacgcaccccgttgatggacaactggtacagtctgtcgtacctgtatttctcaacggtgggaacccttgtgacactgctggtcggcatactcgtctctcttagtaccggagggagaaaacaaaatctggatccccgatatatcctaaccaaggaagatttcctaagtaactttgatatcttcaagaaaaagaaacacgttctgtcttacaagagtcacccggtggaagatggaggcactgataatcctgcttttaaccatattgagttgaatagtgaccaaagcgggaagtccaacggtacaaggttgtag

SEQ ID NO: 242004 - DNA, 1833 bp, Artificial Sequence
  derived and/or modified sequence
atggatacacctcgcggtatcggcacgttcgttgtgtgggactacgtggtcttcgccggtatgctcgtgatctccgccgcaattgggatttactacgcatttgccggtggtggacagcagacttcaaaggatttcctcatggggggaagaagaatgacagccgttcccgttgcgctgagcctcaccgctagcttcatgtcagccgtcacagtgctgggcactccatccgaagtctataggtttggagcgatattcagtatatttgcctttacatacttctttgtggtagttatctctgcagaggtgtttctccctgtgttttataagttgggcattacaagcacctatgagtatctggagctacgctttaataaatgtgtaaggctctgcgggaccgttctcttcatagtacagaccatcctgtacaccggcattgtgatatatgcacccgcactggcattaaaccaagtcactggctttgacctctggggtgccgtggtggcaaccggcgtggtttgtactttctactgcacactgggcggtctcaaggctgtgatctggacagacgtgtttcaagtggggattatggtggccggatttgccagtgttatcatacaggcggtcgtgatgcaaggcggaattagcaccattctgaatgacgcatatgacggcggacggcttaatttttggaattttaaccccaaccctcttcagcgccacacattctggactattattatcggtggcactttcacatggaccagcatttatggggtgaaccagtcccaggtacaaagatatatcagctgcaagtcccgatttcaggccaaactatcgctgtacattaacttagttggcctctgggccatcctcacctgcagcgtcttctgcggccttgcactgtatagtcggtatcacgattgtgacccttggactgccaaaaaagtcagcgcacctgaccaactcatgccttacctagttctagacattttgcaagattatcccggactccctggattgttcgtggcgtgcgcctacagtgggacactaagcaccgttagcagcagcattaatgccttagccgcagtgacagtcgaagatctgatcaaaccatacttccggagcctgagcgaacggagccttagttggatcagccaaggcatgtcagtggtgtacggagccctatgcataggcatggcagctctcgcgtccctgatgggggctctgctgcaggccgctctatctgtttttgggatggtaggagggcctttgatgggtctgttcgcactggggatcctggttccttttgcgaattctatcggcgctctggtcgggctgatggccggatttgcaatctccttatgggttggaatcggagctcagatctatccccctctgcccgaacgtaccttgccccttcatctggatatacaaggctgtaattcaacctacaacgaaaccaatctgatgacaacgaccgaaatgccctttactacttccgtcttccaaatttacaatgtgcagcgaactcctcttatggacaattggtattccttaagctacctgtactttagcaccgtgggaaccctggtgaccttgctagtggggattctcgttagcctaagcactgggggaagaaagcagaacctggacccaagatacatccttactaaggaagattttttgtcgaacttcgatatttttaagaaaaagaagcatgtgctgtcttataaaagccatcctgtggaagatggcggtactgacaaccctgctttcaatcacattgaattgaatagcgatcagtccgggaaatcaaacgggacccgactctag

SEQ ID NO: 242005 - DNA, 4178 bp, Artificial Sequence
  derived and/or modified sequence
attaacctatcaaataaggcagtctaaaaactccaggcgtccctttccgtaaggacccggactgttgaactggaaagctaaaattcaaggcgtgacaattgccctttgtcccacattcctccaccggtcgcctgcttatttaaatggtgcgtcccctcgggtaccacttgaacaaaacctgcccagagcgctccctgtgtagattcgctggaagcagctggaggctccagttctcatctgctcaggtgtccccggcgccttggcgaactcggccactccagttcctcacgtggtgagcactcagggcagcgggtcgattttccgaggtcccatacctgggtttgaggggcgcggctcgcagcggcgggtgcaggggcgactgccagccctcaccccgcctcggggtgcgttcggaggccgacacctggaggacgcctccagtccccgcgggacgccacgcctgcgcgccagggatccgggataagaagtgcgcgccgggctccggctgcgcgccgcggggccaccagtttgcgcgcagggctcaggcgaccgtgcggccatggacacgccacggggcatcggcaccttcgtggtgtgggactacgtggtgttcgcgggcatgctggtcatctcggccgccatcggcatctactacgccttcgctgggggcggccagcagacctccaaggacttcctgatgggcggccgcagaatgaccgcagtgcccgtggcgctgtccctcaccgctagcttcatgtcagccgtcactgtcctgggcaccccctccgaggtctaccgttttggggccatttttagcatctttgccttcacctacttctttgtggtggtcatcagcgcggaggtcttcctcccggtgttctacaaactgggaattaccagcacctacgagtatttagaacttcgatttaacaaatgtgttcgtctctgtggaacagtcctcttcattgttcaaacaattctgtatactggaattgttatttatgcccctgccctggctttgaatcaagtcacaggatttgatctgtggggcgcggtagtggcaacgggggtggtctgcacattctactgcacactgggtggtcttaaagcagttatctggacagatgtttttcaagttgggatcatggtggctggatttgcatccgtgattatacaggctgtggtgatgcaaggtggaatcagcactattttaaatgatgcctatgatggtggaagattaaatttctggaattttaatcctaaccctttgcaaagacacaccttctggacaattattataggagggaccttcacatggaccagcatctacggtgtcaaccaatcccaggtgcagagatatatttcttgtaaaagcagattccaggcaaaactgtctctctacatcaatcttgtgggactctgggcaatcctcacatgctcagtgttttgtgggctcgccctatattccaggtaccatgactgtgatccttggacagccaagaaagtgtctgcaccagaccagctcatgccttatttggtactggacattctgcaagattatccaggacttcctggactttttgtggcctgtgcttacagtgggacattaagcacagtgtcctccagtattaatgccttagcagcagtaactgtggaagatctaatcaaaccttacttcagatcgctctcagaaaggtctctgtcttggatttcccaaggaatgagtgtggtgtatggagccctgtgtattggaatggctgcgctggcgtcacttatgggagctttgttgcaggcagcactcagcgtatttggtatggttggtggaccacttatgggcctgttcgctttgggcattttggttccctttgccaactcaattggagcacttgttggtctgatggctggatttgccatttctctatgggttggaattggagctcaaatatatcctccacttcctgagagaacattgccattgcaccttgatatccaaggctgtaacagcacctacaatgagacaaatttgatgacaaccacagaaatgccatttactactagtgtttttcaaatatacaatgttcaaaggactccactgatggataactggtattctttatcatatctgtacttcagcactgttggaactttggtaacattattagtggggatacttgtcagtttatcaacaggaggaagaaaacagaacttagaccccagatacatactaaccaaagaggactttttatccaattttgatatttttaagaaaaagaagcatgttttgagctataaatcacatccagtggaagatggtggaactgataatcctgctttcaaccacattgaattgaactcagatcagagtggcaagagcaatgggactcgtttgtgaagctgctctgatactagatatccttaaatgatgtttcaattttatatgttttctaagataattggatcaggttttctttgtgtgtgtgtgtgtgttgtatcatgagtgtttgggggataagtttttgttaaaacaaagtctggactatcttcatttactacatcattaattgatgttactctggagtttagaattctggcattgacatttccctctctttcctttatttcgatgaagctataattgtgaaaattgtaactacatagatgctgaaaggctaatacacacatatgcacatgtatttgattgtcaaaggtatattcttaaatttgggtattattgaaaatattttccatgccttggtgctagcatataagtttggaagtttgccaacatcacaattcatcttgaaaagagcttttttccctcctaccacatacaccattcttagggagcaatgaggtaacaggtctgtgttgtctagatctttgctttttatccccctatcagtccagggcatatactaacctgcaaactgattctgaatcaggaaggtggtaatcaataagtattctggctgggaaagaccgtgggcccaatgatcaaagtcttcttggtgctgttcattaattcttgtgccttttggcttgttttctagagtttctgggctttggctgctgatactgcctttcttagactgtaatttttatctgcatgcccagtttctgacctatcaacttgggttttattgtgcactctaactgagcttgtcttcataattttctgtttattgccctgggcttggatatgtctcaagacactcatgtgaatcatgccaccccaaatcctggcttatcaagtcccagactataaattatgaactcccattagcttggtactaacatatacttgatgtaggtatttatggacttgatgatccaagaatattatattcttcaaaatggttaagctccatggagttagatgactacacttaatgctattaagttgaacttttgaatgtcaactaatttgcaatcaattaaagatacatatgcctagaaattttgaaatttcggtatatttatccagttaaagggctaaattatataagcaaacactactttttttaaaacgtctggactcaaaaaatgctttgttccatgttttaaaatttttaagtagcagtctcaaagttgcttagctgtttattttgctatgttcctagctaagagtttggttataggagttcatcaataacttattttttgtacagttcccacattagatactgtttaaaagttcttttttaaactcaattttttttagaaacataagagaaatatttagatacatacaaatgtttttatgattaaataattttatgcttattttctgatacgtgttatttaggtaatcatgccctgtacatttagaggttgctaactgacaatgttaagaaatttaaaaaaaaaaaaaagcctgggcatgatggctcatgcttgtaatctgaacatttgggaggctgaggcaggaagatcgcttgaggtccagagtttaagtccagcctggaaacatagttagacctcatctctacaaaaataaaaaataaaaataaaaaaaacttagctaggcatgttgccacatacttgtagtcccagttattagggaagctgaggtgggaggatagcttaagcccaggatttcaaggctgcattgagctatgattacaccactgcactccagcctgggtaacagagtgaaatcttgtctctgggaaaaaaaa

SEQ ID NO: 242006 - protein, 1308 aa, Artificial Sequence
  derived and/or modified sequence
MDPSGSRGRPTWVLAGGLLAVALALGGRGCLGASSRPRWRPLGAQPPRDPQVAPRSGPGLRIPPGRSGAGPESSTQDLPCMIWPKVECCHFKTAVEAPLGMKLDKKMEVFIPLSTSAASSGPWAHSLFAFIPSWPKKNLFKRESPITHRLYGDISREVQGTSENGVIFQKCALVSGSSEAQTARIWLLVNNTKTTSSANLSELLLLDSIAGLTIWDSVGNRTSEGFQAFSKKFLQVGDAFAVSYAATLQAGDLGNGESLKLPAQLTFQSSSRNRTQLKVLFSITAEENVTVLPHHGLHAAGFFIAFLLSLVLTWAALFLMVRYQCLKGNMLTRHRVWQYESKLEPLPFTSADGVNEDLSLNDQMIDILSSEDPGSMLQALEELEIATLNRADADLEACRTQISKDIIALLLKNLTSSGHLSPQVERKMSAVFKKQFLLLENEIQEEYDRKMVALTAECDLETRKKMENQYQREMMAMEEAEELLKRAGERSAVECSNLLRTLHGLEQEHLRKSLALQQEEDFAKAHRQLAVFQRNELHSIFFTQIKSAIFKGELKPEAAKMLLQNYSKIQENVEELMDFFQASKRYHLSKRFGHREYLVQNLQSSETRVQGLLSTAAAQLTHLIQKHERAGYLDEDQMEMLLERAQTEVFSIKQKLDNDLKQEKKKLHQKLITKRRRELLQKHREQRREQASVGEAFRTVEDAGQYLHQKRSLMEEHGATLEELQERLDQAALDDLRTLTLSLFEKATDELRRLQNSAMTQELLKRGVPWLFLQQILEEHGKEMAARAEQLEGEERDRDQEGVQSVRQRLKDDAPEAVTEEQAELRRWEHLIFMKLCSSVFSLSEEELLRMRQEVHGCFAQMDRSLALPKIRARVLLQQFQTAWREAEFVKLDQAVAAPELQQQSKVRKSRSKSKSKGELLKKCIEDKIHLCEEQASEDLVEKVRGELLRERVQRMEAQEGGFAQSLVALQFQKASRVTETLSAYTALLSIQDLLLEELSASEMLTKSACTQILESHSRELQELERKLEDQLVQQEAAQQQQALASWQQWVADGPGILNEPGEVDSERQVSTVLHQALSKSQTLLEQHQQCLREEQQNSVVLEDLLENMEADTFATLCSQELRLASYLARMAMVPGATLRRLLSVVLPTASQPQLLALLDSATERHVDHAAESDGGAEQADVGRRRKHQSWWQALDGKLRGDLISRGLEKMLWARKRKQSILKKTCLPLRERMIFSGKGSWPHLSLEPIGELAPVPIVGAETIDLLNTGEKLFIFRNPKEPEISLHVPPRKKKNFLNAKKAMRALGMD

SEQ ID NO: 242007 - protein, 1246 aa, Artificial Sequence
  derived and/or modified sequence
MDPSGSRGRPTWVLAGGLLAVALALGGRGCLGASSRPRWRPLGAQPPRDPQVAPRSGPGLRIPPGRSGAGPESSTQDLPCMIWPKVECCHFKTAVEAPLGMKLDKKMEVFIPLSTSAASSGPWAHSLFAFIPSWPKKNLFKRESPITHRLYGDISREVQGTSENGVIFQKCALVSGSSEAQTARIWLLVNNTKTTSSANLSELLLLDSIAGLTIWDSVGNRTSEGFQAFSKKFLQVGDAFAVSYAATLQAGDLGNGESLKLPAQLTFQSSSRNRTQLKVLFSITAEENVTVLPHHGLHAAGFFIAFLLSLVLTWAALFLMVRYQCLKGNMLTRHRVWQYESKLEPLPFTSADGVNEDLSLNDQMIDILSSEDPGSMLQALEELEIATLNRADADLEACRTQISKDIIALLLKNLTSSGHLSPQVERKMSAVFKKQFLLLENEIQEEYDRKMVALTAECDLETRKKMENQYQREMMAMEEAEELLKRAGERSAVECSNLLRTLHGLEQEHLRKSLALQQEEDFAKAHRQLAVFQRNELHSIFFTQIKSAIFKGELKPEAAKMLLQNYSKIQENVEELMDFFQASKRYHLSKRFGHREYLVQNLQSSETRVQGLLSTAAAQLTHLIQKHERAGYLDEDQMEMLLERAQTEVFSIKQKLDNDLKQEKKKLHQKLITKRRRELLQKHREQRREQASVGEAFRTVEDAGQYLHQKRSLMEEHGATLEELQERLDQAALDDLRTLTLSLFEKATDELRRLQNSAMTQELLKRGVPWLFLQQILEEHGKEMAARAEQLEGEERDRDQEGVQSVRQRLKDDAPEAVTEEQAELRRWEHLIFMKLCSSVFSLSEEELLRMRQEVHGCFAQMDRSLALPKIRARVLLQQFQTAWREAEFVKLDQAVAAPELQQQSKVRKSRSKSKSKGELLKKCIEDKIHLCEEQASEDLVEKVRGELLRERVQRMEAQEGGFAQSLVALQFQKASRVTETLSAYTALLSIQDLLLEELSASEMLTKSACTQILESHSRELQELERKLEDQLVQQEAAQQQQALASWQQWVADGPGILNEPGEVDSERQVSTVLHQALSKSQTLLEQHQQCLREEQQNSVVLEDLLENMEADTFATLCSQELRLASYLARMAMVPGATLRRLLSVVLPTASQPQLLALLDSATERHVDHAAESDGGAEQADVGRRRKHQSWWQALDGKLRGDLISRGLEKMLWARKRKQRSGNQESFWQYLVGTPEIGLIEWMSEK

SEQ ID NO: 242008 - DNA, 3927 bp, Artificial Sequence
  derived and/or modified sequence
atggatccctctgggtcgaggggtcgtccaacttgggtactggctgggggccttttagctgttgctcttgcactgggcggccgcggttgtttgggggctagtagcagaccacgctggcgccctctcggggctcagcctccccgggatccccaggttgctcctaggtccggccccgggctgagaatcccgcctggaaggtcaggggccgggcctgagtcatccacccaggacttgccctgcatgatttggcccaaggtcgagtgctgccactttaagactgcagtcgaggccccacttggcatgaagctagacaagaaaatggaggtgtttatccctcttagtacttctgctgcctccagcggtccatgggcacatagcctcttcgcctttatacccagctggcccaagaagaatttgttcaagcgcgaaagcccgatcacgcataggctttacggggatatctcccgggaggttcagggtacgagtgagaacggagtcatcttccagaagtgcgctctggtgagtggctcatctgaggctcagaccgccaggatttggcttttagtgaacaacactaagacaactagctccgccaacctgtcagagctgctgcttctggatagcatcgcgggactaacaatatgggatagcgttggcaaccggacgtccgagggtttccaggcgttctcaaaaaagtttttacaagtgggtgatgccttcgccgtgtcctacgctgctacattgcaagcgggggatcttggaaatggcgaatctcttaagctccctgctcagctgactttccagtcttcttcccggaatcgaacccagctcaaggtgcttttctcaattactgcagaagaaaatgtgactgtgctgccccatcatggcttgcacgctgccgggttcttcattgcgtttcttctgtctctggtactgacatgggccgccctttttctaatggtacgatatcagtgcttgaagggcaatatgcttacacgccacagagtttggcagtatgagtctaaactggagcccttgcccttcacgtcggccgatggagtgaacgaggacttgagtctgaatgatcaaatgatagatatcctgagctcagaagaccctggctctatgctccaggctctggaagaacttgaaatcgctacactgaatcgtgccgacgccgacttggaggcttgtaggacccagatcagcaaagatatcatcgctctgctgctgaagaatctgacttcttccggacacctaagcccccaggtggagcgaaaaatgagtgctgtttttaagaagcagtttctgcttcttgagaacgagattcaagaggaatatgaccgaaaaatggtcgccttaacagcagagtgcgacctggagacgcggaagaaaatggagaatcagtaccagcgtgaaatgatggctatggaggaggccgaggaacttctgaaaagggcaggcgaacgaagtgctgtcgagtgtagcaatctcttgagaaccctgcacgggctggaacaagaacacctccgcaagtcgctcgctctccagcaggaagaagactttgctaaggcgcataggcagctggcagtgttccaacgaaacgaacttcattcaatcttcttcacgcagataaagtctgctatatttaagggtgaattgaaacctgaggctgctaaaatgctgttgcaaaattactctaagattcaggagaatgtggaagagctgatggacttctttcaggctagcaagcggtaccacctttcaaagagatttggacacagagaataccttgtccagaatctacagagctcagagacacgagtgcagggcctgctgtctaccgcagccgcgcagctgacacatctgatccaaaagcacgaacgagccggctacctcgatgaagaccaaatggagatgctcctggaaagggcacaaacggaagtcttttcaatcaaacagaaacttgacaacgatcttaaacaagaaaagaagaaactacaccagaaattaattactaagaggcgtcgcgaacttttgcaaaagcatagagagcaacgcagagaacaggcttccgtcggtgaagcattcaggacagtcgaagacgccggccagtacctgcatcagaagaggagcttaatggaggaacacggcgccaccctggaggagctgcaggaaagactggaccaggccgctctcgacgatcttaggactcttaccttgagcttgttcgaaaaagctacggacgagctgaggagactgcagaactctgcaatgactcaggagcttttgaagaggggggtgccatggcttttcttgcaacaaatactggaagagcacggtaaggagatggccgctcgggcggagcagctggaaggggaggaacgggacagggaccaggaaggagtgcaatctgtgaggcaacgcctgaaagacgacgctcctgaggccgtgactgaagagcaagccgaactccgcagatgggagcatctgatctttatgaagctgtgttccagcgtattctctctgtccgaggaagagctgctcagaatgcgacaggaggtgcatggctgtttcgctcagatggaccgaagccttgccctcccgaagatccgggcacgtgttcttctgcagcagttccagaccgcctggcgggaagcggagtttgtaaagctggaccaggccgtggccgctcccgaactccagcaacagtcaaaagtgaggaagagcaggtcgaaaagcaaatccaaaggcgaacttctaaagaagtgcatcgaggataaaatccacctttgtgaggagcaggcttcggaagaccttgtggagaaggtcaggggggaactccttcgggagagggtgcagcggatggaagctcaggagggcggtttcgcccagagtctggttgcattgcagttccagaaggcttccagagtgacagagacactctccgcttacacagccctgctgtcaattcaggacctgctattagaggagcttagcgcttctgagatgctgaccaaatcagcttgtacccaaatcctggaatcccattcaagagagctccaggaactagaacggaaactggaagaccagctcgtgcaacaggaagccgcacagcagcagcaggcgctggcttcttggcagcaatgggtggcagatggccccgggattttgaatgaaccaggcgaggttgacagcgagcgccaggtctccaccgtgcttcaccaagccctgtccaagtctcaaacattacttgagcagcaccaacagtgcctgcgggaggagcaacagaactccgtggtgcttgaagaccttctggaaaatatggaagccgacacattcgctacattgtgcagtcaggaactgagattggctagttacctggccaggatggcaatggttcctggtgctaccctgaggcgtttgttgtctgtggtgttacctactgcctctcagccacaactcctggctctcctcgatagcgcaactgagcggcatgtggatcacgcagccgaatccgatggtggcgctgagcaggctgacgtcggccggcgccgtaagcaccagtcctggtggcaggcgttggacggtaaactgcgtggcgatctgatctcccgcggactggaaaaaatgctctgggcccgaaagcgcaagcagtctattttaaaaaaaacgtgtctacccctccgggagagaatgatcttcagtgggaaaggctcttggccgcacctaagtctggaacccataggcgaattggcccccgttccgattgtgggagctgaaactatcgacctgctgaacaccggggagaagctgtttatcttcaggaacccaaaggagcccgaaatcagtttgcacgtcccgcctcgaaagaagaagaacttcctgaatgccaaaaaggcaatgcgagcactgggcatggattag

SEQ ID NO: 242009 - DNA, 3741 bp, Artificial Sequence
  derived and/or modified sequence
atggacccgagcggaagccgtggaaggccaacatgggtactggcgggcggacttttggccgtggccctagctctcggcggacgcggctgtctgggggcctcttcgcgaccccgttggcgcccattaggggcacagccgcctcgagatccccaagtggctccaagatccggccctgggctacgtataccgcctggcagaagtggggccggcccagaatcctccactcaagacctcccgtgcatgatctggcccaaggttgaatgttgtcattttaagacagctgtcgaggcacctctggggatgaagctggataaaaagatggaggttttcattccactgtctacctccgccgcctctagtggtccttgggcccacagcttgttcgcattcattcccagttggccaaagaagaacctgtttaagcgagagtcccctatcacacaccgcctgtacggcgatatctctcgagaggtgcagggcacgagcgaaaacggtgtgatcttccagaagtgtgcgctcgtgtcaggctcctccgaggcgcagactgctcgaatttggctgctggtaaacaatacaaagacaacatcctcagccaatctctccgagctcctcctgctggactcaatagccggcctcactatatgggatagtgtgggcaacagaaccagcgaaggctttcaggccttttccaagaagtttcttcaagtgggggacgcttttgccgtgagttatgctgctacactccaggccggtgacctaggaaatggggagtcacttaagctgcccgcgcagctaacctttcagtcttcttcgagaaatcggacacagctcaaggtgctattttccattaccgcagaagaaaacgtgactgtgttgccacaccacggactgcatgccgcaggctttttcatcgcctttctgctgagcctggtactcacttgggccgctctcttcctcatggtgagataccagtgtctgaaaggaaatatgctgaccagacacagggtgtggcagtacgagtcaaaactggagccactgcctttcacctccgccgacggagtgaacgaggatctgtcactgaatgaccagatgattgacatactaagtagtgaggatccaggttcgatgctgcaggcactggaagagctggaaatagccacactgaatagggcagatgcagacctcgaagcctgtcggacacaaatctccaaagacatcattgctctcctgctgaaaaatctcacaagtagcggacatctttccccccaggtggagaggaagatgtccgccgtatttaagaaacagtttttgttgttggaaaacgaaattcaggaggagtacgatagaaagatggtcgccttgacggctgagtgcgatctggagaccaggaagaagatggagaaccagtaccagcgtgaaatgatggccatggaggaagccgaggaattactgaagagggccggcgagagatcagccgtcgagtgctccaaccttctccgcacccttcatggcctggaacaggaacatctgaggaagagccttgcgttgcaacaggaggaggattttgcaaaggcccacaggcagctggccgtttttcagagaaatgagcttcattcaattttttttacgcagatcaagagtgcgatttttaagggggagctcaaaccagaagccgccaagatgctgctccagaattattctaaaattcaggagaatgttgaagagcttatggacttcttccaagcttccaagaggtatcacttgtccaaacggtttggccatagggaatatctcgtacagaatctacaaagcagcgaaactagagtacaaggtctactgagcacggcagcagcccagctcacgcacttgatccagaagcacgagcgcgcaggttacctggacgaggaccagatggagatgctcctagagcgagcacagacagaggtcttcagcatcaagcagaagctcgataacgacttaaagcaggaaaaaaagaaactgcaccagaagctgattaccaaaaggaggcgcgagctgttacagaaacatcgtgagcagcggcgcgagcaagcttcagtgggtgaagcatttagaacagtggaagacgccggtcagtacctgcaccagaaacgcagcctcatggaagagcatggtgccaccctcgaagagttgcaggagaggctggaccaggctgctcttgacgatttgcgcaccttgactctaagtctcttcgagaaggcaaccgacgagttgcgaagacttcagaattccgccatgacccaggagctccttaagcgcggcgtgccatggttgttccttcagcagatcctggaggagcacggaaaagagatggccgctagggccgaacaactggaaggcgaggaacgggaccgggaccaggaaggcgtccagtctgtgagacagcggctgaaggacgatgctcccgaggctgttacagaggagcaggccgagctccgccgctgggagcatctaattttcatgaagctgtgcagcagcgtattctccttgtcagaagaagaactgctgcgtatgcgacaggaagttcacggatgtttcgctcagatggatagatccctggctctgcccaagattagagcgagggtcttgctgcagcagtttcagacagcctggcgagaagctgagttcgtaaagttggaccaggcagtagccgcaccagagctgcagcagcagtccaaagtcaggaagtctcggtctaaaagcaagagcaagggcgagctgctcaagaaatgtatcgaagacaaaattcatctctgcgaagaacaggccagcgaagatttggtggagaaagtcaggggagagttattaagagaacgggtgcaacgcatggaggcgcaagagggaggtttcgctcagtcacttgtggccctgcagttccagaaggcctctagagtgaccgagaccctgagcgcttacacggcactgctgtctattcaggacttactgctggaggaattgtcagcgtccgagatgcttaccaagtccgcctgcacccagattctggaatcacactctagggagctgcaggaattagagcgcaagttagaggaccagctggtacagcaggaggcggcccagcagcagcaggctctagcaagctggcagcagtgggtggcagacggcccaggcatcctgaacgaacctggagaggttgatagtgagaggcaggtctccaccgttttgcaccaagctctgagtaaatcacaaacactgttggagcagcatcagcagtgtctgagagaagagcaacagaatagcgtagtactggaagacctgctcgagaatatggaagccgacacattcgctacgctctgttcccaagaactgcgcctagccagctatttggccagaatggcgatggtgccaggggcaacattgcgcagactactctctgtggtgttacccacagccagccagcctcagttactggccctgctggacagcgctaccgagcggcatgtggatcatgctgccgagtccgacggcggagcggaacaggcagacgtcggcaggcgccgaaagcatcagagctggtggcaggcgctggatgggaagcttcggggtgatctcatctcacgaggactagagaagatgctttgggcgaggaagaggaaacagcgatccggtaaccaggaaagcttctggcagtacctggtggggacccccgaaatcggtcttattgaatggatgtcagagaaatag

SEQ ID NO: 242010 - DNA, 3927 bp, Artificial Sequence
  derived and/or modified sequence
atggaccccagcggcagccggggccggcccacctgggtgctggccggcggcctgctggccgtggccctggccctgggcggccggggctgcctgggcgccagcagccggccccgctggaggcccctgggcgcccagcccccccgggacccccaggtggcccccaggagcggccctggcctgcgcatccccccaggccgctctggagctggccctgagagcagcacccaggacctgccctgcatgatctggcccaaggtggagtgctgccacttcaagacagctgtggaggcccccctgggcatgaagctggacaagaagatggaggtgttcatccccctgagcaccagcgctgccagcagcggcccctgggcccacagcctgtttgccttcatccccagctggcccaagaagaacctcttcaagcgggagagccccatcacccaccggctgtatggagacatcagccgggaggtgcagggcaccagtgaaaatggagtcatcttccagaagtgtgccctggtgtctggcagcagcgaggcccagacagcccgcatctggctgctggtgaacaacaccaagaccaccagcagcgccaacctgtctgagctgctgctgctggacagcattgctggcctgaccatctgggacagcgtgggcaacagaacatctgagggcttccaggccttcagcaagaagttcctgcaggtgggagatgcctttgctgtgtcctatgctgccaccctgcaggccggggacctgggcaatggagagagcctgaagctgcctgcccagctgaccttccagagcagcagcaggaacagaacccagctgaaggtgctcttcagcatcacagcagaagaaaatgtgacagtgctgccccaccacggcctgcatgctgctggcttcttcatcgccttcctgctgagcctggtgctgacctgggccgccctcttcctgatggtgcgctaccagtgcctgaagggcaacatgctgaccaggcaccgggtgtggcagtatgagagcaagctggagcccctgcccttcaccagcgcagatggagtgaatgaagacctgagcctgaatgaccagatgattgacatcctgagcagtgaagatcctggctccatgctgcaggccctggaggagctggagatcgccaccctgaacagagcagatgctgacctggaggcctgcaggacccagatcagcaaggacatcatcgccctgctgctgaagaacctgaccagcagcggccacctgagcccccaggtggagaggaagatgtctgctgtgttcaagaagcagttcctgctgctggagaatgagatccaggaggagtatgacaggaagatggtggccctgacagcagaatgtgacctggagaccaggaagaagatggagaaccagtaccagcgggagatgatggccatggaggaggccgaggagctgctgaagagagctggggagaggtctgctgtggagtgcagcaacctgctgcggaccctgcacggcctggagcaggagcacctgaggaagagcctggccctgcagcaggaggaggactttgccaaggcccaccggcagctggccgtgttccagagaaatgagctgcacagcatcttcttcacccagatcaagagcgccatcttcaagggggagctgaagccagaggccgccaagatgctgctgcagaactacagcaagatccaggagaatgtggaggagctgatggacttcttccaggccagcaagcgctaccacctgagcaagcgcttcggccaccgggagtacctggtgcagaacctgcagagcagcgagaccagggtgcagggcctgctgagcacagctgctgcccagctgacccacctgatccagaagcatgagcgggccggctacctggatgaggaccagatggagatgctgctggagcgggcccagacagaggtgttcagcatcaagcagaagctggacaatgacctgaagcaggagaagaagaagctgcaccagaagctgatcaccaagagaagaagagagctgctgcagaagcaccgggagcagaggcgggagcaggcctctgtgggggaggccttcagaacagtggaggatgctggccagtacctgcaccagaagaggagcctgatggaggagcacggggccaccctggaggagctgcaggagcggctggaccaggccgccctggatgacctgcggaccctgaccctgagcctgtttgagaaggccacagatgagctgcggcggctgcagaacagcgccatgacccaggagctgctgaagaggggcgtgccctggctgttcctgcagcagatcctggaggagcacggcaaggagatggccgcccgggcagagcagctggagggggaggagcgggaccgggaccaggagggcgtgcagagcgtgcggcagaggctgaaggatgatgcccctgaggccgtgacagaggagcaggccgagctgcggcgctgggagcacctgatcttcatgaagctgtgcagctctgtgttcagcctgtctgaggaggagctgctgaggatgaggcaggaggtgcacggctgctttgcccagatggacaggagcctggccctgcccaagatccgggcccgggtgctgctgcagcagttccagacagcctggagggaggccgagtttgtgaagctggaccaggccgtggccgcccctgagctgcagcagcagagcaaggtgaggaagagccgcagcaagagcaagagcaaaggagagctgctgaagaagtgcatcgaggacaagatccacctgtgtgaggagcaggccagcgaggacctggtggagaaggtgcggggggagctgctgcgggagcgggtgcagaggatggaggcccaggagggcggctttgcccagagcctggtggccctgcagttccagaaggccagccgggtgacagagaccctgagcgcctacacagccctgctgagcatccaggacctgctgctggaggagctgagcgccagcgagatgctgaccaagagcgcctgcacccagatcctggagagccacagccgggagctgcaggagctggagaggaagctggaggaccagctggtgcagcaggaggccgcccagcagcagcaggccctggcctcctggcagcagtgggtggctgatggccctggcatcctgaatgaacctggagaggtggacagcgagcggcaggtgtccacagtgctgcaccaggccctgagcaagagccagaccctgctggagcagcaccagcagtgcctgcgggaggagcagcagaacagcgtggtgctggaggacctgctggagaacatggaggccgacacctttgccaccctgtgcagccaggagctgcggctggccagctacctggccaggatggccatggtgcctggggccaccctgcggcggctgctgtctgtggtgctgcccacagccagccagccccagctgctggccctgctggacagcgccacagagcggcacgtggaccacgccgctgagagtgatggcggcgctgagcaggctgatgtgggcagaagaaggaagcaccagagctggtggcaggccctggatggcaagctgcggggggacctgatcagccggggcctggagaagatgctgtgggccaggaagaggaagcagagcatcctgaagaagacctgcctgcccctgcgggagaggatgatcttcagcggcaagggctcctggccccacctgagcctggagcccatcggggagctggcccctgtgcccatcgtgggcgctgagaccatcgacctgctgaacacaggagagaagctgttcatcttcaggaaccccaaggagcctgagatcagcctgcacgtgccccccaggaagaagaagaacttcctgaatgccaagaaggccatgagggccctgggcatggactag

SEQ ID NO: 242011 - DNA, 3741 bp, Artificial Sequence
  derived and/or modified sequence
atggaccccagcggcagccggggccggcccacctgggtgctggccggcggcctgctggccgtggccctggccctgggcggccggggctgcctgggcgccagcagccggccccgctggaggcccctgggcgcccagcccccccgggacccccaggtggcccccaggagcggccctggcctgcgcatccccccaggccgctctggagctggccctgagagcagcacccaggacctgccctgcatgatctggcccaaggtggagtgctgccacttcaagacagctgtggaggcccccctgggcatgaagctggacaagaagatggaggtgttcatccccctgagcaccagcgctgccagcagcggcccctgggcccacagcctgtttgccttcatccccagctggcccaagaagaacctcttcaagcgggagagccccatcacccaccggctgtatggagacatcagccgggaggtgcagggcaccagtgaaaatggagtcatcttccagaagtgtgccctggtgtctggcagcagcgaggcccagacagcccgcatctggctgctggtgaacaacaccaagaccaccagcagcgccaacctgtctgagctgctgctgctggacagcattgctggcctgaccatctgggacagcgtgggcaacagaacatctgagggcttccaggccttcagcaagaagttcctgcaggtgggagatgcctttgctgtgtcctatgctgccaccctgcaggccggggacctgggcaatggagagagcctgaagctgcctgcccagctgaccttccagagcagcagcaggaacagaacccagctgaaggtgctcttcagcatcacagcagaagaaaatgtgacagtgctgccccaccacggcctgcatgctgctggcttcttcatcgccttcctgctgagcctggtgctgacctgggccgccctcttcctgatggtgcgctaccagtgcctgaagggcaacatgctgaccaggcaccgggtgtggcagtatgagagcaagctggagcccctgcccttcaccagcgcagatggagtgaatgaagacctgagcctgaatgaccagatgattgacatcctgagcagtgaagatcctggctccatgctgcaggccctggaggagctggagatcgccaccctgaacagagcagatgctgacctggaggcctgcaggacccagatcagcaaggacatcatcgccctgctgctgaagaacctgaccagcagcggccacctgagcccccaggtggagaggaagatgtctgctgtgttcaagaagcagttcctgctgctggagaatgagatccaggaggagtatgacaggaagatggtggccctgacagcagaatgtgacctggagaccaggaagaagatggagaaccagtaccagcgggagatgatggccatggaggaggccgaggagctgctgaagagagctggggagaggtctgctgtggagtgcagcaacctgctgcggaccctgcacggcctggagcaggagcacctgaggaagagcctggccctgcagcaggaggaggactttgccaaggcccaccggcagctggccgtgttccagagaaatgagctgcacagcatcttcttcacccagatcaagagcgccatcttcaagggggagctgaagccagaggccgccaagatgctgctgcagaactacagcaagatccaggagaatgtggaggagctgatggacttcttccaggccagcaagcgctaccacctgagcaagcgcttcggccaccgggagtacctggtgcagaacctgcagagcagcgagaccagggtgcagggcctgctgagcacagctgctgcccagctgacccacctgatccagaagcatgagcgggccggctacctggatgaggaccagatggagatgctgctggagcgggcccagacagaggtgttcagcatcaagcagaagctggacaatgacctgaagcaggagaagaagaagctgcaccagaagctgatcaccaagagaagaagagagctgctgcagaagcaccgggagcagaggcgggagcaggcctctgtgggggaggccttcagaacagtggaggatgctggccagtacctgcaccagaagaggagcctgatggaggagcacggggccaccctggaggagctgcaggagcggctggaccaggccgccctggatgacctgcggaccctgaccctgagcctgtttgagaaggccacagatgagctgcggcggctgcagaacagcgccatgacccaggagctgctgaagaggggcgtgccctggctgttcctgcagcagatcctggaggagcacggcaaggagatggccgcccgggcagagcagctggagggggaggagcgggaccgggaccaggagggcgtgcagagcgtgcggcagaggctgaaggatgatgcccctgaggccgtgacagaggagcaggccgagctgcggcgctgggagcacctgatcttcatgaagctgtgcagctctgtgttcagcctgtctgaggaggagctgctgaggatgaggcaggaggtgcacggctgctttgcccagatggacaggagcctggccctgcccaagatccgggcccgggtgctgctgcagcagttccagacagcctggagggaggccgagtttgtgaagctggaccaggccgtggccgcccctgagctgcagcagcagagcaaggtgaggaagagccgcagcaagagcaagagcaaaggagagctgctgaagaagtgcatcgaggacaagatccacctgtgtgaggagcaggccagcgaggacctggtggagaaggtgcggggggagctgctgcgggagcgggtgcagaggatggaggcccaggagggcggctttgcccagagcctggtggccctgcagttccagaaggccagccgggtgacagagaccctgagcgcctacacagccctgctgagcatccaggacctgctgctggaggagctgagcgccagcgagatgctgaccaagagcgcctgcacccagatcctggagagccacagccgggagctgcaggagctggagaggaagctggaggaccagctggtgcagcaggaggccgcccagcagcagcaggccctggcctcctggcagcagtgggtggctgatggccctggcatcctgaatgaacctggagaggtggacagcgagcggcaggtgtccacagtgctgcaccaggccctgagcaagagccagaccctgctggagcagcaccagcagtgcctgcgggaggagcagcagaacagcgtggtgctggaggacctgctggagaacatggaggccgacacctttgccaccctgtgcagccaggagctgcggctggccagctacctggccaggatggccatggtgcctggggccaccctgcggcggctgctgtctgtggtgctgcccacagccagccagccccagctgctggccctgctggacagcgccacagagcggcacgtggaccacgccgctgagagtgatggcggcgctgagcaggctgatgtgggcagaagaaggaagcaccagagctggtggcaggccctggatggcaagctgcggggggacctgatcagccggggcctggagaagatgctgtgggccaggaagaggaagcagaggagcggcaaccaggagagcttctggcagtacctggtgggcaccccagaaattggcctcatcgagtggatgtctgagaagtag

SEQ ID NO: 242012 - DNA, 3927 bp, Artificial Sequence
  derived and/or modified sequence
atggaccccagcggcagccggggccggcccacctgggtgctggccggtggtctgctcgctgttgcccttgcgctcgggggacgaggatgtctgggcgcgtcttcaagaccccggtggcgtccacttggagcccaacctccccgcgatccccaggtcgctcctcgctctggaccaggactgaggatccctcctggcagatctggggcagggcctgagtcctccacgcaggacctaccttgtatgatatggcctaaggtcgagtgttgccactttaaaacagccgttgaagccccgctcggcatgaagctggataaaaaaatggaagtttttatccccctctccacgtctgcagccagctccggcccttgggcacactccttgtttgccttcattccaagttggcctaaaaagaacctctttaaacgcgagagtcctatcacacatagattatatggtgacattagtcgcgaggtccagggaaccagcgaaaatggagtcatattccagaaatgcgctctggtctccggcagttccgaggcccagactgcacgaatctggcttttggttaataacaccaagaccacttcatctgctaacttgtcagaactgctcctgctggactccatcgctgggctcactatctgggacagtgtagggaatcgtaccagtgaaggtttccaggcctttagtaagaagttcctgcaggtgggtgacgcattcgccgtttcatatgctgccaccctccaagctggggatctcgggaacggagaaagtctcaaactgcctgcccagctgacattccagtcatcttctcgaaacagaacccagctgaaggtgttgttctctattacagccgaggagaatgttacagtacttccccatcacggtttacatgccgccggcttcttcatcgctttccttctttccctggtgcttacctgggccgctctatttctgatggtgcgctatcagtgtctgaaaggaaacatgcttaccaggcacagggtgtggcagtacgaatctaaactggagccgctgccctttaccagcgcggatggtgtgaacgaagacttgagtctgaacgaccagatgatagatatcctgtcttccgaagatcccggcagcatgctccaggccctcgaagaactggagatcgcgaccctgaaccgcgcggatgccgatctggaagcctgccgcacacagatctcaaaagatattatcgccttactgctcaagaatttaacctctagtggccacctgtcgcctcaggtggagcgcaagatgtccgctgtcttcaaaaagcagtttcttctgttggagaatgaaatacaggaggagtacgatcgtaagatggttgccctaacagctgagtgcgatctcgagaccaggaagaaaatggaaaatcagtatcagagagaaatgatggcaatggaggaagctgaggagctgctgaagcgcgcaggggaacgctctgccgtggaatgcagtaatctcttgcggacgttacatggtctcgagcaggagcacttgcggaagtctttagccctacagcaagaagaggactttgctaaggctcacagacaacttgccgtgtttcagcgcaatgaactgcattctattttctttacccagatcaagtcagctatttttaagggcgaacttaaacctgaggcagctaagatgctcctgcagaattattcaaagatccaggagaacgtggaagaactaatggatttctttcaggcaagcaagagatatcacttgtccaagaggtttggacatcgtgagtacctcgtgcagaatttgcaaagctcagaaactagggtccagggactgctgagcacggctgctgcgcaactgactcacctgatacaaaagcatgagagggctgggtatttggatgaggatcagatggagatgctattagagcgggcacagactgaggtcttctcaattaagcagaaattggacaacgacctcaagcaggaaaagaaaaagcttcaccaaaaactgataacaaagaggcgcagggaactgcttcaaaagcatcgcgagcaacgtcgtgagcaagccagcgtcggggaggcatttaggaccgtggaagatgccggccagtatctgcaccaaaagagaagcctaatggaagagcacggtgcaacgttggaagaactacaggaacggctagaccaagccgccctggatgatctgagaactctgaccctgagcctgtttgaaaaagccactgacgaacttcgtaggctgcagaatagtgctatgacccaggaacttctaaagaggggtgtcccctggctgtttttgcagcagatccttgaggaacatgggaaagaaatggctgcccgcgcagagcagctcgagggagaggagcgcgatagagatcaggaaggggtgcaaagtgtgaggcagcgcctaaaagacgacgcccccgaagccgtgactgaagagcaggctgagcttcgccggtgggagcatttgatcttcatgaagttatgcagttcagtgtttagtctgagcgaggaagagctccttcgtatgaggcaggaggtgcacgggtgtttcgcccagatggaccgtagccttgctttacctaaaattagggcaagggtgctgctccagcagttccagacagcgtggcgagaggcagaatttgtcaaacttgatcaggcagtggcagcccctgaactgcagcagcaatccaaagtcagaaagtcccgctccaaatctaagagtaaaggagagttgctcaaaaagtgcattgaggataagatccacttatgcgaagagcaggcctcagaggaccttgtggagaaagttagaggggaactgttacgggagagggtgcaacggatggaggcccaggagggggggttcgcccagagcctggttgccctacaatttcagaaagcatcacgggtcaccgagacactctctgcttacacagcccttctttcaatccaggatctgctcctggaagagctatcagcttccgagatgctgaccaaaagcgcgtgtacgcaaatcctcgaaagtcattctcgggagctacaagaactggagagaaaattggaggaccagctagtgcagcaggaagccgcacagcagcagcaggcactggccagttggcagcagtgggtcgcagacgggcctggaatcctaaacgagcccggcgaggtggacagcgagaggcaggttagtaccgtcctgcaccaggctctctccaaatctcagaccctgttggagcagcaccagcagtgcctgagggaagaacaacaaaactccgtcgtcttagaagatctcctagaaaatatggaagccgatacgtttgccaccctatgtagtcaggaactgcgcctcgcgtcttatctggcgaggatggctatggtgcccggggctaccttgcgcagactactgagcgtggtacttcccacagcgagtcagcctcagcttcttgccctgctggactccgccaccgaacgtcatgtggaccatgccgcggagtctgatggaggtgccgagcaagccgacgtcggacggcggagaaagcaccagtcgtggtggcaggccctggatgggaagcttcggggggacttgatatctagaggcctcgaaaagatgctctgggcccggaagaggaaacagtccatcctgaagaagacttgtctacccctgcgggagcgaatgatattttcagggaaagggagctggccgcacctttcattagaacccatcggagagctggccccggttccaatagtcggagcagagaccatcgatcttttgaatactggggaaaaattgtttattttccgcaatcccaaggagccagagatttcactgcatgtccctccaagaaagaagaagaattttctcaatgctaagaaagctatgcgggccctggggatggactag

SEQ ID NO: 242013 - DNA, 3741 bp, Artificial Sequence
  derived and/or modified sequence
atggaccccagcggcagccggggccggcccacctgggtgctggccggagggctgctggcagtcgctcttgctctgggaggaagaggatgtctcggagccagctctagacctcgatggcgacctctgggtgcccaacccccaagagacccgcaggtggcaccccgctccggacctggacttcgaattccacctggcagatcaggggcagggccggaaagtagtacccaggacctaccatgtatgatctggcccaaagtggaatgctgtcattttaaaaccgccgtggaagcccctctgggcatgaagctggataaaaaaatggaggttttcatccccctttctacttcagccgcaagctccggcccgtgggcccatagtctgttcgcctttataccgtcctggcccaaaaagaacctctttaaacgagagtctcctatcacacaccgcctgtatggtgatatctcacgggaggtgcagggaactagcgagaacggcgtcatattccaaaaatgcgccctggtaagcggctccagcgaggcacaaacagccagaatctggttactggtcaataatacaaagaccacatcctctgctaaccttagcgagctcttgctcctggattcaattgccggactcaccatatgggatagcgtgggaaaccgtacctctgagggattccaagcattttccaaaaagttcctgcaggtgggggatgcgttcgctgtgagttacgccgcaactcttcaagccggagatctggggaatggcgagtcccttaaactccctgcccagttgaccttccagagctcgtcccgcaacaggacacagttgaaagtgctttttagcattaccgccgaagaaaatgtgacagtcttgcctcaccacgggcttcacgcagccggattcttcattgcctttctgttgtcccttgtccttacctgggccgcactcttcctcatggtccgctaccaatgcctgaagggaaatatgttaacgagacatagagtctggcagtatgaaagtaagctggagcctctaccatttaccagtgccgacggcgtgaacgaagatctgagcctcaacgatcagatgatcgacatcctgagctccgaagatcccgggtctatgctccaggcacttgaagaactcgagatcgccacgcttaaccgcgctgacgctgatctagaagcctgccgaacccagatcagcaaagacattattgcgcttcttcttaagaatctcacgtctagcggtcacctgagcccccaggtggagagaaaaatgtccgcagtttttaagaagcagttcctgctgctggagaatgagattcaggaagaatacgacagaaaaatggtggctcttaccgccgaatgcgatctggagaccagaaagaagatggaaaatcaatatcagcgcgaaatgatggcgatggaagaagccgaggaattgctgaagcgggctggcgagcgcagcgctgtggagtgctctaacttattgaggacacttcacgggctggaacaagagcacttgaggaagagcctggcactccagcaggaggaggattttgccaaggcccatcgacaactggcagtgtttcaacggaatgaactgcactctatatttttcactcagatcaagagtgcaatctttaagggtgaattgaagccagaggccgcaaaaatgttgcttcagaactactccaaaatacaagaaaatgtcgaggaactaatggactttttccaggccagcaagaggtaccatttgtctaagcgctttggccaccgcgagtacttagttcaaaatctgcagagttccgagaccagggtgcaggggctgctgtctactgcggcggcgcagctgacgcatctgattcagaaacatgaaagagccgggtaccttgatgaagatcagatggaaatgctcctcgagagggcccagacagaggtgttcagtatcaagcaaaaactcgacaacgacctgaaacaggaaaagaaaaaacttcatcagaagctcattaccaagcgacggagagaactgctgcagaagcaccgggagcagcgaagagagcaggcaagcgtgggggaggcattcagaacggtagaagatgccgggcaatacctgcatcaaaaaagaagtctgatggaggagcacggggctaccctggaagagctgcaggagcgacttgatcaggcagctcttgacgacctgcgaacactgaccctgtccctttttgagaaggctacagacgaactccgccgcctccaaaattctgccatgactcaggagctgctaaagcgtggagttccttggctgttcctacagcagatccttgaagaacacggcaaagaaatggccgcccgtgccgaacagttggaaggagaagagcgggacagggaccaggaaggcgttcagagtgtgcggcagcgcctcaaggacgacgcacctgaggctgtgactgaagaacaggccgaacttcggcggtgggagcacttgattttcatgaaattgtgttcatctgtgtttagcctgagcgaggaggaacttcttcgcatgcgccaggaagttcacggatgcttcgcccagatggaccgctccttggccctcccaaagatccgggcacgcgttttattgcagcagttccagacggcctggagggaggctgagttcgtgaaattggaccaggccgtggcagccccagaactgcagcagcagtccaaggtcaggaaatcccgttcaaaaagtaagtctaaaggtgagctgctcaagaaatgtattgaggataaaatacatctatgcgaagagcaagcttccgaggatctggtggagaaagtgcgcggtgaactgctacgggaacgcgtccagcgcatggaggcacaagagggcggcttcgcacagagccttgtggctctccagttccagaaggcctcaagagtaactgagacgttgagcgcatacacagccttgctttcaatccaggacctcctgctggaagagcttagtgccagtgagatgctgaccaagagcgcctgcacacagatactagagtctcactctagagaattgcaagaactggagcgcaaactggaagatcaattagttcagcaggaggccgcgcaacaacagcaagccctggcatcctggcagcagtgggtggcggacggcccaggtatactaaatgagcccggtgaggtggactcagaacgacaagtcagcacagtcctccatcaagcattaagcaagagtcagactctacttgaacagcatcagcagtgccttcgggaagagcaacagaacagtgtggtgctggaggatctgcttgaaaatatggaggccgacaccttcgccactttgtgtagtcaggagttaagattagccagctatctcgcccgcatggccatggtgccaggcgctacattacgtcgactgctttccgtggtcctccccacagcctctcaaccacaactgctggctcttctggactcagctactgagaggcacgtggatcatgcagccgagagcgacgggggcgccgagcaggctgatgttgggagacgacgaaaacaccagtcctggtggcaagccctcgatggcaaacttagaggcgatctgattagtagagggctggaaaagatgttatgggcccggaaacgcaagcagagatccggtaatcaagagtcattctggcaatacctggtgggtactccagaaattgggctgattgaatggatgagtgagaaatag

SEQ ID NO: 242014 - DNA, 3927 bp, Artificial Sequence
  derived and/or modified sequence
atggacccgagcggaagccggggtagaccaacctgggtcctagctgggggactcctggcggtggcactggcactcggaggacggggttgcctgggcgcatcgagtcggcctcggtggaggccgctcggcgctcaaccaccgagagaccctcaggtggcaccacgcagcggcccaggcctgcggatcccacctggcaggagcggagcaggccctgaatcttcaactcaggatcttccttgtatgatttggcccaaagtcgagtgttgccactttaagacagctgttgaggcccctttgggtatgaagcttgacaaaaagatggaggtgttcatccctctttccacaagtgcggctagctccggaccctgggcccattcattgttcgcatttatccccagttggccaaagaagaatctatttaagagggaatcccccatcacccaccgcctgtatggtgacatttctcgtgaagtacagggaacctctgagaatggcgtcatttttcagaagtgcgcactcgtctctggtagcagcgaggcccaaacggcaaggatttggttgctggtgaacaacactaagacgacgtcaagcgccaaccttagtgagctgctcctgctggattccatcgcaggtcttaccatttgggattcagtaggcaatcgcacgtctgaagggttccaggccttcagcaaaaagtttctgcaagtgggggatgcttttgcagtctcatacgccgcaactctacaggcaggcgatttgggaaacggagagtcattaaagctgccagcccagctgaccttccaaagctcttcccggaaccggacccagttgaaagtgttgttcagcataaccgctgaagagaacgtcacggtgcttccccaccatgggcttcacgccgcagggttcttcattgcctttctgctgtccctggtgttgacctgggccgctttgtttctgatggttcggtaccagtgccttaaaggcaacatgttgacacggcatcgcgtgtggcagtatgagagtaagcttgaacccttgccctttaccagcgcagacggggtcaatgaagatttgtccctgaacgatcagatgattgacatactctcttccgaggacccgggatcaatgctccaggctctggaagagctggagatcgcaacgctcaaccgggcagacgctgaccttgaggcatgcagaacccagatttctaaagacataatcgccttgctcctcaagaacctaacttctagcggacatctaagcccccaagtggagcgaaagatgtccgccgtgttcaaaaagcagttcctgctgttggagaacgaaatacaagaggagtatgaccgtaagatggtggccctgacagcagaatgtgacctggaaacgcggaagaagatggaaaatcaataccagagagagatgatggctatggaagaggctgaggagcttttgaagcgggcaggtgaacgttcagctgtagaatgtagcaacctcctcagaacgttgcatggcctggaacaggagcatctgcggaagtccctggccttgcagcaggaggaagactttgctaaggcccaccggcagttggcagtgttccagcggaatgagcttcattcaatcttttttacccaaattaaaagcgccatttttaaaggcgagctgaaacctgaagctgctaaaatgttgttgcagaattattcaaaaatccaagaaaatgttgaagagctaatggatttctttcaggcctcaaaacggtatcatctctcaaaaagattcggccaccgggagtatttagtacagaacctgcaatcaagcgaaacccgtgtccaaggactcctgtccaccgccgcagcgcagctaacgcacctgatacagaaacacgaaagagccggataccttgacgaagaccagatggaaatgcttctcgagagggcacagaccgaagtgtttagcataaaacagaagttggataacgatttgaaacaagagaagaagaagctgcaccaaaagctgattacgaagcggagaagagagttgcttcagaagcatagagaacaacggcgagagcaggcttcagtgggggaagcgttcaggactgtagaggacgccggtcaataccttcatcagaagcgctcattgatggaagaacacggcgctacactagaagagcttcaagaacggcttgatcaagccgctctggacgatctgcgaacgctcactttgtcgctgtttgagaaagctaccgacgagctaagaaggttgcagaactctgccatgacacaggagcttctgaagcggggagtgccttggctgtttttacagcagatcctggaggagcacggcaaagagatggctgctcgcgcagaacaactagaaggagaggagcgggaccgagaccaggagggcgtgcaatctgtcagacaaaggctgaaagatgatgcaccagaagctgtgactgaggaacaggcggaactccgtcgctgggagcatctgatattcatgaaactttgcagcagcgtgttcagcctttccgaagaagagctgctgaggatgagacaggaagttcatgggtgctttgcgcaaatggaccgaagcttggccctgccaaagattagggccagagtgctattacagcagttccagactgcttggagggaagcagaattcgtgaagcttgatcaagccgtggcggctccagaactgcagcagcagtccaaggtccggaagagtagatccaaatcaaagtcaaaaggcgagttgctgaagaagtgcatagaggataaaatacatctttgtgaggaacaagcatcagaggatctggtggagaaagtgagaggggaacttctacgggaaagggttcagaggatggaggcccaggagggcggtttcgctcagtcccttgtcgcattgcagtttcagaaggcctcacgggttacagagacgctgtctgcatacaccgccctactgtccatacaagacctcctgctcgaagagctatctgcatccgagatgttgaccaagtccgcctgcacacagatcctggaaagtcactcacgcgaactacaggaacttgagaggaaattagaagaccaactggtacagcaggaagccgcacagcagcagcaggccttagcctcatggcagcaatgggtagccgatgggccaggtatactgaatgagcccggagaagttgactccgagcggcaggtctccacagtgctccaccaagcactgtccaagagccagacccttctcgagcagcaccagcaatgcctgagagaggagcagcagaacagcgtggtgttggaagatctgctggaaaatatggaagcagataccttcgctacattatgtagtcaggaattacgcctcgcaagctacctagctaggatggctatggtgcctggcgctaccttgagacgcctgctctccgtggttctccctactgcgtcccaacctcaattgctggccttgctggatagtgccacagagagacacgtggatcacgctgctgagtctgatggcggagccgaacaggcagacgtgggacgccgtaggaaacatcaatcatggtggcaagccctggacggcaagctcaggggggaccttattagcaggggtttggaaaaaatgctgtgggccaggaagaggaagcaatccatcttgaaaaagacatgcctgccactgcgtgagagaatgatcttcagtggaaaaggctcatggccccacctgtccttggaacccattggggagctggcacctgtccccatcgtcggtgcagaaacaattgatctgctgaacaccggcgaaaaactgtttattttcaggaatcctaaggagccagaaatttcactgcatgtgccacccaggaaaaaaaagaatttcttaaatgccaaaaaagcaatgcgtgctctgggtatggattag

SEQ ID NO: 242015 - DNA, 3741 bp, Artificial Sequence
  derived and/or modified sequence
atggatccctctggttccagaggccgaccaacttgggttctcgccggaggccttctcgcggtggcgctggcccttgggggtcgtgggtgccttggtgccagctcaaggcccaggtggcgcccattgggagcccagcctccccgagatccccaggtggccccacggtcgggcccaggcctccggatcccccctggcagatcgggcgctgggccagaaagctccacccaggacctgccctgtatgatctggcccaaagtcgagtgctgccactttaaaaccgcggtagaagcacccctgggaatgaaactggacaaaaaaatggaagtctttattcccctttccacaagcgccgcaagctctggaccgtgggcgcattcactgttcgccttcataccttcttggcccaaaaaaaacctgttcaagcgagaatccccaattacacatcggttatacggggacatttcaagggaagtgcaggggactagcgaaaacggcgtgatctttcaaaaatgtgctctggtttctggttcctctgaagctcagactgcacggatctggctccttgtgaataacaccaagacaacatcatctgctaatctttccgagctgctgcttcttgacagtattgccggtctgacaatctgggattctgtcggcaatagaactagcgagggcttccaagctttctcaaaaaaatttttacaagttggagatgcattcgctgtgtcatacgccgcaacccttcaggccggagatcttggcaatggagagtctcttaagctccccgctcagcttacatttcagtcttcctccaggaacagaacccagctgaaggtcctatttagcataacagctgaagagaacgtgacggtgctgcctcaccacggcctccatgctgctggcttcttcatcgcattccttctttcactcgtgctcacatgggctgcactgttcctgatggtccgataccagtgtctcaaggggaacatgctgacgcgacatcgcgtgtggcagtacgagtctaagctggaaccactcccgttcacgagcgcggacggtgtgaatgaggacttgtcactgaatgatcagatgattgacattctgagttccgaggatcccggtagtatgctccaggctctggaagagttagagatcgccacactgaacagggccgacgccgacctagaggcttgccgtacccaaatttctaaagatatcatcgcgctgttactgaaaaacctgacctctagcggccatctcagccctcaagtggagcggaagatgtctgccgtgttcaagaaacagttcctgctcttggagaatgagatccaagaggagtatgataggaaaatggttgctttgaccgcagagtgtgatctagagactaggaagaaaatggagaatcagtaccaacgggaaatgatggctatggaagaggctgaagagctcctgaagcgggctggcgaacgttcggccgtcgaatgttccaatttgctgaggaccctgcacgggcttgaacaggaacacttgagaaagagcttggctctccagcaggaggaagactttgctaaggcacaccgtcaattagccgtctttcaacggaatgagctccacagcatcttttttacccagattaaaagcgctatcttcaagggggaattgaagcctgaagcggctaaaatgctgctacagaattactccaagattcaggagaacgttgaggaactgatggatttcttccaagcaagcaagcgataccacttatcaaagcgtttcgggcatcgggaatatctagtgcagaacttacagtccagtgaaacaagggtccaaggcctcttaagtaccgctgccgctcagctgacgcatctaatccagaaacatgaaagagccggttacttggatgaggaccagatggagatgctcttagagagagcgcagaccgaggtttttagtataaaacaaaaacttgacaacgacttgaaacaggagaaaaaaaagttgcatcaaaagctgattaccaaacggagacgcgagcttcttcagaaacaccgtgaacagaggcgagagcaagcatccgttggagaagcatttcgcaccgtagaagacgctggtcagtatctccatcagaaacggtcccttatggaagaacacggagcaactcttgaggagctccaggagcgcctggaccaagctgccctcgatgacctccgcactctcacattgagcctctttgagaaggctaccgacgaactgcggagattgcagaatagcgcaatgacccaggaactgttgaagaggggagtgccctggcttttcctgcaacagattctggaagaacacggtaaggagatggcagccagggccgagcagctggagggcgaagagagagatagagatcaagaaggcgtccagtccgtacgtcagcgtctgaaagacgatgctcctgaggcggtcaccgaggagcaggctgaactaaggcggtgggagcaccttattttcatgaaattgtgtagctctgtgttctctctcagtgaggaagaactgctgcgaatgcggcaggaggtccatggatgctttgctcagatggatagatctctggctctccctaagatccgcgcacgagtgctcttgcagcagtttcagactgcctggagagaagctgagttcgtcaagctcgaccaagccgtggcagccccagagctccagcagcaatctaaggttagaaaatccaggagtaagtccaagagtaagggcgagttgctaaagaaatgtatcgaagacaagatccacctctgtgaggagcaggcctctgaagatcttgtggagaaggtcaggggggaacttctcagagaacgggtgcagaggatggaagctcaggagggcggtttcgcccaatctttagtggctctgcagtttcaaaaagcctcacgcgtcacggaaaccctatcagcttacacggcattgttatccatccaggatctgctccttgaggagctgtccgcctcagagatgctgacaaagtccgcatgtactcagatcctggagagccatagccgagagttgcaagaattggagcggaaacttgaggatcagctcgttcagcaggaagctgctcagcagcaacaggccttagcctcctggcaacagtgggttgccgatggcccaggaattcttaacgagcctggcgaggtggactccgaacggcaggtaagtactgtcttacatcaggctctgtccaaatctcagaccctgttggaacagcaccagcaatgtctgagagaagagcagcagaactctgtggtgctagaggatctactggaaaacatggaagccgacacattcgccactctgtgctcacaggagcttcgccttgcatcctatctggcacggatggcgatggtaccaggcgctactctgcgcagactgctgagcgtcgtgttacctacagccagccagccacagcttctggccctactggacagtgccacagaacgtcacgtggatcacgcagcggaatcagatggaggcgcagagcaggcagatgtgggaaggcgtcggaaacaccagtcctggtggcaggccctcgacggcaaactccgcggagacctgatttctcggggactggagaagatgttgtgggcacgaaaacgaaaacagaggtctggcaatcaagaaagcttttggcagtacctagttgggacccccgagatcggccttattgagtggatgtcggagaagtag

SEQ ID NO: 242016 - DNA, 3927 bp, Artificial Sequence
  derived and/or modified sequence
atggaccccagcggcagcagaggcagacccacctgggtgctggccggcggcctgctggccgtggccctggccctgggcggcagaggctgcctgggcgccagcagcagacccagatggagacccctgggcgcccagccccccagagacccccaggtggcccccagaagcggccccggcctgagaatcccccccggcagaagcggcgccggccccgagagcagcacccaggacctgccctgcatgatctggcccaaggtggagtgctgccacttcaagaccgccgtggaggcccccctgggcatgaagctggacaagaagatggaggtgttcatccccctgagcaccagcgccgccagcagcggcccctgggcccacagcctgttcgccttcatccccagctggcccaagaagaacctgttcaagagagagagccccatcacccacagactgtacggcgacatcagcagagaggtgcagggcaccagcgagaacggcgtgatcttccagaagtgcgccctggtgagcggcagcagcgaggcccagaccgccagaatctggctgctggtgaacaacaccaagaccaccagcagcgccaacctgagcgagctgctgctgctggacagcatcgccggcctgaccatctgggacagcgtgggcaacagaaccagcgagggcttccaggccttcagcaagaagttcctgcaggtgggcgacgccttcgccgtgagctacgccgccaccctgcaggccggcgacctgggcaacggcgagagcctgaagctgcccgcccagctgaccttccagagcagcagcagaaacagaacccagctgaaggtgctgttcagcatcaccgccgaggagaacgtgaccgtgctgccccaccacggcctgcacgccgccggcttcttcatcgccttcctgctgagcctggtgctgacctgggccgccctgttcctgatggtgagataccagtgcctgaagggcaacatgctgaccagacacagagtgtggcagtacgagagcaagctggagcccctgcccttcaccagcgccgacggcgtgaacgaggacctgagcctgaacgaccagatgatcgacatcctgagcagcgaggaccccggcagcatgctgcaggccctggaggagctggagatcgccaccctgaacagagccgacgccgacctggaggcctgcagaacccagatcagcaaggacatcatcgccctgctgctgaagaacctgaccagcagcggccacctgagcccccaggtggagagaaagatgagcgccgtgttcaagaagcagttcctgctgctggagaacgagatccaggaggagtacgacagaaagatggtggccctgaccgccgagtgcgacctggagaccagaaagaagatggagaaccagtaccagagagagatgatggccatggaggaggccgaggagctgctgaagagagccggcgagagaagcgccgtggagtgcagcaacctgctgagaaccctgcacggcctggagcaggagcacctgagaaagagcctggccctgcagcaggaggaggacttcgccaaggcccacagacagctggccgtgttccagagaaacgagctgcacagcatcttcttcacccagatcaagagcgccatcttcaagggcgagctgaagcccgaggccgccaagatgctgctgcagaactacagcaagatccaggagaacgtggaggagctgatggacttcttccaggccagcaagagataccacctgagcaagagattcggccacagagagtacctggtgcagaacctgcagagcagcgagaccagagtgcagggcctgctgagcaccgccgccgcccagctgacccacctgatccagaagcacgagagagccggctacctggacgaggaccagatggagatgctgctggagagagcccagaccgaggtgttcagcatcaagcagaagctggacaacgacctgaagcaggagaagaagaagctgcaccagaagctgatcaccaagagaagaagagagctgctgcagaagcacagagagcagagaagagagcaggccagcgtgggcgaggccttcagaaccgtggaggacgccggccagtacctgcaccagaagagaagcctgatggaggagcacggcgccaccctggaggagctgcaggagagactggaccaggccgccctggacgacctgagaaccctgaccctgagcctgttcgagaaggccaccgacgagctgagaagactgcagaacagcgccatgacccaggagctgctgaagagaggcgtgccctggctgttcctgcagcagatcctggaggagcacggcaaggagatggccgccagagccgagcagctggagggcgaggagagagacagagaccaggagggcgtgcagagcgtgagacagagactgaaggacgacgcccccgaggccgtgaccgaggagcaggccgagctgagaagatgggagcacctgatcttcatgaagctgtgcagcagcgtgttcagcctgagcgaggaggagctgctgagaatgagacaggaggtgcacggctgcttcgcccagatggacagaagcctggccctgcccaagatcagagccagagtgctgctgcagcagttccagaccgcctggagagaggccgagttcgtgaagctggaccaggccgtggccgcccccgagctgcagcagcagagcaaggtgagaaagagcagaagcaagagcaagagcaagggcgagctgctgaagaagtgcatcgaggacaagatccacctgtgcgaggagcaggccagcgaggacctggtggagaaggtgagaggcgagctgctgagagagagagtgcagagaatggaggcccaggagggcggcttcgcccagagcctggtggccctgcagttccagaaggccagcagagtgaccgagaccctgagcgcctacaccgccctgctgagcatccaggacctgctgctggaggagctgagcgccagcgagatgctgaccaagagcgcctgcacccagatcctggagagccacagcagagagctgcaggagctggagagaaagctggaggaccagctggtgcagcaggaggccgcccagcagcagcaggccctggccagctggcagcagtgggtggccgacggccccggcatcctgaacgagcccggcgaggtggacagcgagagacaggtgagcaccgtgctgcaccaggccctgagcaagagccagaccctgctggagcagcaccagcagtgcctgagagaggagcagcagaacagcgtggtgctggaggacctgctggagaacatggaggccgacaccttcgccaccctgtgcagccaggagctgagactggccagctacctggccagaatggccatggtgcccggcgccaccctgagaagactgctgagcgtggtgctgcccaccgccagccagccccagctgctggccctgctggacagcgccaccgagagacacgtggaccacgccgccgagagcgacggcggcgccgagcaggccgacgtgggcagaagaagaaagcaccagagctggtggcaggccctggacggcaagctgagaggcgacctgatcagcagaggcctggagaagatgctgtgggccagaaagagaaagcagagcatcctgaagaagacctgcctgcccctgagagagagaatgatcttcagcggcaagggcagctggccccacctgagcctggagcccatcggcgagctggcccccgtgcccatcgtgggcgccgagaccatcgacctgctgaacaccggcgagaagctgttcatcttcagaaaccccaaggagcccgagatcagcctgcacgtgccccccagaaagaagaagaacttcctgaacgccaagaaggccatgagagccctgggcatggactag

SEQ ID NO: 242017 - DNA, 3741 bp, Artificial Sequence
  derived and/or modified sequence
atggaccccagcggcagcagaggcagacccacctgggtgctggccggcggcctgctggccgtggccctggccctgggcggcagaggctgcctgggcgccagcagcagacccagatggagacccctgggcgcccagccccccagagacccccaggtggcccccagaagcggccccggcctgagaatcccccccggcagaagcggcgccggccccgagagcagcacccaggacctgccctgcatgatctggcccaaggtggagtgctgccacttcaagaccgccgtggaggcccccctgggcatgaagctggacaagaagatggaggtgttcatccccctgagcaccagcgccgccagcagcggcccctgggcccacagcctgttcgccttcatccccagctggcccaagaagaacctgttcaagagagagagccccatcacccacagactgtacggcgacatcagcagagaggtgcagggcaccagcgagaacggcgtgatcttccagaagtgcgccctggtgagcggcagcagcgaggcccagaccgccagaatctggctgctggtgaacaacaccaagaccaccagcagcgccaacctgagcgagctgctgctgctggacagcatcgccggcctgaccatctgggacagcgtgggcaacagaaccagcgagggcttccaggccttcagcaagaagttcctgcaggtgggcgacgccttcgccgtgagctacgccgccaccctgcaggccggcgacctgggcaacggcgagagcctgaagctgcccgcccagctgaccttccagagcagcagcagaaacagaacccagctgaaggtgctgttcagcatcaccgccgaggagaacgtgaccgtgctgccccaccacggcctgcacgccgccggcttcttcatcgccttcctgctgagcctggtgctgacctgggccgccctgttcctgatggtgagataccagtgcctgaagggcaacatgctgaccagacacagagtgtggcagtacgagagcaagctggagcccctgcccttcaccagcgccgacggcgtgaacgaggacctgagcctgaacgaccagatgatcgacatcctgagcagcgaggaccccggcagcatgctgcaggccctggaggagctggagatcgccaccctgaacagagccgacgccgacctggaggcctgcagaacccagatcagcaaggacatcatcgccctgctgctgaagaacctgaccagcagcggccacctgagcccccaggtggagagaaagatgagcgccgtgttcaagaagcagttcctgctgctggagaacgagatccaggaggagtacgacagaaagatggtggccctgaccgccgagtgcgacctggagaccagaaagaagatggagaaccagtaccagagagagatgatggccatggaggaggccgaggagctgctgaagagagccggcgagagaagcgccgtggagtgcagcaacctgctgagaaccctgcacggcctggagcaggagcacctgagaaagagcctggccctgcagcaggaggaggacttcgccaaggcccacagacagctggccgtgttccagagaaacgagctgcacagcatcttcttcacccagatcaagagcgccatcttcaagggcgagctgaagcccgaggccgccaagatgctgctgcagaactacagcaagatccaggagaacgtggaggagctgatggacttcttccaggccagcaagagataccacctgagcaagagattcggccacagagagtacctggtgcagaacctgcagagcagcgagaccagagtgcagggcctgctgagcaccgccgccgcccagctgacccacctgatccagaagcacgagagagccggctacctggacgaggaccagatggagatgctgctggagagagcccagaccgaggtgttcagcatcaagcagaagctggacaacgacctgaagcaggagaagaagaagctgcaccagaagctgatcaccaagagaagaagagagctgctgcagaagcacagagagcagagaagagagcaggccagcgtgggcgaggccttcagaaccgtggaggacgccggccagtacctgcaccagaagagaagcctgatggaggagcacggcgccaccctggaggagctgcaggagagactggaccaggccgccctggacgacctgagaaccctgaccctgagcctgttcgagaaggccaccgacgagctgagaagactgcagaacagcgccatgacccaggagctgctgaagagaggcgtgccctggctgttcctgcagcagatcctggaggagcacggcaaggagatggccgccagagccgagcagctggagggcgaggagagagacagagaccaggagggcgtgcagagcgtgagacagagactgaaggacgacgcccccgaggccgtgaccgaggagcaggccgagctgagaagatgggagcacctgatcttcatgaagctgtgcagcagcgtgttcagcctgagcgaggaggagctgctgagaatgagacaggaggtgcacggctgcttcgcccagatggacagaagcctggccctgcccaagatcagagccagagtgctgctgcagcagttccagaccgcctggagagaggccgagttcgtgaagctggaccaggccgtggccgcccccgagctgcagcagcagagcaaggtgagaaagagcagaagcaagagcaagagcaagggcgagctgctgaagaagtgcatcgaggacaagatccacctgtgcgaggagcaggccagcgaggacctggtggagaaggtgagaggcgagctgctgagagagagagtgcagagaatggaggcccaggagggcggcttcgcccagagcctggtggccctgcagttccagaaggccagcagagtgaccgagaccctgagcgcctacaccgccctgctgagcatccaggacctgctgctggaggagctgagcgccagcgagatgctgaccaagagcgcctgcacccagatcctggagagccacagcagagagctgcaggagctggagagaaagctggaggaccagctggtgcagcaggaggccgcccagcagcagcaggccctggccagctggcagcagtgggtggccgacggccccggcatcctgaacgagcccggcgaggtggacagcgagagacaggtgagcaccgtgctgcaccaggccctgagcaagagccagaccctgctggagcagcaccagcagtgcctgagagaggagcagcagaacagcgtggtgctggaggacctgctggagaacatggaggccgacaccttcgccaccctgtgcagccaggagctgagactggccagctacctggccagaatggccatggtgcccggcgccaccctgagaagactgctgagcgtggtgctgcccaccgccagccagccccagctgctggccctgctggacagcgccaccgagagacacgtggaccacgccgccgagagcgacggcggcgccgagcaggccgacgtgggcagaagaagaaagcaccagagctggtggcaggccctggacggcaagctgagaggcgacctgatcagcagaggcctggagaagatgctgtgggccagaaagagaaagcagagaagcggcaaccaggagagcttctggcagtacctggtgggcacccccgagatcggcctgatcgagtggatgagcgagaagtag

SEQ ID NO: 242018 - DNA, 4828 bp, Artificial Sequence
  derived and/or modified sequence
ttataaattctcagcttctcgaaccccatggccttgtccatgttaggtcaggaaaggcctgtccttggatggtctgggttatggggagagaggctgccaggggccaggctcgctggcctgagactttatagacagcctaacagcctgccccgcaggaaggctggcgggagtggagccctcccccgtcaacaggtgtcagctgtcacccaggacctaggcagggatgaggaagcacacaaaaggctccaccagtccccctttttgtgtctttctcctcctcctcctcctgcgtcccttggcaaagcaaatccctgtcccctcggagagttcagggagagcttgcttagggctgcgacttcagacaccagctcccctctttctaggtccccagagaggtggcccagcggctggcctgtttcccactgggaatgcgaggggcacccgggccggcccagggctgacccacagcaggctcgggcagtgggtgctcagctggtctgcactgaacgcaaccggaagtgagggtccttttccttctctgcggccaccccctcctccccgagctttcctgaaccttctgggtgctccaggactcccggccccgcgctccaaatgcttctccgttttctaagcggggatggggaaactctggattcacatccgtgtgtcaggaaaccgttcccaggggaagtgcgtctgagctgaggcttacagacccaggacttgccctgtatgatttggcccaaagtggaatgctgtcactttaagactgcagtggaagcaccacttggaatgaaattggacaagaaaatggaagtcttcatcccactctcaacttctgcagcctctagtgggccatgggctcattccttatttgcttttataccctcctggcctaagaagaacttatttaaaagagagtctcctataacacaccgcctgtatggggacatttcaagagaagttcaagggacttctgaaaatggagtaatttttcagaaatgtgcactggtgtctgggtcgagtgaagcacagacagcccgcatatggctgcttgttaacaacaccaagacaacctcgtcagccaacctctcggagctgctcttgctggacagcattgctggtctcaccatttgggactctgtgggaaacaggacctcggaaggattccaggcttttagcaagaagtttctgcaagtgggagatgcctttgctgtcagctacgcagccacgctccaggctggagacctcgggaacggggagagcctcaagcttcctgcccaactcacctttcagagctcgtcacggaacagaacacagctgaaagtgcttttttccataacagcagaagaaaacgtaacggttctgccgcaccacggcctccacgcagcagggttcttcattgccttcctcctctcccttgtgctgacctgggctgccctcttcctcatggttcgctatcagtgtctgaagggaaacatgctcaccagacatcgggtttggcagtatgagagcaagctggaacccttgccgttcacctcagctgatggcgtgaatgaggacctttcccttaacgaccaaatgatagacattctgtcttccgaggaccctgggagcatgcttcaagccttagaagagttggagattgcaaccctgaatcgggcagatgcagatctggaggcttgtcgaacacaaatcagcaaggatatcattgcccttctgctgaaaaatctcaccagcagtggccacctctcaccccaagtagagagaaaaatgagtgctgttttcaaaaagcagtttctattgctggaaaatgaaatacaagaggagtacgatcggaagatggtggcattgacagctgaatgtgacctggaaacaagaaagaagatggaaaaccagtaccagagagagatgatggcaatggaggaagcagaagagttgctgaaacgtgctggtgagaggtctgctgtagagtgcagcaaccttctgcggaccctccatggcctggaacaggagcacttgaggaagtctctcgctttgcaacaagaagaagactttgccaaagctcacagacagctggctgttttccagagaaatgaactgcacagtatcttttttacccagataaaaagtgctattttcaaaggggaattgaaaccagaggcagctaaaatgctgctgcaaaattattctaaaatacaggagaatgtagaagagttaatggactttttccaggctagtaagaggtatcatctaagtaaaagatttggccacagggaatatctggtccagaacctccagtcatcagagacccgtgtgcagggccttctgagcaccgctgcagcccagctgactcacctcattcagaagcacgagagagcagggtacctggatgaagaccaaatggaaatgctattggagcgggctcagacagaagtcttttcaatcaagcagaagttggacaatgacttaaagcaggaaaagaaaaagctccaccaaaaattaataactaagagaagacgagagttgctacaaaagcacagggagcagcgtagggagcaggcgtccgtcggcgaggccttccgaacggttgaggatgccggccagtacctgcaccagaagaggagcctgatggaggagcacggtgccaccctggaggagctgcaggagcgtctggaccaggccgccctggacgatctcaggaccctgaccctttcgctgtttgaaaaggccaccgacgagctgcggcgcctgcagaactcagccatgacccaggagctgctcaagcgtggggtgccctggctcttcctgcagcagatcctggaggagcacggcaaggagatggctgcacgggccgagcagctggagggggaggagagggacagggaccaggagggtgtccagagcgtgaggcagagactgaaggatgacgctcctgaggccgtgacagaggagcaggcagagctgcgacgctgggagcacctgatcttcatgaagctctgctcctcagtcttctccctgtctgaagaggagctgctcaggatgaggcaggaggtccatggctgctttgctcagatggacaggagcttggccctccccaagatccgggcccgagttctgctgcagcaatttcagactgcgtggcgagaagcagagttcgtgaagctggaccaggccgtggctgcccctgagctgcagcaacagtccaaggtgagaaagtcacggtccaagagtaaaagcaagggagagcttctgaagaagtgcatcgaagacaaaattcacctctgtgaggaacaggcctctgaagacctggtggaaaaggttcgaggtgaattgctgcgggagagagtgcagcggatggaggcacaggagggaggctttgcacagtcgcttgttgctctgcagttccagaaggcgtcccgggtgaccgagactctgtcggcctacaccgccctcctcagcatccaggacttgctcctggaagagctgagtgcatctgagatgctgaccaagtcggcctgcacacagatcctggagtcgcacagccgggagctccaggagttggagaggaagctggaggaccagctggtgcagcaggaggcagcccagcagcagcaggccctggcgagctggcagcagtgggtggccgatgggcccgggattctgaacgaacctggggaggtggattctgaaaggcaggtctctactgtcctgcaccaagccctgagcaagagccagacattactggagcaacatcagcagtgtttgagagaggaacaacagaacagtgtcgtgctagaagacttgttggaaaacatggaggcagacacctttgcaaccctgtgcagccaggagctgagactggcatcgtacctggcgaggatggccatggtgcccggggccacgcttcgccggctcctgagtgtggtactgcccacagcctcacagcctcagctgctggccctgctggattcggccaccgagagacatgtggaccacgcagctgagagcgatggcggagcggagcaggccgacgtgggcaggcggaggaaacaccagagctggtggcaagccttagatggcaaactgcgaggagatctgataagcagaggattagaaaagatgctgtgggcccgcaagagaaagcagagcatattaaagaagacatgtctccctctcagagagaggatgatattctctggaaaaggaagttggccacacctgtcactggagcccattggcgaactggcccctgtacccattgtaggggcagaaaccattgatctattaaacacaggagagaagctctttatattcagaaatccaaaggagccagagatctcactgcacgttcctcccaggaaaaagaagaactttttgaatgccaaaaaggccatgagggccttgggcatggactagcccaagggaaagacctgcgggagcatctgaagagagaagggatgattttctcctgcccgccggtgtttgtgtgtttataatgcacaactcgcaaatataaattgcacatgcagaaggcacagaccccgtagcgcatgccaacttgcagggactcggtttaatcttgtctcatgaatttccagatggcccactctcttccatatcacaaggacataaacactccttctttcagccccacctccccagggccctggaggagacccccaccctgcaatccacaccccatcctctgctgcagaagctatggtctgtgtggtgacagccagattctctactcttatgttttgtatttgttacatattctatttttataaagggaattttaaaaaataaatgtgttttgcacaaa

SEQ ID NO: 242019 - DNA, 4390 bp, Artificial Sequence
  derived and/or modified sequence
gctccagcgactcggcggcacccgccgctttgaggtagcgggtcccgacaggcgatggacccctcgggctcccgggggcgccccacgtgggtgctggccgggggtctcctggcagtggccctggcgctggggggccgaggctgtctcggcgccagctcacgtccccgctggcgccccctcggcgcgcagccaccccgggatccccaggtggctcctaggtctgggcccggcctgaggatccctccggggcggagcggggcggggcccgagagcagcacgcaggacttgccctgtatgatttggcccaaagtggaatgctgtcactttaagactgcagtggaagcaccacttggaatgaaattggacaagaaaatggaagtcttcatcccactctcaacttctgcagcctctagtgggccatgggctcattccttatttgcttttataccctcctggcctaagaagaacttatttaaaagagagtctcctataacacaccgcctgtatggggacatttcaagagaagttcaagggacttctgaaaatggagtaatttttcagaaatgtgcactggtgtctgggtcgagtgaagcacagacagcccgcatatggctgcttgttaacaacaccaagacaacctcgtcagccaacctctcggagctgctcttgctggacagcattgctggtctcaccatttgggactctgtgggaaacaggacctcggaaggattccaggcttttagcaagaagtttctgcaagtgggagatgcctttgctgtcagctacgcagccacgctccaggctggagacctcgggaacggggagagcctcaagcttcctgcccaactcacctttcagagctcgtcacggaacagaacacagctgaaagtgcttttttccataacagcagaagaaaacgtaacggttctgccgcaccacggcctccacgcagcagggttcttcattgccttcctcctctcccttgtgctgacctgggctgccctcttcctcatggttcgctatcagtgtctgaagggaaacatgctcaccagacatcgggtttggcagtatgagagcaagctggaacccttgccgttcacctcagctgatggcgtgaatgaggacctttcccttaacgaccaaatgatagacattctgtcttccgaggaccctgggagcatgcttcaagccttagaagagttggagattgcaaccctgaatcgggcagatgcagatctggaggcttgtcgaacacaaatcagcaaggatatcattgcccttctgctgaaaaatctcaccagcagtggccacctctcaccccaagtagagagaaaaatgagtgctgttttcaaaaagcagtttctattgctggaaaatgaaatacaagaggagtacgatcggaagatggtggcattgacagctgaatgtgacctggaaacaagaaagaagatggaaaaccagtaccagagagagatgatggcaatggaggaagcagaagagttgctgaaacgtgctggtgagaggtctgctgtagagtgcagcaaccttctgcggaccctccatggcctggaacaggagcacttgaggaagtctctcgctttgcaacaagaagaagactttgccaaagctcacagacagctggctgttttccagagaaatgaactgcacagtatcttttttacccagataaaaagtgctattttcaaaggggaattgaaaccagaggcagctaaaatgctgctgcaaaattattctaaaatacaggagaatgtagaagagttaatggactttttccaggctagtaagaggtatcatctaagtaaaagatttggccacagggaatatctggtccagaacctccagtcatcagagacccgtgtgcagggccttctgagcaccgctgcagcccagctgactcacctcattcagaagcacgagagagcagggtacctggatgaagaccaaatggaaatgctattggagcgggctcagacagaagtcttttcaatcaagcagaagttggacaatgacttaaagcaggaaaagaaaaagctccaccaaaaattaataactaagagaagacgagagttgctacaaaagcacagggagcagcgtagggagcaggcgtccgtcggcgaggccttccgaacggttgaggatgccggccagtacctgcaccagaagaggagcctgatggaggagcacggtgccaccctggaggagctgcaggagcgtctggaccaggccgccctggacgatctcaggaccctgaccctttcgctgtttgaaaaggccaccgacgagctgcggcgcctgcagaactcagccatgacccaggagctgctcaagcgtggggtgccctggctcttcctgcagcagatcctggaggagcacggcaaggagatggctgcacgggccgagcagctggagggggaggagagggacagggaccaggagggtgtccagagcgtgaggcagagactgaaggatgacgctcctgaggccgtgacagaggagcaggcagagctgcgacgctgggagcacctgatcttcatgaagctctgctcctcagtcttctccctgtctgaagaggagctgctcaggatgaggcaggaggtccatggctgctttgctcagatggacaggagcttggccctccccaagatccgggcccgagttctgctgcagcaatttcagactgcgtggcgagaagcagagttcgtgaagctggaccaggccgtggctgcccctgagctgcagcaacagtccaaggtgagaaagtcacggtccaagagtaaaagcaagggagagcttctgaagaagtgcatcgaagacaaaattcacctctgtgaggaacaggcctctgaagacctggtggaaaaggttcgaggtgaattgctgcgggagagagtgcagcggatggaggcacaggagggaggctttgcacagtcgcttgttgctctgcagttccagaaggcgtcccgggtgaccgagactctgtcggcctacaccgccctcctcagcatccaggacttgctcctggaagagctgagtgcatctgagatgctgaccaagtcggcctgcacacagatcctggagtcgcacagccgggagctccaggagttggagaggaagctggaggaccagctggtgcagcaggaggcagcccagcagcagcaggccctggcgagctggcagcagtgggtggccgatgggcccgggattctgaacgaacctggggaggtggattctgaaaggcaggtctctactgtcctgcaccaagccctgagcaagagccagacattactggagcaacatcagcagtgtttgagagaggaacaacagaacagtgtcgtgctagaagacttgttggaaaacatggaggcagacacctttgcaaccctgtgcagccaggagctgagactggcatcgtacctggcgaggatggccatggtgcccggggccacgcttcgccggctcctgagtgtggtactgcccacagcctcacagcctcagctgctggccctgctggattcggccaccgagagacatgtggaccacgcagctgagagcgatggcggagcggagcaggccgacgtgggcaggcggaggaaacaccagagctggtggcaagccttagatggcaaactgcgaggagatctgataagcagaggattagaaaagatgctgtgggcccgcaagagaaagcagagcatattaaagaagacatgtctccctctcagagagaggatgatattctctggaaaaggaagttggccacacctgtcactggagcccattggcgaactggcccctgtacccattgtaggggcagaaaccattgatctattaaacacaggagagaagctctttatattcagaaatccaaaggagccagagatctcactgcacgttcctcccaggaaaaagaagaactttttgaatgccaaaaaggccatgagggccttgggcatggactagcccaagggaaagacctgcgggagcatctgaagagagaagggatgattttctcctgcccgccggtgtttgtgtgtttataatgcacaactcgcaaatataaattgcacatgcagaaggcacagaccccgtagcgcatgccaacttgcagggactcggtttaatcttgtctcatgaatttccagatggcccactctcttccatatcacaaggacataaacactccttctttcagccccacctccccagggccctggaggagacccccaccctgcaatccacaccccatcctctgctgcagaagctatggtctgtgtggtgacagccagattctctactcttatgttttgtatttgttacatattctatttttataaagggaattttaaaaaataaatgtgttttgcacaaa

SEQ ID NO: 242020 - DNA, 3795 bp, Artificial Sequence
  derived and/or modified sequence
gctccagcgactcggcggcacccgccgctttgaggtagcgggtcccgacaggcgatggacccctcgggctcccgggggcgccccacgtgggtgctggccgggggtctcctggcagtggccctggcgctggggggccgaggctgtctcggcgccagctcacgtccccgctggcgccccctcggcgcgcagccaccccgggatccccaggtggctcctaggtctgggcccggcctgaggatccctccggggcggagcggggcggggcccgagagcagcacgcaggacttgccctgtatgatttggcccaaagtggaatgctgtcactttaagactgcagtggaagcaccacttggaatgaaattggacaagaaaatggaagtcttcatcccactctcaacttctgcagcctctagtgggccatgggctcattccttatttgcttttataccctcctggcctaagaagaacttatttaaaagagagtctcctataacacaccgcctgtatggggacatttcaagagaagttcaagggacttctgaaaatggagtaatttttcagaaatgtgcactggtgtctgggtcgagtgaagcacagacagcccgcatatggctgcttgttaacaacaccaagacaacctcgtcagccaacctctcggagctgctcttgctggacagcattgctggtctcaccatttgggactctgtgggaaacaggacctcggaaggattccaggcttttagcaagaagtttctgcaagtgggagatgcctttgctgtcagctacgcagccacgctccaggctggagacctcgggaacggggagagcctcaagcttcctgcccaactcacctttcagagctcgtcacggaacagaacacagctgaaagtgcttttttccataacagcagaagaaaacgtaacggttctgccgcaccacggcctccacgcagcagggttcttcattgccttcctcctctcccttgtgctgacctgggctgccctcttcctcatggttcgctatcagtgtctgaagggaaacatgctcaccagacatcgggtttggcagtatgagagcaagctggaacccttgccgttcacctcagctgatggcgtgaatgaggacctttcccttaacgaccaaatgatagacattctgtcttccgaggaccctgggagcatgcttcaagccttagaagagttggagattgcaaccctgaatcgggcagatgcagatctggaggcttgtcgaacacaaatcagcaaggatatcattgcccttctgctgaaaaatctcaccagcagtggccacctctcaccccaagtagagagaaaaatgagtgctgttttcaaaaagcagtttctattgctggaaaatgaaatacaagaggagtacgatcggaagatggtggcattgacagctgaatgtgacctggaaacaagaaagaagatggaaaaccagtaccagagagagatgatggcaatggaggaagcagaagagttgctgaaacgtgctggtgagaggtctgctgtagagtgcagcaaccttctgcggaccctccatggcctggaacaggagcacttgaggaagtctctcgctttgcaacaagaagaagactttgccaaagctcacagacagctggctgttttccagagaaatgaactgcacagtatcttttttacccagataaaaagtgctattttcaaaggggaattgaaaccagaggcagctaaaatgctgctgcaaaattattctaaaatacaggagaatgtagaagagttaatggactttttccaggctagtaagaggtatcatctaagtaaaagatttggccacagggaatatctggtccagaacctccagtcatcagagacccgtgtgcagggccttctgagcaccgctgcagcccagctgactcacctcattcagaagcacgagagagcagggtacctggatgaagaccaaatggaaatgctattggagcgggctcagacagaagtcttttcaatcaagcagaagttggacaatgacttaaagcaggaaaagaaaaagctccaccaaaaattaataactaagagaagacgagagttgctacaaaagcacagggagcagcgtagggagcaggcgtccgtcggcgaggccttccgaacggttgaggatgccggccagtacctgcaccagaagaggagcctgatggaggagcacggtgccaccctggaggagctgcaggagcgtctggaccaggccgccctggacgatctcaggaccctgaccctttcgctgtttgaaaaggccaccgacgagctgcggcgcctgcagaactcagccatgacccaggagctgctcaagcgtggggtgccctggctcttcctgcagcagatcctggaggagcacggcaaggagatggctgcacgggccgagcagctggagggggaggagagggacagggaccaggagggtgtccagagcgtgaggcagagactgaaggatgacgctcctgaggccgtgacagaggagcaggcagagctgcgacgctgggagcacctgatcttcatgaagctctgctcctcagtcttctccctgtctgaagaggagctgctcaggatgaggcaggaggtccatggctgctttgctcagatggacaggagcttggccctccccaagatccgggcccgagttctgctgcagcaatttcagactgcgtggcgagaagcagagttcgtgaagctggaccaggccgtggctgcccctgagctgcagcaacagtccaaggtgagaaagtcacggtccaagagtaaaagcaagggagagcttctgaagaagtgcatcgaagacaaaattcacctctgtgaggaacaggcctctgaagacctggtggaaaaggttcgaggtgaattgctgcgggagagagtgcagcggatggaggcacaggagggaggctttgcacagtcgcttgttgctctgcagttccagaaggcgtcccgggtgaccgagactctgtcggcctacaccgccctcctcagcatccaggacttgctcctggaagagctgagtgcatctgagatgctgaccaagtcggcctgcacacagatcctggagtcgcacagccgggagctccaggagttggagaggaagctggaggaccagctggtgcagcaggaggcagcccagcagcagcaggccctggcgagctggcagcagtgggtggccgatgggcccgggattctgaacgaacctggggaggtggattctgaaaggcaggtctctactgtcctgcaccaagccctgagcaagagccagacattactggagcaacatcagcagtgtttgagagaggaacaacagaacagtgtcgtgctagaagacttgttggaaaacatggaggcagacacctttgcaaccctgtgcagccaggagctgagactggcatcgtacctggcgaggatggccatggtgcccggggccacgcttcgccggctcctgagtgtggtactgcccacagcctcacagcctcagctgctggccctgctggattcggccaccgagagacatgtggaccacgcagctgagagcgatggcggagcggagcaggccgacgtgggcaggcggaggaaacaccagagctggtggcaagccttagatggcaaactgcgaggagatctgataagcagaggattagaaaagatgctgtgggcccgcaagagaaagcagaggtcagggaaccaagagagcttctggcagtacctggtagggactccagagattgggttaattgagtggatgtctgaaaaatga

SEQ ID NO: 242021 - protein, 1090 aa, Artificial Sequence
  derived and/or modified sequence
MAEAELHKERLQAIAEKRKRQTEIEGKRQQLDEQILLLQHSKSKVLREKWLLQGIPAGTAEEEEARRRQSEEDEFRVKQLEDNIQRLEQEIQTLESEESQISAKEQIILEKLKETEKSFKDFQKGFSSTDGDAVNYISSQLPDLPILCSRTAEPSPGQDGTSRAAGVGWENVLLKEGESASNATETSGPDMTIKKPPQLSEDDIWLKSEGDNYSATLLEPAASSLSPDHKNMEIEVSVAECKSVPGITSTPHPMDHPSAFYSPPHNGLLTDHHESLDNDVAREIRYLDEVLEANCCDSAVDGTYNGTSSPEPGAVVLVGGLSPPVHEATQPEPTERTASRQAPPHIELSNSSPDPMAEAERTNGHSPSQPRDALGDSLQVPVSPSSTTSSRCSSRDGEFTLTTLKKEAKFELRAFHEDKKPSKLFEDDEHEKEQYCIRKVRPSEEMLELEKERRELIRSQAVKKNPGIAAKWWNPPQEKTIEEQLDEEHLESHKKYKERKERRAQQEQLLLQKQLQQQQQQPPSQLCTAPASSHERASMIDKAKEDIVTEQIDFSAARKQFQLMENSRQAVAKGQSTPRLFSIKPFYRPLGSVNSDKPLTNPRPPSVGGPPEDSGASAAKGQKSPGALETPSAAGSQGNTASQGKEGPYSEPSKRGPLSKLWAEDGEFTSARAVLTVVKDDDHGILDQFSRSVNVSLTQEELDSGLDELSVRSQDTTVLETLSNDFSMDNISDSGASNETTNALQENSLADFSLPQTPQTDNPSEGRGEGVSKSFSDHGFYSPSSTLGDSPLVDDPLEYQAGLLVQNAIQQAIAEQVDKAVSKTSRDGAEQQGPEATVEEAEAAAFGSEKPQSMFEPPQVSSPVQEKRDVLPKILPAEDRALRERGPPQPLPAVQPSGPINMEETRPEGSYFSKYSEAAELRSTASLLATQESDVMVGPFKLRSRKQRTLSMIEEEIRAAQEREEELKRQRQVLQSTQSPRTKNAPSLPSRTCYKTAPGKIEKVKPPPSPTTEGPSLQPDLAPEEAAGTQRPKNLMQTLMEDYETHKSKRRERMDDSSVLEATRVNRRKSALALRWEAGIYANQEEEDNE

SEQ ID NO: 242022 - protein, 859 aa, Artificial Sequence
  derived and/or modified sequence
MEIEVSVAECKSVPGITSTPHPMDHPSAFYSPPHNGLLTDHHESLDNDVAREIRYLDEVLEANCCDSAVDGTYNGTSSPEPGAVVLVGGLSPPVHEATQPEPTERTASRQAPPHIELSNSSPDPMAEAERTNGHSPSQPRDALGDSLQVPVSPSSTTSSRCSSRDGEFTLTTLKKEAKFELRAFHEDKKPSKLFEDDEHEKEQYCIRKVRPSEEMLELEKERRELIRSQAVKKNPGIAAKWWNPPQEKTIEEQLDEEHLESHKKYKERKERRAQQEQLLLQKQLQQQQQQPPSQLCTAPASSHERASMIDKAKEDIVTEQIDFSAARKQFQLMENSRQAVAKGQSTPRLFSIKPFYRPLGSVNSDKPLTNPRPPSVGGPPEDSGASAAKGQKSPGALETPSAAGSQGNTASQGKEGPYSEPSKRGPLSKLWAEDGEFTSARAVLTVVKDDDHGILDQFSRSVNVSLTQEELDSGLDELSVRSQDTTVLETLSNDFSMDNISDSGASNETTNALQENSLADFSLPQTPQTDNPSEGRGEGVSKSFSDHGFYSPSSTLGDSPLVDDPLEYQAGLLVQNAIQQAIAEQVDKAVSKTSRDGAEQQGPEATVEEAEAAAFGSEKPQSMFEPPQVSSPVQEKRDVLPKILPAEDRALRERGPPQPLPAVQPSGPINMEETRPEGSYFSKYSEAAELRSTASLLATQESDVMVGPFKLRSRKQRTLSMIEEEIRAAQEREEELKRQRQVLQSTQSPRTKNAPSLPSRTCYKTAPGKIEKVKPPPSPTTEGPSLQPDLAPEEAAGTQRPKNLMQTLMEDYETHKSKRRERMDDSSVLEATRVNRRKSALALRWEAGIYANQEEEDNE

SEQ ID NO: 242023 - DNA, 3273 bp, Artificial Sequence
  derived and/or modified sequence
atggccgaggccgagctgcacaaggagagactgcaggccatcgccgagaagagaaagagacagaccgagatcgagggcaagagacagcagctggacgagcagatcctgctgctgcagcacagcaagagcaaggtgctgagagagaagtggctgctgcagggcatccccgccggcaccgccgaggaggaggaggccagaagaagacagagcgaggaggacgagttcagagtgaagcagctggaggacaacatccagagactggagcaggagatccagaccctggagagcgaggagagccagatcagcgccaaggagcagatcatcctggagaagctgaaggagaccgagaagagcttcaaggacttccagaagggcttcagcagcaccgacggcgacgccgtgaactacatcagcagccagctgcccgacctgcccatcctgtgcagcagaaccgccgagcccagccccggccaggacggcaccagcagagccgccggcgtgggctgggagaacgtgctgctgaaggagggcgagagcgccagcaacgccaccgagaccagcggccccgacatgaccatcaagaagcccccccagctgagcgaggacgacatctggctgaagagcgagggcgacaactacagcgccaccctgctggagcccgccgccagcagcctgagccccgaccacaagaacatggagatcgaggtgagcgtggccgagtgcaagagcgtgcccggcatcaccagcaccccccaccccatggaccaccccagcgccttctacagccccccccacaacggcctgctgaccgaccaccacgagagcctggacaacgacgtggccagagagatcagatacctggacgaggtgctggaggccaactgctgcgacagcgccgtggacggcacctacaacggcaccagcagccccgagcccggcgccgtggtgctggtgggcggcctgagcccccccgtgcacgaggccacccagcccgagcccaccgagagaaccgccagcagacaggcccccccccacatcgagctgagcaacagcagccccgaccccatggccgaggccgagagaaccaacggccacagccccagccagcccagagacgccctgggcgacagcctgcaggtgcccgtgagccccagcagcaccaccagcagcagatgcagcagcagagacggcgagttcaccctgaccaccctgaagaaggaggccaagttcgagctgagagccttccacgaggacaagaagcccagcaagctgttcgaggacgacgagcacgagaaggagcagtactgcatcagaaaggtgagacccagcgaggagatgctggagctggagaaggagagaagagagctgatcagaagccaggccgtgaagaagaaccccggcatcgccgccaagtggtggaaccccccccaggagaagaccatcgaggagcagctggacgaggagcacctggagagccacaagaagtacaaggagagaaaggagagaagagcccagcaggagcagctgctgctgcagaagcagctgcagcagcagcagcagcagccccccagccagctgtgcaccgcccccgccagcagccacgagagagccagcatgatcgacaaggccaaggaggacatcgtgaccgagcagatcgacttcagcgccgccagaaagcagttccagctgatggagaacagcagacaggccgtggccaagggccagagcacccccagactgttcagcatcaagcccttctacagacccctgggcagcgtgaacagcgacaagcccctgaccaaccccagaccccccagcgtgggcggcccccccgaggacagcggcgccagcgccgccaagggccagaagagccccggcgccctggagacccccagcgccgccggcagccagggcaacaccgccagccagggcaaggagggcccctacagcgagcccagcaagagaggccccctgagcaagctgtgggccgaggacggcgagttcaccagcgccagagccgtgctgaccgtggtgaaggacgacgaccacggcatcctggaccagttcagcagaagcgtgaacgtgagcctgacccaggaggagctggacagcggcctggacgagctgagcgtgagaagccaggacaccaccgtgctggagaccctgagcaacgacttcagcatggacaacatcagcgacagcggcgccagcaacgagaccaccaacgccctgcaggagaacagcctggccgacttcagcctgccccagaccccccagaccgacaaccccagcgagggcagaggcgagggcgtgagcaagagcttcagcgaccacggcttctacagccccagcagcaccctgggcgacagccccctggtggacgaccccctggagtaccaggccggcctgctggtgcagaacgccatccagcaggccatcgccgagcaggtggacaaggccgtgagcaagaccagcagagacggcgccgagcagcagggccccgaggccaccgtggaggaggccgaggccgccgccttcggcagcgagaagccccagagcatgttcgagcccccccaggtgagcagccccgtgcaggagaagagagacgtgctgcccaagatcctgcccgccgaggacagagccctgagagagagaggccccccccagcccctgcccgccgtgcagcccagcggccccatcaacatggaggagaccagacccgagggcagctacttcagcaagtacagcgaggccgccgagctgagaagcaccgccagcctgctggccacccaggagagcgacgtgatggtgggccccttcaagctgagaagcagaaagcagagaaccctgagcatgatcgaggaggagatcagagccgcccaggagagagaggaggagctgaagagacagagacaggtgctgcagagcacccagagccccagaaccaagaacgcccccagcctgcccagcagaacctgctacaagaccgcccccggcaagatcgagaaggtgaagcccccccccagccccaccaccgagggccccagcctgcagcccgacctggcccccgaggaggccgccggcacccagagacccaagaacctgatgcagaccctgatggaggactacgagacccacaagagcaagagaagagagagaatggacgacagcagcgtgctggaggccaccagagtgaacagaagaaagagcgccctggccctgagatgggaggccggcatctacgccaaccaggaggaggaggacaacgagtag

SEQ ID NO: 242024 - DNA, 3273 bp, Artificial Sequence
  derived and/or modified sequence
atggccgaagccgagttgcataaagagaggctacaagcaatcgccgagaagaggaaacggcagacagaaattgagggaaaacgccagcagctggatgagcaaatactgctgctccagcacagtaagtcaaaagttttgagggaaaagtggctgctacaaggtatacctgccgggacagctgaggaggaggaggcacgacgaagacagtcagaagaggatgagtttcgggtcaaacagttagaggacaacatccagcgcctggagcaagaaatacagactctagagtctgaggagtctcaaattagtgctaaagagcagattattcttgagaagttaaaggagactgaaaagtcatttaaagattttcagaaaggcttttcttcaactgatggtgatgccgtgaactacatctcaagccaacttccagatttgcctatactgtgttccagaaccgccgagccatcccccggtcaagatggcacttctcgggcggccggcgtcggctgggaaaatgtgctactcaaagagggtgagtccgcctcaaacgcgactgagacaagcgggccagatatgactataaaaaagccgccccagctgtccgaggacgatatttggctcaagtccgagggcgacaactacagcgccaccctactggaacccgctgcgagctctctcagcccagaccacaaaaacatggagatcgaagtctcagtagccgagtgtaagtctgtgccaggcattacgtccactccccacccgatggatcatcccagcgctttttatagccccccgcacaacgggttactcaccgaccaccacgaatcattggacaacgacgttgctagggaaattagatacctggatgaggtgctggaagcaaactgctgcgacagtgccgtggacgggacttacaacgggaccagctctccagagccgggtgctgtggtgctcgtcggtgggttgagcccacccgtccacgaagccacacagccagagcctaccgagcgaacggcctccaggcaggcaccaccccatatcgaacttagcaatagctccccggatccgatggccgaggctgaacgcactaatggacactctccttcccagccccgggatgctcttggggattctctccaggtgccagtctctccttcatctaccacaagctccagatgctcctctcgggatggtgagttcacactcaccacactgaagaaagaggcaaagttcgagctccgggcctttcacgaagacaagaaaccaagtaaactcttcgaggacgacgaacacgaaaaagagcagtactgcattcgcaaagtacgaccttctgaggagatgctggagctcgagaaggagcgccgcgagctgattcggagccaagccgtcaaaaaaaacccaggtatcgccgcaaagtggtggaaccccccccaggagaagaccatcgaagaacagttagacgaggagcacttagaatcccacaagaaatacaaagaacgaaaggagaggagagcccaacaggagcagctactgcttcagaagcagttacagcagcagcagcagcagcctccatcccaattgtgcaccgctccagcgtcatcacacgagagagcttccatgattgataaagcaaaggaggacattgtcactgaacagattgatttcagtgccgctagaaaacagtttcagctcatggagaactctaggcaagccgtggcaaaaggacaatctacgccaagactattttccattaagccattctataggcccttgggaagcgttaactcagacaagccattgacaaatcctagacccccgtcagtcggtggccccccggaagatagtggagctagtgctgcaaaggggcaaaaatcgcctggggcccttgaaaccccctctgcagctgggtctcagggcaatacggcctcccagggaaaagagggaccctatagcgagcccagcaagcgaggtcccctctctaaactttgggcagaggacggcgagttcactagtgccagggcagtccttacggtggtcaaagacgatgatcatggaatccttgatcagttctctcgttccgttaacgtcagcttgacacaggaggagctggacagtgggctggacgaactgagcgtgcggtctcaggacacaaccgttctggaaactttaagcaatgatttttctatggataacattagtgattcaggagcatccaacgaaacaaccaatgctcttcaggagaattctctggcagacttcagcctgccacaaacgccccagactgataacccctccgaaggccggggggaaggggttagcaagagctttagcgatcacggtttctactcaccttctagtacacttggggactcccccctagtcgacgatcctttggaataccaggccggtctgctggtccagaatgccattcaacaggccattgccgaacaagtggacaaagccgtctcgaaaacaagccgggacggcgctgaacaacaggggcccgaggccaccgtggaggaggctgaggccgcagcgttcgggagcgagaaaccacagtcaatgttcgaacctccacaggtatctagccctgtgcaggaaaagagagacgtcctccctaagattcttcctgcagaagaccgggctctcagagagcggggaccgccccagccactcccagctgtccagccaagtgggcctatcaatatggaggaaacccggcccgaaggaagttatttctctaaatattctgaagctgccgaactccggtcgactgctagtctgctggctacccaggagtctgatgtcatggtgggaccatttaagctgcggtcacgcaaacaaagaacactgagcatgattgaagaggagattagagcggcacaggagcgcgaggaggagctgaagagacagcgccaagtgcttcagtctacacagagtcccagaaccaaaaacgcaccatcgctgcccagccggacatgttataagactgctcctgggaaaatcgagaaagtgaagcccccacctagccccacaaccgaagggccaagtctgcagccggacttagccccggaggaggctgccggaacacagcgccccaagaacctgatgcagactctgatggaggactacgagacacacaagtctaaaagaagggagagaatggacgactccagcgtgctggaggccacaagagtgaatcggcggaagtcggctctagccctacggtgggaggcaggcatatatgccaaccaagaggaagaggacaacgaatag

SEQ ID NO: 242025 - DNA, 3273 bp, Artificial Sequence
  derived and/or modified sequence
atggccgaggccgagctgcacaaggagcggctgcaggccatcgccgagaagaggaagaggcagacagaaattgagggcaagaggcagcagctggatgagcagatcctgctgctgcagcacagcaagagcaaggtgctgcgggagaagtggctgctgcagggcatcccagctggaacagctgaggaggaggaggcccggcggcggcagagcgaggaggatgagttccgggtgaagcagctggaggacaacatccagaggctggagcaggagatccagaccctggagagcgaggagagccagatcagcgccaaggagcagatcatcctggagaagctgaaggagacagagaagagcttcaaggacttccagaagggcttcagcagcacagatggagatgctgtgaactacatcagcagccagctgcctgacctgcccatcctgtgcagcaggacagctgagcccagccctggccaggacggcaccagcagagctgctggggtgggctgggagaatgtgctgctgaaggagggggagagcgccagcaatgccacagagaccagcggccctgacatgaccatcaagaagccaccccagctgtctgaagatgacatctggctgaagtctgagggggacaactacagcgccaccctgctggagcctgctgccagcagcctgagcccagaccacaagaacatggagattgaggtgtctgtggccgagtgcaagtctgtgcccggcatcaccagcaccccccaccccatggaccaccccagcgccttctacagccccccccacaacggcctgctgacagaccaccacgagagcctggacaatgatgtggcccgggagatccgctacctggatgaggtgctggaggccaactgctgtgacagcgctgtggatggcacctacaacggcaccagcagccctgagcccggggctgtggtgctggtgggcggcctgagcccccctgtgcatgaggccacccagcctgagcccacagagaggacagccagccggcaggccccaccccacatcgagctgagcaacagcagcccagaccccatggccgaggccgagaggaccaacggccacagccccagccagcccagagatgccctgggggacagcctgcaggtgcctgtgagccccagcagcaccaccagcagccgctgcagcagcagagatggagagttcaccctgaccaccctgaagaaggaggccaagtttgagctgcgggccttccacgaggacaagaagcccagcaagctgtttgaagatgatgagcacgagaaggagcagtactgcatcaggaaggtgcggcccagcgaggagatgctggagctggagaaggagcggcgggagctgatccgcagccaggccgtgaagaagaaccctggcattgctgccaagtggtggaaccccccccaggagaagaccatcgaggagcagctggatgaggagcacctggagagccacaagaagtacaaggagaggaaggagcggcgggcccagcaggagcagctgctgctgcagaagcagctgcagcagcagcagcagcagccccccagccagctgtgcacagccccagccagcagccatgagcgggcctccatgattgacaaggccaaggaggacatcgtgacagagcagattgacttctctgctgccaggaagcagttccagctgatggagaacagccggcaggccgtggccaagggccagagcacccccaggctcttcagcatcaagcccttctaccggcccctgggctctgtgaacagcgacaagcccctgaccaacccccggccccccagcgtgggcggccccccagaggacagcggggccagcgctgccaagggccagaagagccctggggccctggagacccccagcgctgctggcagccagggcaacacagccagccagggcaaggagggcccctacagcgagcccagcaagaggggccccctgagcaagctgtgggccgaggatggagagttcaccagcgcccgggctgtgctgactgtggtgaaggatgatgaccacggcatcctggaccagttcagccgctctgtgaatgtgtccctgacccaggaggagctggacagcggcctggatgagctgtctgtgcgcagccaggacaccaccgtgctggagaccctgagcaatgacttctccatggacaacatcagtgacagcggggccagcaatgagaccaccaatgccctgcaggagaacagcctggccgacttcagcctgccccagaccccccagacagacaaccccagcgagggccgcggggagggcgtgtccaagagcttcagtgaccacggcttctacagccccagcagcaccctgggggacagccccctggtggatgaccccctggagtaccaggccggcctgctggtgcagaatgccatccagcaggccatcgccgagcaggtggacaaggctgtgtccaagaccagcagagatggagctgagcagcagggccctgaggccaccgtggaggaggccgaggccgccgccttcggcagcgagaagccccagagcatgtttgagcccccccaggtgagcagccctgtgcaggagaagagagatgtgctgcccaagatcctgcctgctgaggaccgggccctgcgggagcggggccccccccagcccctgcctgctgtgcagcccagcggccccatcaacatggaggagaccaggcctgagggcagctacttcagcaagtacagcgaggccgctgagctgcggagcacagccagcctgctggccacccaggagagtgatgtgatggtgggccccttcaagctgcggagcaggaagcagaggaccctgtccatgattgaggaggagatccgggccgcccaggagcgggaggaggagctgaagaggcagaggcaggtgctgcagagcacccagagccccaggaccaagaatgcccccagcctgcccagcaggacctgctacaagacagcccctgggaagattgagaaggtgaagcccccacccagccccaccacagagggccccagcctgcagcctgacctggcccctgaggaggccgccggcacccagaggcccaagaacctgatgcagaccctgatggaggactatgagacccacaagagcaagaggcgggagaggatggatgacagctctgtgctggaggccaccagggtgaacagaaggaagagcgccctggccctgcgctgggaggccggcatctatgccaaccaggaggaggaggacaatgaatag

SEQ ID NO: 242026 - DNA, 3273 bp, Artificial Sequence
  derived and/or modified sequence
atggccgaggccgagctgcacaaggagcggctgcaggccatcgccgagaaacgaaaaaggcagactgagatcgaaggaaaacggcagcagcttgacgaacagatactattgctgcagcacagcaagtcaaaagtgttacgggaaaaatggcttctgcaaggaattcctgcagggacagcagaggaggaagaggctaggcgacggcagagcgaagaggacgagttccgcgtcaagcaattagaggacaacatccagagactggaacaggagatccagacactagagtccgaagaatcacaaatttcagcaaaagaacagatcatactcgaaaaacttaaggagacagaaaagtcttttaaagatttccaaaaagggttctcatccactgacggcgatgctgtaaattacatatccagtcagctacctgacctccctatcttgtgttcacgtaccgctgagccatcccctgggcaggatgggacaagccgtgccgccggagtgggttgggaaaacgtgctgttaaaagagggcgagagcgccagtaacgctactgagacttcaggcccagacatgactattaaaaagcccccccagctgtctgaagacgatatctggcttaagagcgagggggataactatagtgctaccctcttagagccagcagcttcatccctctcccctgatcacaaaaacatggaaatagaggtgagcgttgcagaatgcaagtccgtcccggggattacttcgaccccacacccgatggaccacccaagcgcgttttactcccccccacataatgggttacttaccgaccatcacgagagcctagacaacgatgtcgctagagagataaggtacctcgatgaggttcttgaagccaactgctgtgacagtgctgtggacggaacttataacggcactagcagtcctgagccgggagctgttgtgctggtgggaggcctatcccctccagttcacgaagccacgcagccagaaccaactgaaagaaccgcctcccgtcaggctcctcctcatatcgagctttctaactcaagtcctgatcctatggccgaggccgaacgcaccaacgggcacagcccctcccagccaagggatgccctgggcgactcattgcaggtccctgtgtcaccttcctctactacttcatccagatgcagctctcgagacggcgagttcactctcaccaccctgaaaaaagaggccaaattcgaactcagggccttccatgaagataaaaagccctccaaacttttcgaggacgacgagcatgagaaggaacagtattgcatacgaaaggtcagaccttccgaggaaatgctcgagctggagaaggagagacgggaactgattagaagccaggctgtgaagaaaaatccaggcattgctgccaaatggtggaatcctccacaggagaagaccattgaagagcagctagacgaagagcatttggagagtcacaaaaagtataaggaacgcaaagagagacgagctcaacaggagcagctgctcctgcagaaacagttacagcagcagcagcagcagcccccatcacagctttgtactgctccagcttcttctcacgaaagagcctccatgatcgataaggcaaaagaggacatcgttaccgaacagatagatttttctgcggccagaaagcagttccagctcatggaaaactccaggcaggccgtggccaaggggcagtcaactccaaggctctttagtattaaaccattctaccgcccgctgggctccgtcaattctgataagccattaacgaatccacgcccccccagcgtcggcggaccacccgaggacagcggggcatctgccgcaaagggccaaaagtcacccggcgctctggagaccccctctgccgccggtagccagggtaacaccgcctcccagggaaaggaggggccgtactctgagccatctaagcggggtcctctctccaagctgtgggccgaggatggcgagttcaccagcgctagagctgtgcttactgtcgtcaaagatgacgatcacggtatactggatcagttctccaggagcgtaaatgtgtcccttacacaggaagaacttgatagtggcctagacgagttgtcagtccgctctcaagatacaacagtcctggagactctcagcaacgactttagcatggacaacatatcagacagcggagcatcaaacgagaccacaaatgccctacaggagaacagcctggccgattttagcctccctcaaactccccagactgacaatcccagtgagggtaggggagaaggggtgtccaagagcttttctgatcatggcttttacagcccgagtagcacactcggggactcaccactggtggacgatcccctggaatatcaggctggactattagtgcagaacgcgatacagcaggcgatcgctgagcaagtggataaagccgtgtccaagacttccagggatggggctgaacagcaagggccagaggccaccgtagaagaggcagaagcagcagcctttggatcagaaaagccccagtccatgttcgagccacctcaggttagctctcctgttcaagaaaagagggatgtcctgcccaaaattttacctgcagaagaccgggcactgagagagagaggccccccccagcccctgcccgcagtccaacccagtggacctatcaatatggaagagacgcgacccgagggctcatatttctccaaatattcagaagctgccgaattgcgctctacggccagtctgttggcgacccaggagagcgacgtcatggtaggccctttcaaactgaggtcccgaaagcaacgaactctgtccatgatcgaggaggagataagagccgcgcaagagcgcgaggaggagttgaaacgacagcgccaagtgctgcagagcactcagtctcctcggacaaaaaacgcgccctctttaccctcccgaacatgctataagactgcccccgggaaaatcgagaaggtaaagcccccaccctcgccgacaacggaaggcccctctctccagcccgatctagcccctgaagaagccgctggcacacaacgccctaaaaacctgatgcagacgctgatggaggactacgagacccataagagcaagagacgggagagaatggacgattcttccgtacttgaggccactcgcgtcaacagaagaaaaagcgcactggcactgagatgggaagccggaatctatgccaaccaagaagaggaggacaacgagtag

SEQ ID NO: 242027 - DNA, 4718 bp, Artificial Sequence
  derived and/or modified sequence
cctctttcccctgcctgtgtgcccttctccaggatggcagaggcggaattgcacaaggaaaggctgcaagccatagcagaaaaaagaaagaggcagactgaaatagaaggcaagcgacaacagcttgacgagcagatacttctgctgcagcattccaagtccaaagtgcttcgggagaaatggctgctgcagggcatacccgctggaactgccgaagaggaggaagccaggaggcggcagtctgaagaggatgagttcagagtcaagcaacttgaagataacattcagaggctggagcaagaaatacaaacgctagaaagtgaagagtcccagatatctgccaaagagcaaatcatcctagagaaactgaaggaaacagaaaaatccttcaaggactttcagaagggtttctccagtacggatggagatgcagtaaattacatttcctcccagcttcccgacctgccaatcctctgttcacgaacagcagaaccatcacctgggcaggacgggaccagcagagcggctggagtcgggtgggagaatgtgctgctaaaggaaggtgagtcagcctcgaacgccacagaaacatccggcccagacatgactatcaagaagcctccccagctttctgaggatgatatctggctaaaaagcgagggagacaactatagtgccaccctcctggagcctgctgccagctctctttccccagatcacaaaaacatggaaattgaggtgtctgttgcagaatgtaaaagtgttcctggaatcacctctaccccacatcccatggaccatccctccgctttctattcacccccgcataatggcctccttactgatcaccacgaatccctggataatgatgttgccagagagatccgctatctagatgaggtgctagaggccaactgctgtgattctgctgtggatggaacgtacaatggaacatcctccccagagcctggtgcagtggttctggtgggcggcctaagcccccctgtccacgaggcgacccagccagaacccactgaaagaacagctagccggcaggcacctcctcacatcgagctcagtaatagcagccctgaccccatggcagaggcagaaagaacaaatggccattcccccagccagcctagagatgcgctgggggacagcctgcaggtgcctgtcagccccagctccacaaccagctcacggtgttcttcccgagatggagagttcactctcaccacactgaaaaaggaggccaagtttgagctgcgtgccttccatgaggacaagaagccctccaagctctttgaggatgacgagcatgagaaagaacaatactgcattagaaaagtgaggccttcagaggagatgctggagctggaaaaggagaggagagagctcatccgcagccaggccgtcaagaagaatcctggcattgcagcaaaatggtggaatcccccgcaggaaaaaaccatcgaggagcagctggacgaggaacatctggagtcgcacaaaaagtacaaggagcgcaaagagagaagggcacagcaggaacagttgctgctgcagaagcagttacagcagcagcagcagcagcccccatcgcagctctgcacagcccctgcctcttctcatgaacgcgcaagcatgattgacaaagcaaaggaggacattgtcacagagcagatagatttctctgctgctcgcaaacaatttcagctgatggagaattccaggcaagcggtggccaagggccagagtacacccaggctgttctccatcaagcctttctacaggcctctggggtcagtcaactcagacaagccactgactaatccgagaccaccttctgtcgggggacctccagaagacagtggtgcctcagccgccaagggacagaaatcccccggtgccctggagaccccatcggcagcaggaagccagggcaacacagcctctcaggggaaggaagggccctacagcgagccttctaaacgtgggcccttatctaaactgtgggctgaggatggagaatttacgagcgcccgggctgtcctcactgtggtcaaggatgatgaccatgggattttggatcagttctcaagatctgtcaatgtctccttgacccaagaggagcttgactctggtctggacgaattgtcggtgaggtctcaggataccacagtcctggagaccctatccaatgatttcagcatggacaacatcagtgacagcggggcatccaatgagacaaccaatgccctccaggaaaattcactggctgatttttctctgccccagacaccacaaactgacaacccctcagagggccgaggagaaggcgtctccaagtcatttagtgatcatggtttctattccccttcctccacgctgggggactctccgttggttgatgaccccttggagtatcaggctggcctcctggtgcagaatgccattcaacaagccatagccgagcaggtggataaagctgtgtccaaaaccagcagggatggagcagagcaacagggacctgaagcgactgtagaggaagctgaagctgcggctttcggctcagaaaagcctcagagcatgtttgagccacctcaggtgtcttctcctgttcaagagaaaagggatgtattaccaaagattctgcctgctgaagacagggcgctcagggaaagggggcccccccagccactgccagctgtgcagcccagtggcccgattaacatggaggagaccaggcccgaaggaagctatttcagcaagtactcggaggcagctgagctgagaagcacagcctccctcctggccactcaagaatctgacgtgatggttgggcctttcaagctgaggtccaggaaacagcggactttgtccatgattgaggaagagatccgagcagctcaggaaagggaagaggagctgaagaggcagagacaagtcttgcagagtacgcagagccccaggacaaagaatgccccatcactgccctccagaacatgctacaaaactgctccagggaaaatagagaaagtcaaacctcctccatcccccaccactgaaggccccagcttgcagcctgacttagcccctgaagaggctgccggaacccagcggcccaagaatctgatgcagaccctcatggaagactatgagacacacaaatctaaaaggcgcgagagaatggatgatagtagtgtcctcgaggccacacgggttaatcgaagaaagagcgcactggctttgcgctgggaagcagggatctatgccaaccaggaggaagaagacaacgaataaacttccttcaacccaggaagcgtctttggtgcttgggagaccaagaaaccaagaaattaacaactgaaagcattttaatggactatttattaaagtgcaaacaaactcagcaatccttatgtagaccagaagctgcaatatacaatgatgaaaatgaaacgaaaaggaagtccccccatcagactctggacacccaggaatcaaaagagaaaggacttttttggtgactcaatcccagtgtctggtttggggccaatctacaatggatccaaaaggacaaaacatgttacaagcaaatcaacatagttgctgcaggcggaactgagaccagcctctctgggcgatgaaggacaatggtggtagggccacttagagagcagtagggcccaggctggtgcagcctacatggcacaggatatttccctgcaccagtttcccacctgtcacttgcagcatcagagggtgttgcattaactccattttctccagcagccataaaatgaatggcgtttctctccatatttgcccagaagaggcagttatgattccacttctcctacatttaattatttttaattgagaacaactcatgatcacaattcataaaatccatattttaagacaatagttcttcatgtcacaaacacaatctattctacatgaggaggctgagaaaggggaagagaaaaacaaaccaaatggatgatgttagctttaggatcgtgtctgcttataatattcactgatctgcagtttatgagaacacattttcacagttatgtttcttcataggaaaactatatttagtgggcaacaactatttttatgatgggatgggggagtatatacacgtatagaatctgtacgcgttgaacaacttggttcaagatggtgggggcatttttagagcggcaataattgaaaaaaaaggcgaactctgccttggagaggtagatgataagaaataaaaaggtgtttataactattttgtattataaagtgggccttagagataggaagaagaatgatggattccttttggatcaatcagaaaggaaacacgaaagaaaagtcaggaaggtagagagagaaaaagggagggaaggagaaagaatgggaataaaataaggaggtaagagatactatttttgctgagcaaccagtgtgtttcaggatgatacaaagaaaaatatagaatagaaataagtgcaggcttggaatcagctacaaatcctaaagatggggtgtgtgtggatgtgtgtgtgtgtgtgtgtacaccattgtgtgtttgtaaaatgtgtatgttcatgagtaagggtgtgtgtgtgtgtgtattaaaattccagagtgaccgtggcacttgggtgtacaggtaattcctccagagctgtttgctggcttcaggagtggag

SEQ ID NO: 242028 - DNA, 3273 bp, Artificial Sequence
  derived and/or modified sequence
atggctgaagcagagctgcacaaagagcgcctgcaggcaattgccgagaaacgaaagcgtcagacagagatcgaaggaaaacgccaacagttggatgagcagattctacttctgcaacattctaagtcaaaggtactgcgagagaaatggttgctccaagggataccagctggcaccgccgaagaggaggaagcaagacggagacagagcgaggaagacgagttccgggtcaagcagctggaggacaacatacaaaggttggaacaggagattcagacgctggagtcggaagaatcccagataagcgctaaggagcagataatcctggagaaacttaaagaaaccgaaaaatctttcaaagatttccagaagggcttttcgtctacggatggcgacgctgtgaattacatatccagtcagcttccggacctcccgattctgtgcagccgcacagcagagcccagcccaggacaggacggaacctccagggccgcaggcgtcggatgggaaaacgtgctactcaaagaaggtgaaagcgctagcaacgctactgaaacttcaggacctgatatgaccattaagaagccccctcagttgagtgaggacgacatctggctgaagtcagaaggcgataactactctgctaccctgctcgaaccagctgcatcttcactgagtccggaccataagaatatggaaatcgaagtctccgtcgccgagtgcaagtccgtgccaggaattacatctacccctcaccctatggaccaccccagtgctttttactcccccccacataacggtctgctaacagaccaccacgagagccttgacaatgatgtggctcgagaaatccggtacctggacgaagtgctcgaggccaactgttgcgactctgccgtggatggaacatacaatgggacatcatcgccagagcccggagccgtcgtgctcgtcggtggcctctccccccctgtccatgaggctacgcagcctgaacccacagagcggactgcatcacgccaggctcctccccatattgaactgtcaaactcatcccccgaccccatggcggaagcagagagaaccaacggccattctcccagccagcctcgagacgcacttggagattctttgcaggttcccgtcagccctagcagcacaaccagtagcagatgttccagcagagatggggagttcacgctgacgaccctaaaaaaggaggctaaatttgagctccgggctttccatgaggataagaagcctagtaagttattcgaagatgatgaacacgagaaagagcagtattgtatacgcaaggttagaccatcagaggagatgttggagcttgaaaaagagagaagggagctgattcgctcgcaagccgtcaagaaaaatcccggtatcgccgcaaagtggtggaacccgccacaggagaagaccatcgaagagcaactcgacgaggagcacttagagagccataagaagtataaagaacgaaaagagcggagggcccagcaagaacagctccttctgcagaaacagctgcaacaacagcagcagcagcctccctctcaactgtgcacagctccagcgtcttcccacgagcgggcttcaatgattgacaaagcgaaggaagacatagtgacagagcagattgacttttcggctgcccgaaagcagttccagctaatggaaaattcaagacaggcagtggctaaaggccagtccaccccaagactgttttcaattaagccattctaccgccctttaggaagtgtgaattccgataagccattgacaaatccacgcccaccttctgttggcggacctcctgaggattccggcgcttcggccgcaaagggacagaagtctcccggtgctctcgagactccttcggccgctggcagccaggggaataccgcctctcaggggaaagaaggaccctacagcgaaccatccaagcgcggtccattgagtaaactgtgggcagaggatggggaattcacatcagcaagggcggtgctgacagttgttaaggacgacgaccatgggatccttgaccagttctctcggagcgtgaatgtctccttaacacaggaggaactcgactctggattggacgaattgagcgtgcgctcacaggacaccacagtgcttgaaaccctcagcaacgatttcagtatggacaatatctctgacagtggggcaagcaacgaaactactaacgcactgcaggagaacagtctggctgacttttctctgcctcagactccacaaacggataacccatccgaaggaaggggagagggcgtcagtaaaagcttcagtgaccacggcttttactcgccttcctccaccctaggtgattcgcccttagttgatgatccactggagtatcaggctggactgttggtgcaaaatgccattcagcaggctatcgctgagcaggtagataaggcggtgtccaagacatcgcgcgacggggctgagcagcagggtcccgaggccacagtggaggaggccgaggccgctgctttcggttcagagaaacctcagagtatgtttgaaccccctcaggttagtagccccgttcaggaaaagcgggacgtgctgccaaaaattctgccagctgaagatagagctctcagggagcgtgggccaccccagccgcttcccgctgtgcagcccagcggaccaattaatatggaggagacgagaccagagggaagctattttagcaagtactcagaggctgccgagttacggtctactgccagcctgctggcaacgcaggagtctgacgtgatggtggggccatttaaacttcgttcacggaagcagcgcaccctctccatgatcgaagaggaaatccgggctgctcaagagagagaggaggagttaaagaggcaacgccaagtgttgcagtctacccagtcgcccagaaccaagaacgcaccttccctgcccagccgcacgtgttataaaaccgcaccgggaaagatcgagaaagtgaagccccctccatcacctaccaccgagggcccttctctgcagcccgacctggcccctgaggaggctgcaggaacccagcgacctaaaaacctgatgcagactttgatggaagactatgagacacacaagtcgaagcgcagagagaggatggacgactcgtctgtgcttgaagcaacccgcgtcaatcgtcgcaaatcggctttagcactgaggtgggaggctggtatatatgctaaccaggaagaagaggataacgaatag

SEQ ID NO: 242029 - DNA, 2580 bp, Artificial Sequence
  derived and/or modified sequence
atggaaattgaagtttctgtggccgaatgtaaaagcgtgccaggcattaccagtacaccgcaccccatggatcacccttccgctttttactcgcctccccacaatgggctgcttaccgaccaccatgaaagtctggacaacgacgtggcccgggagatccggtatctcgatgaggtactggaagccaactgttgcgattccgccgtcgatgggacttataacggcaccagcagtcccgaaccaggtgctgttgtgctagtgggtggcttgtcgccacccgtccacgaagccactcagcccgagccaacagagaggacagctagccgacaggctccaccccacatagagctcagcaacagtagccccgatcccatggccgaagcggagaggacaaacggccattcaccctcccaaccccgagacgccctcggcgattcattgcaggtgcccgtgtcaccctctagcaccactagcagcagatgtagcagcagagatggcgaattcacactcacaacactgaaaaaggaggctaaattcgagctcagggcctttcacgaggacaaaaaacccagtaagctgttcgaagacgacgagcacgaaaaggagcagtattgcatccggaaagtccggccaagcgaagaaatgctcgagctcgaaaaggagcgcagggagcttatccgctcccaggctgtcaaaaagaaccccgggattgcagccaagtggtggaaccctcctcaagaaaagacaattgaggaacagctcgacgaagagcatttggaaagccacaaaaagtacaaggaaaggaaggagagacgggcccagcaggaacagcttctgctgcaaaagcaattacagcagcagcagcagcagcctccctcgcagctatgtactgcccccgcatctagtcacgaaagggcctctatgatcgataaagctaaagaagatatcgtcacggagcagattgatttctctgccgcccgtaagcaattccagctaatggaaaatagtcgtcaggctgttgccaaaggtcaatccacaccccgcctgttctctatcaaacctttctaccggcccctcggctcagtgaattccgataaacctctcacaaatccccgtccacccagtgtcggggggccccccgaagatagcggtgcgtccgctgccaaggggcaaaaatcacctggtgccctggagacacctagtgccgccggcagccaggggaataccgcttcccaaggtaaagaaggaccttattctgaaccctccaaaaggggccctctgtctaagctctgggctgaggacggcgaattcacatctgcgcgggctgtgcttactgttgtgaaggacgatgaccacgggatcctcgatcagttttctaggtccgtgaatgtgagtctgacgcaggaggagctggactcgggcctggacgagctcagcgtccgtagccaagatacaaccgtcctggagactctctcgaatgacttctctatggacaacattagcgactccggggcttcaaatgagactacgaacgctcttcaagaaaactcgctggctgatttttcactcccacagaccccccagacggacaacccatccgagggccgaggcgaaggtgtatctaagtcattctcagatcatggattctattcaccaagcagcacattgggggactccccgctggtcgacgacccgcttgaatatcaggctggattgcttgtccagaacgccatccaacaggctatcgccgagcaagtcgataaggctgtgtctaagacatcgcgcgacggagctgagcagcaagggcccgaagctactgtggaagaagctgaggccgctgccttcggatccgaaaagccccaaagtatgtttgagccaccacaggtgtcttctcctgtccaggagaagcgtgatgtccttccgaaaatccttccggcagaggacagggccttacgcgagcgcggaccccctcagcctctccccgccgtgcagccctccggaccgattaatatggaagaaaccaggcccgaaggaagttatttctcaaaatattcagaggcggcagagctgcggagcaccgcatcccttctggcaacccaggaaagtgatgtcatggtgggccccttcaaactgaggagtcgaaagcagagaactctgagtatgatcgaggaggaaatcagggcagctcaggagagggaggaagagctcaaacgtcagaggcaggtgctgcagtcaacacagagccctagaaccaagaacgcaccatctctgcctagcaggacatgttacaaaaccgcccctggcaagatcgagaaggttaagcctcccccatccccaaccaccgagggaccttctctgcaacctgacctggcccctgaggaagccgcaggcactcagcgccccaagaatcttatgcagacactgatggaggactacgaaacacacaaatcgaagcggcgggagagaatggacgacagttcagtgctcgaggctacccgggttaatagaagaaagtcggcacttgccctgaggtgggaggcaggcatttatgctaatcaggaagaagaggataacgagtag

SEQ ID NO: 242030 - DNA, 3273 bp, Artificial Sequence
  derived and/or modified sequence
atggcagaggccgagcttcacaaggagcggctgcaggccatcgcggaaaaacgcaagaggcagaccgagatcgaaggaaagcgacagcagttggacgagcagattctcttgctccagcacagtaaaagcaaggtgcttagggaaaaatggctactgcagggaattcccgcaggcactgcggaagaagaagaggctagaaggaggcagagcgaggaagatgagtttcgagtcaagcagctggaagacaacattcagaggctggagcaggagatccaaacattagaatctgaggagtcacagataagtgcgaaggaacagataatcctggaaaagctgaaggaaactgagaagagtttcaaggatttccaaaagggcttcagcagcaccgacggtgacgccgtcaattacataagcagtcaactacccgatctcccaatactgtgttcccggaccgccgagccttcccctggccaagatggcacttcacgtgctgctggggtcgggtgggagaatgtgcttctgaaggagggagagtcggcatctaatgcaacagaaacatcagggccagatatgactattaaaaagcctccccagctgagtgaagacgatatctggctcaagagtgagggcgataattatagcgccactctcctggagcctgctgccagcagccttagccctgatcataaaaacatggagattgaagtatccgttgcagaatgcaaatccgttccgggcattaccagtaccccacaccccatggaccacccgtcagccttctacagtcctccacacaacggcttgctcacagaccatcatgaatccctggataatgatgtggccagagaaatacgttatcttgatgaggtgctcgaagcaaactgttgcgactccgccgtggatgggacctataacggaacttcgtcgccagagcctggcgctgtggttctggtcggcgggctgagtcctccagtgcatgaggccacgcagccagagcccaccgaaaggactgcaagccgtcaggcaccaccacatatagaactgtcgaattcctcccctgatcccatggcagaagccgaaagaactaatgggcacagcccctcacagccccgggatgctctcggcgactccctgcaggtacctgtcagtccgtcttcaacaacatctagcaggtgcagcagtagagatggcgaattcactctgaccaccctgaaaaaggaagcgaaatttgaactcagagcattccatgaggataagaagcccagcaaactgtttgaggatgatgaacacgagaaagagcaatactgcattcggaaggtgcgcccctccgaggaaatgctggagctcgagaaagaaagaagagaacttattcgaagtcaagccgtgaagaagaatcctgggattgctgccaagtggtggaatcccccacaagagaagacaatcgaggaacagcttgatgaggagcacctggagagtcataagaagtacaaggagcgcaaagaaagacgtgcgcagcaagaacaacttcttctacagaaacagctccagcagcagcagcagcagccaccttcacagctgtgcaccgctccggcttcctcccacgaaagagcatccatgattgataaggccaaggaggacattgtcactgagcaaatagattttagcgctgcgaggaagcagtttcaacttatggagaactcccggcaggcagttgcgaaaggacagagtactccgaggctgttttccattaagcccttttaccgtccgctgggctcagttaatagcgacaagccactgactaacccccggccaccctcagtgggcgggcctcctgaggattccggagcgtcagccgccaaagggcaaaagtcacctggcgcccttgagaccccaagcgccgccggctcccagggtaacacggcctcccagggtaaggagggcccctactccgagccgtccaagagaggtcctttaagtaagctatgggctgaagacggcgagttcacctcagctagggccgtgcttaccgttgtgaaggacgacgaccacggaatcctggatcagttctcacgtagcgtaaacgtttcattgacgcaggaggaattagactccgggctggatgaactgagcgtacggtcccaagacactacagtgcttgagacactgagtaacgactttagcatggacaacatatctgactccggtgcctccaacgaaaccactaatgccttgcaagagaacagtttggctgatttcagcctcccgcaaacaccccaaaccgataacccatctgaaggtcggggggaaggggtctctaagagcttttctgatcacggcttctattcaccaagttctactctgggggattccccactggtggatgatccattggagtatcaggccggacttcttgtccagaacgcaatccagcaagccatcgctgagcaagtcgacaaggctgtcagcaagacctccagggacggcgctgaacaacagggtccagaggcgaccgtggaggaggcagaggctgcagctttcgggagtgaaaaaccgcaatctatgtttgagccgccccaggtgtccagcccggtgcaggagaagcgcgatgtgttgcccaaaatcctgcccgcggaggacagggccctccgggagcgaggcccaccgcagccacttcctgcagtgcaaccaagcggccccataaatatggaagaaacgaggccggaaggctcctattttagcaaatattcggaagcagctgaactgcgtagcaccgcaagcctgctcgctacccaggagtctgatgtcatggtgggcccatttaaattacgctcacgcaaacagaggacgctcagcatgatcgaagaggaaatacgggctgcgcaagagcgggaggaggagctcaaacggcaaaggcaggtgctgcagtcaactcagagcccaaggactaaaaacgcaccatccctaccaagtcgtacctgttacaaaacagcccccggaaagatcgagaaagtgaagccgccccctagtcccactacagaggggccttctctccaacccgatctcgcacccgaagaagccgcaggtacacagcggcccaaaaacttgatgcaaaccctcatggaggactacgagacgcataaatctaagagacgtgagcgaatggatgattcatcagtactggaagccacgcgggttaacaggagaaaatctgccctggcactgcgatgggaggcggggatttatgctaaccaagaggaggaagataacgaatag

SEQ ID NO: 242031 - DNA, 2580 bp, Artificial Sequence
  derived and/or modified sequence
atggagattgaggtgtctgtggccgagtgcaagtctgtgcccggcatcaccagcaccccccaccccatggaccaccccagcgccttctacagccccccccacaacggcctgctgacagaccaccacgagagcctggacaatgatgtggcccgggagatccgctacctggatgaggtgctggaggccaactgctgtgacagcgctgtggatggcacctacaacggcaccagcagccctgagcctggagctgtggtgctggtgggcggcctgagcccccctgtgcatgaggccacccagcctgagcccacagagaggacagccagccggcaggccccaccccacatcgagctgagcaacagcagcccagaccccatggccgaggccgagaggaccaacggccacagccccagccagcccagagatgccctgggggacagcctgcaggtgcctgtgagccccagcagcaccaccagcagccgctgcagcagcagagatggagagttcaccctgaccaccctgaagaaggaggccaagtttgagctgcgggccttccacgaggacaagaagcccagcaagctgtttgaagatgatgaacatgagaaggagcagtactgcatcaggaaggtgcggcccagcgaggagatgctggagctggagaaggagcggcgggagctgatccgcagccaggccgtgaagaagaaccctggcattgctgccaagtggtggaaccccccccaggagaagaccatcgaggagcagctggatgaggagcacctggagagccacaagaagtacaaggagaggaaggagcggcgggcccagcaggagcagctgctgctgcagaagcagctgcagcagcagcagcagcagccccccagccagctgtgcacagccccagccagcagccatgagcgggcctccatgattgacaaggccaaggaggacatcgtgacagagcagattgacttctctgctgccaggaagcagttccagctgatggagaacagccggcaggccgtggccaagggccagagcacccccaggctcttcagcatcaagcccttctaccggcccctgggctctgtgaacagcgacaagcccctgaccaaccccaggcctccttctgtgggcggccccccagaagattctggggccagcgctgccaagggccagaagagccctggggccctggagaccccatctgctgctggcagccagggcaacacagccagccagggcaaggagggcccctacagcgagcccagcaagaggggccccctgagcaagctgtgggccgaggatggagagttcaccagcgcccgggctgtgctgactgtggtgaaggatgatgaccacggcatcctggaccagttcagccgctctgtgaatgtgtccctgacccaggaggagctggacagcggcctggatgagctgtctgtgcgcagccaggacaccaccgtgctggagaccctgagcaatgacttctccatggacaacatcagtgacagcggggccagcaatgagaccaccaatgccctgcaggagaacagcctggccgacttcagcctgccccagaccccccagacagacaaccccagcgagggccgcggggagggcgtgtccaagagcttcagtgaccacggcttctacagccccagcagcaccctgggggacagccccctggtggatgaccccctggagtaccaggccggcctgctggtgcagaatgccatccagcaggccatcgccgagcaggtggacaaggctgtgtccaagaccagcagagatggagctgagcagcagggccctgaggccaccgtggaggaggccgaggccgccgcctttggaagtgagaagccccagagcatgtttgagcccccccaggtgagcagccctgtgcaggagaagagagatgtgctgcccaagatcctgcctgcagaagatcgggccctgcgggagcggggccccccccagcccctgcctgctgtgcagcccagcggccccatcaacatggaggagaccaggcctgagggcagctacttcagcaagtacagcgaggccgctgagctgcggagcacagccagcctgctggccacccaggagagtgatgtgatggtgggccccttcaagctgcggagcaggaagcagaggaccctgtccatgattgaggaggagatccgggccgcccaggagcgggaggaggagctgaagaggcagaggcaggtgctgcagagcacccagagccccaggaccaagaatgcccccagcctgcccagcaggacctgctacaagacagcccctgggaagattgagaaggtgaagcccccacccagccccaccacagagggccccagcctgcagcctgacctggcccctgaggaggccgccggcacccagaggcccaagaacctgatgcagaccctgatggaggactatgagacccacaagagcaagagaagagagaggatggatgacagctctgtgctggaggccaccagggtgaacagaaggaagagcgccctggccctgcgctgggaggccggcatctatgccaaccaggaggaggaggacaatgaatag

SEQ ID NO: 242032 - DNA, 2580 bp, Artificial Sequence
  derived and/or modified sequence
atggagatcgaggtgagcgtggccgagtgcaagagcgtgcccggcatcacatctacaccccacccaatggatcacccttctgccttctactcacctccccataacgggctattgaccgaccaccacgaatcgctagacaacgacgtggctagggaaatcagatatctcgacgaggttcttgaagcaaattgctgtgatagcgccgttgacggcacctacaacggcacctccagtccagaaccaggagccgtcgtactggtggggggactcagcccccccgtccacgaggcaacacaacccgaacctactgagcggacagccagccgccaagccccaccccacattgaactgtccaatagttcccccgacccaatggccgaggctgagagaaccaatggacacagcccatcccagcccagagacgctctgggcgactccctgcaggtccccgtgtcaccaagctccacgacctcctctcggtgctccagtcgtgatggcgaattcacacttaccacactgaagaaggaagcaaaatttgagttgcgtgcgtttcacgaagacaagaaacctagcaagttgttcgaggacgacgagcatgagaaagagcagtattgtattcggaaggtgcggcctagtgaggaaatgctagagctagagaaggaaagacgggaactgataaggagtcaggccgttaaaaagaacccaggcatcgcagcaaaatggtggaacccaccccaagagaaaaccatcgaagagcaacttgatgaggagcatctcgagtctcataaaaagtacaaggaacggaaagagcgacgtgcacaacaggagcagctactcctacagaagcagttacagcagcagcagcagcagcctccatcccagttgtgtactgctcccgccagctcacatgagagggcatcgatgatcgacaaggcaaaagaggatatcgtcacagaacagatcgacttctctgcagctaggaagcagtttcagctaatggagaattccaggcaggccgtagcgaaagggcaatccaccccacggctgttcagtattaaacccttctatcgccccctgggaagtgttaattcagataagcctctgacaaatcctaggccaccatcagtgggcggaccgcccgaggatagtggggcttcagccgccaaaggacagaagtccccaggcgcactggagactccgtcagctgctgggtcccagggaaatactgcttctcaggggaaggagggtccatacagtgagccgtccaagagaggccccctctcgaaactgtgggctgaagacggcgagttcacttctgctcgcgctgtgctgacggttgtgaaggatgacgatcatggaattttggatcagttttcccgctcagttaacgtgtccctcactcaggaggagctcgatagtgggttggacgagctcagtgtgcgatcacaggatactacagtactcgaaaccttgtcgaatgacttctccatggataatatctctgatagcggtgcatcaaacgaaacaactaacgccctccaagagaactcactggccgatttctccctgcctcagacccctcagacggataatccttccgagggtcgtggggagggcgtcagcaaaagcttcagcgaccacgggttctactctcccagcagcacattaggggactcccccctggttgatgaccctttagagtaccaggccggcctcctcgtgcagaacgccattcaacaggccatagccgagcaggtggacaaggctgttagtaaaacatcgcgggacggggccgagcagcagggaccggaagcaaccgtcgaagaggcagaggcagcggccttcgggagtgagaaaccccaaagtatgttcgaaccgccgcaggtttccagccctgtgcaggaaaagcgagatgtcctccctaagattctgcccgctgaggacagggctctgcgagaacggggccctccccagcctttgccggcggttcagcctagtggacccattaatatggaggagacccgccctgaggggagctatttttctaagtactcagaagccgccgagctgcggtcaaccgcctcgctgctagctacccaggagtctgatgtgatggtgggcccgttcaagctgcggtctaggaagcagagaactctgtcgatgattgaggaggagattagggcggctcaggaacgcgaggaggaacttaaacggcagcgacaagtgctgcaaagtactcaatctcctcgcacaaagaacgccccttccctccccagtaggacgtgctataaaaccgctccgggcaagattgaaaaggtgaaacccccgccgtcacccactaccgaggggccctctctccaacccgatctggccccggaggaagcagcagggactcagaggcccaagaatcttatgcagactctaatggaagattatgagacccataaaagtaaacgccgcgaaaggatggatgattcttccgttttagaggctactcgggtaaacagacgaaagagcgccctcgcgcttcgctgggaggcgggcatctacgctaaccaggaagaggaggataatgaatag

SEQ ID NO: 242033 - DNA, 3273 bp, Artificial Sequence
  derived and/or modified sequence
atggccgaggccgagctgcacaaggagcggctgcaggccatcgccgaaaaaaggaaaagacagacagagatcgaagggaagagacagcagctggacgagcagatcctcctgttacagcatagcaagtcaaaagttctgcgggagaaatggctcttgcagggcattcctgccggtactgcagaggaagaggaggcccgccgccggcagagcgaggaggatgaatttcgggtcaaacagctcgaagataacatccagagactggagcaagaaatacagactcttgaaagcgaggagagtcagatttcagctaaggagcagattatcctagagaaactcaaggaaactgagaagtctttcaaggatttccagaaaggcttttcctcaactgatggcgacgctgtaaattatatcagcagtcaactccccgaccttcctattctgtgctctaggacagccgagccaagtcccggccaagacggtacctccagggcagccggcgtaggctgggagaacgtgttactaaaggaaggggagtccgcatctaatgctacagagacctcgggacccgatatgacaatcaagaagcctccacagttgagtgaggatgacatctggctaaaaagcgaaggggataattacagtgctacccttcttgaaccggccgccagctcgctttcccctgaccacaaaaacatggagatagaggtgtctgtggctgaatgtaagtccgtgccagggattacaagcacccctcaccctatggatcacccgtcagcattctactctccaccccataacggcctcctaaccgatcatcatgagtcgttggacaacgacgtggcgagggagattagatacctcgacgaagtgctggaagcaaactgctgtgattctgccgtggatggaacctacaacggaacgagcagtcctgaacctggagctgttgtactggtcggcgggctctccccaccggttcacgaggcgacacagcctgaacccactgagcggaccgcgtcgcgccaggcgccaccacacattgaactgtctaactcctcgcccgaccctatggccgaagcggaacgcaccaatggccactccccctcacagcctcgggacgcattaggagatagcttgcaggtgccggtatccccatcctccacaacatcctcacgctgttcttcgagagacggagagttcactctcacgacattgaaaaaggaagcgaaattcgaactgagggcctttcatgaagataaaaagccaagcaagcttttcgaggatgacgaacatgaaaaggaacagtactgtattcgaaaggtaagaccgtctgaggaaatgcttgagctggagaaggaacgccgggagctcattaggtcacaggccgtaaagaaaaatccaggcatcgcagcaaagtggtggaacccgccccaggaaaagacaatcgaagagcagctagatgaggagcaccttgagagccacaaaaagtacaaggagagaaaagaaaggcgtgcacaacaagagcagctgcttctgcagaagcagttgcaacagcagcaacaacaaccacccagccagttatgtacagctcctgctagcagccacgagcgtgcgtctatgattgataaggccaaagaggatatcgtgaccgagcaaattgacttttccgctgcccggaaacagttccagctgatggagaattcaagacaggcggtcgcaaaaggccagtcaaccccccggctgttcagcattaagcctttttacaggccactcgggtcagtgaactcagataagccactgacaaacccgagaccaccctccgtcggcggtcctcctgaggatagtggcgcatccgccgctaagggccagaagtctcccggcgcattagagactccaagcgctgctggatcacaaggtaacacagcgtctcaaggcaaagaaggcccatatagcgagcccagcaaaaggggcccgctgtccaaattatgggcagaggacggggagtttacgtccgcacgcgctgtattgacagttgtgaaggacgacgaccacggcatcctcgaccaattttcccgcagcgtgaatgtgtccctcactcaggaggagctggattctggtctggacgagttaagtgtccgcagtcaggatactacagtgctggagacactgtctaatgacttttctatggataatattagcgacagcggcgcttcgaatgaaaccactaacgccctgcaggaaaacagtctggcagactttagcctcccccagacccctcaaacggacaatccaagtgagggaaggggcgagggggtgtcgaagagcttttcagaccatggattttacagtccatcttcgactctgggagacagcccactggtggatgatccactggagtatcaggccgggctgctggtgcagaacgctattcagcaggcaattgctgaacaagtggataaggctgtcagcaaaacttccagggacggcgccgagcagcagggtccagaggcaaccgtcgaagaagccgaggctgctgccttcgggagcgaaaaaccccagtctatgtttgaacctccccaggtgagtagtcccgtgcaagagaaacgcgatgtcttgcctaaaatcctacccgctgaggatcgggctttgcgggagcggggacctcctcagccgcttcccgccgtccagccaagtgggcctattaacatggaagagacgcggcccgaggggtcttactttagcaaatatagcgaggcagctgagctccgatcgaccgcttccctactggcgacgcaggaatccgacgtgatggtagggccgtttaaactccggtcccggaaacaaaggactttgagtatgattgaagaggagattcgggcggctcaggagcgagaagaggagctaaaacggcagcgccaggtcctccaatcaactcagtccccacggactaagaacgcccccagcctgccctcccgcacttgctacaagaccgcaccaggaaagatagaaaaggttaaacctcctcccagtcctactacagaaggcccttcgctgcagcctgatttggctcccgaggaagcagctggaacgcagagaccaaagaatttgatgcaaacacttatggaagattatgagacacacaagtctaaacgacgcgagaggatggatgatagtagtgtcctcgaggccacaagggtgaataggcggaagtcggccctcgcattgcgttgggaggcaggaatctatgccaatcaggaggaggaggacaacgagtag

SEQ ID NO: 242034 - DNA, 2580 bp, Artificial Sequence
  derived and/or modified sequence
atggaaattgaagtgtctgtggccgagtgcaaaagcgtcccaggaatcacatcgactccccatcctatggatcaccccagtgccttctattctccgcctcacaacgggctgcttaccgatcatcacgagtctctcgataacgatgtcgcccgagagattcggtacctagacgaggtactggaggcaaactgctgtgatagcgccgtggacggaacttataacggtacctccagcccggagccaggcgctgttgtgttagttggcggacttagcccaccagtccatgaggccacccagcccgagcccactgaaagaacagcttccagacaggcccctccccacatcgagctttctaactcttcgccagaccccatggctgaggctgaaagaaccaacgggcattcaccttctcagccccgtgatgcactgggggatagcctgcaggtgcccgtgtctcctagttctactacaagtagccgttgttcatcaagggatggggaattcacattgacgacgttgaagaaggaggccaagtttgagctgagggcatttcacgaggataagaagccctctaagctcttcgaagacgatgagcatgagaaggaacaatactgcataagaaaagtgagaccctctgaggaaatgctggaattggaaaaggagcgccgtgaactgattcggtctcaggccgtgaagaagaacccaggcatagcagctaaatggtggaacccaccccaggaaaaaacaatagaggagcaactcgatgaggaacacttggaaagccacaagaaatacaaggagaggaaggagcgcagagcccagcaggaacagttactgctgcagaaacaattgcagcaacaacagcaacaaccaccatcacagctttgcaccgctccagcctcttctcacgaacgagcaagcatgattgacaaagctaaggaagatatcgtaactgaacagatcgactttagcgctgcacgcaaacagtttcagctgatggagaattcacgtcaagctgtggccaaaggtcagagcactcccaggctcttttcaattaaacctttctatcggcctttgggaagtgtgaattcagacaagccactgaccaatcctaggcccccaagcgtgggcggacctcctgaggattctggggcaagtgctgccaaaggacagaaaagccctggagccctcgaaacccccagcgcagccggtagccaaggtaacactgcttctcaggggaaggaagggccatattctgagccctctaaacgagggccactgtccaaactatgggccgaagatggcgagttcacgtcagctcgagctgttctgaccgtggtgaaagacgatgatcacggcattctggaccagtttagccgaagcgtgaacgttagcttgacccaggaagagctagactcagggcttgacgaactcagcgtgcggtcacaggacaccacggtgctagaaactctgtccaatgacttctccatggataacatttccgattccggggcaagcaatgagaccacgaatgccctccaggagaattctttggccgatttttctcttccccagacccctcagaccgacaatccgtccgagggtcggggtgaaggggttagtaagagtttctctgatcacgggttctactccccgagctccaccctgggggactcaccgctggtcgacgatcctctagagtatcaggctggccttttagtgcaaaacgccatacaacaagccatcgctgagcaagtggacaaagccgtaagtaagactagccgtgatggagctgaacaacaaggtcctgaggctactgttgaagaggctgaggcagcggcatttgggagcgagaaaccccagtcaatgttcgagccaccccaggtaagcagccccgtacaggaaaagagagacgtcctgcccaaaatccttcctgccgaggacagagcacttcgggaacgcggtccgcctcagccattgcctgctgttcagccatctggcccaataaatatggaggagacgcgaccagagggttcctacttcagcaaatacagtgaagcagctgaactgaggtctaccgctagcttgctggctacccaggaatctgacgttatggtcggaccctttaagctgcgatcccggaaacagagaactctctcaatgatcgaggaagagatcagggccgctcaggagagagaggaggagctcaaacgacagcgccaggtactccagagtacccagtcaccacggacaaagaacgcaccgtcactgccttcaagaacatgttacaagacagcgccaggtaagatagagaaggtgaagccaccacctagtcccactaccgaggggccatctttacagcctgatctcgcacccgaggaggctgccggaacacagcgacctaaaaacctgatgcagactctcatggaagactatgaaacccacaagagcaaaaggcgggaaaggatggatgattctagtgtgctggaggctacccgcgttaaccgcagaaagtctgccctggctctgagatgggaggctggaatctatgcaaatcaagaagaggaggacaatgaatag

SEQ ID NO: 242035 - DNA, 3273 bp, Artificial Sequence
  derived and/or modified sequence
atggccgaggccgagctgcacaaggagagactgcaggctatcgcagagaagaggaaacgtcaaaccgaaatcgaaggaaaaaggcagcaattggacgaacaaatcctcctcctccaacatagcaagagcaaagtgctcagagagaagtggctgcttcagggcatccctgctgggactgccgaggaagaagaagccagacgaaggcagtccgaagaagacgagttcagagtgaaacagcttgaggacaatattcagcgtttggagcaggagatacagacacttgaaagtgaggagtctcagattagcgcaaaggagcagataatcctcgaaaagctgaaagaaacggagaagtcctttaaagatttccagaagggcttctcatctaccgacggtgatgccgtgaactacatcagctcccagctgccggatctgccaatcctgtgtagccgcactgcggagccttcaccaggccaggacgggacctctagagccgctggcgtgggatgggaaaacgtgctccttaaggaaggtgagagcgccagcaacgctacagaaactagtggcccagacatgactataaagaagcctccccagctcagtgaggacgatatctggttaaaaagtgagggcgacaactactcagccaccctgctggagcctgctgcttccagtctctctccagatcacaagaacatggagattgaggtgagcgttgcggaatgtaagtccgtgcctggcatcaccagtaccccccatccaatggaccacccgtccgcgttctactcaccgccacacaatggcctactgacagaccatcacgaatcactggataatgacgtcgcacgcgagataagatatctcgatgaggttttagaagccaattgttgcgacagcgcagtggatggtacttacaacgggacaagtagccccgagcccggtgccgtcgtgttggtcgggggattaagtcccccagtgcacgaagctactcagccagagccgaccgagcgcacggcttcccgacaagccccacctcacatcgagttgagcaatagtagtccagaccctatggctgaggcggaacgcacgaacggccactccccctcccagccgagagacgccctgggcgactctttgcaggtacctgtctcccccagcagcacgacatcatctagatgctcctcccgggatggggaatttacactcactactctcaaaaaggaagcaaagtttgaactaagggctttccacgaggacaagaagccatcaaaactctttgaggatgatgaacacgagaaggagcagtattgcatcagaaaagtcaggccatccgaagaaatgctggagctggagaaggagagacgtgaattaattcgctctcaggccgtcaagaagaatcccggaatcgctgcaaaatggtggaacccacctcaggagaaaacaattgaggaacagctcgatgaggagcacttagagagtcacaagaagtataaggagcgaaaggaaagaagggcccaacaggagcaactccttctacagaagcagcttcagcagcagcagcagcagcccccatctcagttgtgcacagcacccgcatcatcacatgaaagggctagtatgatagacaaggccaaggaagatatcgtgacagaacagattgatttcagcgccgctcgcaaacagttccaactgatggaaaactcaagacaggcggtcgccaaggggcagagcaccccacggctgttcagcatcaagcccttctaccgacctctagggtcagtaaatagcgacaagcccctcaccaaccccagacccccatcagtgggcggaccccctgaggactctggggcttcagcagccaaaggtcagaaaagccctggtgctctggaaacaccatccgctgctgggagtcagggcaacaccgccagccagggaaaagaaggaccttacagtgaacccagtaagagggggccattgtccaaactctgggccgaggatggagaatttacttcagctcgtgccgtgctcaccgtagtcaaagatgacgatcatggaatcctcgatcagttctctagatctgtaaacgtctcactgactcaggaggaacttgatagcggattggatgagctgagtgtcagatcacaggacacaaccgtgctcgagacgttgagtaacgacttcagcatggataatatcagcgactctggcgctagtaacgagacaactaacgccctacaggaaaacagcctggccgatttctctctcccgcagacacctcagacggacaatccctccgagggaaggggcgagggtgttagcaaaagcttctccgaccatggtttttacagcccctcatctacactcggcgatagccccttggtggacgatcccttggagtaccaagctgggctactcgtacagaatgcgattcagcaggcaatagcggagcaagtggacaaagcagtgtccaaaacctcaagagatggagcggagcagcaaggcccagaggctactgtggaagaggctgaggccgctgcgttcggaagcgagaagccccagtctatgtttgagccgccacaggttagttctcccgtgcaggaaaagagggacgtccttccaaagattctgcctgctgaggaccgggcactccgcgagaggggcccacctcaacccctgcctgccgtgcagccatccggaccgattaacatggaagaaacccggccagaaggctcgtactttagtaagtacagcgaagccgcagagctgagatccacagcttctctgctggccacacaggaaagcgatgtgatggtgggtcctttcaagctaaggtccagaaaacagagaaccctatctatgatagaggaagaaatccgggctgcccaagaaagggaagaggaattgaagcgtcaaagacaggtgcttcaatcaacccagagccccaggacaaagaacgccccatccctccccagcagaacctgctacaaaacagctcctggcaaaatcgaaaaggtcaaacccccacccagcccgacaaccgaggggccatccctgcaaccagacctggcccctgaagaggctgcgggaacacaaagaccgaaaaacctgatgcaaactctcatggaggattatgagacgcacaagtccaaaaggcgtgagcgcatggatgattccagcgtgctcgaggctacacgagtgaaccgcaggaagagcgctctggccctaagatgggaggcagggatttatgctaatcaagaggaagaagataatgagtag

SEQ ID NO: 242036 - DNA, 3101 bp, Artificial Sequence
  derived and/or modified sequence
aggaatttgtccagcttgagccagggtgcacgcaggaatctgtctggaaaaaggcagttctcactgaggaggtttgaggcgcgcgctctgggcaggaagcctccccagctttctgaggatgatatctggctaaaaagcgagggagacaactatagtgccaccctcctggagcctgctgccagctctctttccccagatcacaaaaacatggaaattgaggtgtctgttgcagaatgtaaaagtgttcctggaatcacctctaccccacatcccatggaccatccctccgctttctattcacccccgcataatggcctccttactgatcaccacgaatccctggataatgatgttgccagagagatccgctatctagatgaggtgctagaggccaactgctgtgattctgctgtggatggaacgtacaatggaacatcctccccagagcctggtgcagtggttctggtgggcggcctaagcccccctgtccacgaggcgacccagccagaacccactgaaagaacagctagccggcaggcacctcctcacatcgagctcagtaatagcagccctgaccccatggcagaggcagaaagaacaaatggccattcccccagccagcctagagatgcgctgggggacagcctgcaggtgcctgtcagccccagctccacaaccagctcacggtgttcttcccgagatggagagttcactctcaccacactgaaaaaggaggccaagtttgagctgcgtgccttccatgaggacaagaagccctccaagctctttgaggatgacgagcatgagaaagaacaatactgcattagaaaagtgaggccttcagaggagatgctggagctggaaaaggagaggagagagctcatccgcagccaggccgtcaagaagaatcctggcattgcagcaaaatggtggaatcccccgcaggaaaaaaccatcgaggagcagctggacgaggaacatctggagtcgcacaaaaagtacaaggagcgcaaagagagaagggcacagcaggaacagttgctgctgcagaagcagttacagcagcagcagcagcagcccccatcgcagctctgcacagcccctgcctcttctcatgaacgcgcaagcatgattgacaaagcaaaggaggacattgtcacagagcagatagatttctctgctgctcgcaaacaatttcagctgatggagaattccaggcaagcggtggccaagggccagagtacacccaggctgttctccatcaagcctttctacaggcctctggggtcagtcaactcagacaagccactgactaatccgagaccaccttctgtcgggggacctccagaagacagtggtgcctcagccgccaagggacagaaatcccccggtgccctggagaccccatcggcagcaggaagccagggcaacacagcctctcaggggaaggaagggccctacagcgagccttctaaacgtgggcccttatctaaactgtgggctgaggatggagaatttacgagcgcccgggctgtcctcactgtggtcaaggatgatgaccatgggattttggatcagttctcaagatctgtcaatgtctccttgacccaagaggagcttgactctggtctggacgaattgtcggtgaggtctcaggataccacagtcctggagaccctatccaatgatttcagcatggacaacatcagtgacagcggggcatccaatgagacaaccaatgccctccaggaaaattcactggctgatttttctctgccccagacaccacaaactgacaacccctcagagggccgaggagaaggcgtctccaagtcatttagtgatcatggtttctattccccttcctccacgctgggggactctccgttggttgatgaccccttggagtatcaggctggcctcctggtgcagaatgccattcaacaagccatagccgagcaggtggataaagctgtgtccaaaaccagcagggatggagcagagcaacagggacctgaagcgactgtagaggaagctgaagctgcggctttcggctcagaaaagcctcagagcatgtttgagccacctcaggtgtcttctcctgttcaagagaaaagggatgtattaccaaagattctgcctgctgaagacagggcgctcagggaaagggggcccccccagccactgccagctgtgcagcccagtggcccgattaacatggaggagaccaggcccgaaggaagctatttcagcaagtactcggaggcagctgagctgagaagcacagcctccctcctggccactcaagaatctgacgtgatggttgggcctttcaagctgaggtccaggaaacagcggactttgtccatgattgaggaagagatccgagcagctcaggaaagggaagaggagctgaagaggcagagacaagtcttgcagagtacgcagagccccaggacaaagaatgccccatcactgccctccagaacatgctacaaaactgctccagggaaaatagagaaagtcaaacctcctccatcccccaccactgaaggccccagcttgcagcctgacttagcccctgaagaggctgccggaacccagcggcccaagaatctgatgcagaccctcatggaagactatgagacacacaaatctaaaaggcgcgagagaatggatgatagtagtgtcctcgaggccacacgggttaatcgaagaaagagcgcactggctttgcgctgggaagcagggatctatgccaaccaggaggaagaagacaacgaataaacttccttcaacccaggaagcgtctttggtgcttgggagaccaagaaaccaagaaattaacaactgaaagcattttaatggactatttattaaagtgcaaacaaactcagcaatccttatgtagaccagaagctgcaatatacaatgatgaaaatgaaacgaaaaggaagtccccccatcagactctggacacccaggaatcaaaagagaaaggacttttttggtgactcaatcccagtgtctggtttggggccaatctacaatggatccaaaaggacaaaacatgttacaagcaaatcaacatagttgctgca

SEQ ID NO: 242037 - DNA, 3273 bp, Artificial Sequence
  derived and/or modified sequence
atggcagaggcggaattgcacaaggaaaggctgcaagccatagcagaaaaaagaaagaggcagactgaaatagaaggcaagcgacaacagcttgacgagcagatacttctgctgcagcattccaagtccaaagtgcttcgggagaaatggctgctgcagggcatacccgctggaactgccgaagaggaggaagccaggaggcggcagtctgaagaggatgagttcagagtcaagcaacttgaagataacattcagaggctggagcaagaaatacaaacgctagaaagtgaagagtcccagatatctgccaaagagcaaatcatcctagagaaactgaaggaaacagaaaaatccttcaaggactttcagaagggtttctccagtacggatggagatgcagtaaattacatttcctcccagcttcccgacctgccaatcctctgttcacgaacagcagaaccatcacctgggcaggacgggaccagcagagcggctggagtcgggtgggagaatgtgctgctaaaggaaggtgagtcagcctcgaacgccacagaaacatccggcccagacatgactatcaagaagcctccccagctttctgaggatgatatctggctaaaaagcgagggagacaactatagtgccaccctcctggagcctgctgccagctctctttccccagatcacaaaaacatggaaattgaggtgtctgttgcagaatgtaaaagtgttcctggaatcacctctaccccacatcccatggaccatccctccgctttctattcacccccgcataatggcctccttactgatcaccacgaatccctggataatgatgttgccagagagatccgctatctagatgaggtgctagaggccaactgctgtgattctgctgtggatggaacgtacaatggaacatcctccccagagcctggtgcagtggttctggtgggcggcctaagcccccctgtccacgaggcgacccagccagaacccactgaaagaacagctagccggcaggcacctcctcacatcgagctcagtaatagcagccctgaccccatggcagaggcagaaagaacaaatggccattcccccagccagcctagagatgcgctgggggacagcctgcaggtgcctgtcagccccagctccacaaccagctcacggtgttcttcccgagatggagagttcactctcaccacactgaaaaaggaggccaagtttgagctgcgtgccttccatgaggacaagaagccctccaagctctttgaggatgacgagcatgagaaagaacaatactgcattagaaaagtgaggccttcagaggagatgctggagctggaaaaggagaggagagagctcatccgcagccaggccgtcaagaagaatcctggcattgcagcaaaatggtggaatcccccgcaggaaaaaaccatcgaggagcagctggacgaggaacatctggagtcgcacaaaaagtacaaggagcgcaaagagagaagggcacagcaggaacagttgctgctgcagaagcagttacagcagcagcagcagcagcccccatcgcagctctgcacagcccctgcctcttctcatgaacgcgcaagcatgattgacaaagcaaaggaggacattgtcacagagcagatagatttctctgctgctcgcaaacaatttcagctgatggagaattccaggcaagcggtggccaagggccagagtacacccaggctgttctccatcaagcctttctacaggcctctggggtcagtcaactcagacaagccactgactaatccgagaccaccttctgtcgggggacctccagaagacagtggtgcctcagccgccaagggacagaaatcccccggtgccctggagaccccatcggcagcaggaagccagggcaacacagcctctcaggggaaggaagggccctacagcgagccttctaaacgtgggcccttatctaaactgtgggctgaggatggagaatttacgagcgcccgggctgtcctcactgtggtcaaggatgatgaccatgggattttggatcagttctcaagatctgtcaatgtctccttgacccaagaggagcttgactctggtctggacgaattgtcggtgaggtctcaggataccacagtcctggagaccctatccaatgatttcagcatggacaacatcagtgacagcggggcatccaatgagacaaccaatgccctccaggaaaattcactggctgatttttctctgccccagacaccacaaactgacaacccctcagagggccgaggagaaggcgtctccaagtcatttagtgatcatggtttctattccccttcctccacgctgggggactctccgttggttgatgaccccttggagtatcaggctggcctcctggtgcagaatgccattcaacaagccatagccgagcaggtggataaagctgtgtccaaaaccagcagggatggagcagagcaacagggacctgaagcgactgtagaggaagctgaagctgcggctttcggctcagaaaagcctcagagcatgtttgagccacctcaggtgtcttctcctgttcaagagaaaagggatgtattaccaaagattctgcctgctgaagacagggcgctcagggaaagggggcccccccagccactgccagctgtgcagcccagtggcccgattaacatggaggagaccaggcccgaaggaagctatttcagcaagtactcggaggcagctgagctgagaagcacagcctccctcctggccactcaagaatctgacgtgatggttgggcctttcaagctgaggtccaggaaacagcggactttgtccatgattgaggaagagatccgagcagctcaggaaagggaagaggagctgaagaggcagagacaagtcttgcagagtacgcagagccccaggacaaagaatgccccatcactgccctccagaacatgctacaaaactgctccagggaaaatagagaaagtcaaacctcctccatcccccaccactgaaggccccagcttgcagcctgacttagcccctgaagaggctgccggaacccagcggcccaagaatctgatgcagaccctcatggaagactatgagacacacaaatctaaaaggcgcgagagaatggatgatagtagtgtcctcgaggccacacgggttaatcgaagaaagagcgcactggctttgcgctgggaagcagggatctatgccaaccaggaggaagaagacaacgaataa

SEQ ID NO: 242038 - DNA, 2580 bp, Artificial Sequence
  derived and/or modified sequence
atggagatcgaggtgagcgtggccgagtgcaagagcgtgcccggcatcaccagcaccccccaccccatggaccaccccagcgccttctacagccccccccacaacggcctgctgaccgaccaccacgagagcctggacaacgacgtggccagagagatcagatacctggacgaggtgctggaggccaactgctgcgacagcgccgtggacggcacctacaacggcaccagcagccccgagcccggcgccgtggtgctggtgggcggcctgagcccccccgtgcacgaggccacccagcccgagcccaccgagagaaccgccagcagacaggcccccccccacatcgagctgagcaacagcagccccgaccccatggccgaggccgagagaaccaacggccacagccccagccagcccagagacgccctgggcgacagcctgcaggtgcccgtgagccccagcagcaccaccagcagcagatgcagcagcagagacggcgagttcaccctgaccaccctgaagaaggaggccaagttcgagctgagagccttccacgaggacaagaagcccagcaagctgttcgaggacgacgagcacgagaaggagcagtactgcatcagaaaggtgagacccagcgaggagatgctggagctggagaaggagagaagagagctgatcagaagccaggccgtgaagaagaaccccggcatcgccgccaagtggtggaaccccccccaggagaagaccatcgaggagcagctggacgaggagcacctggagagccacaagaagtacaaggagagaaaggagagaagagcccagcaggagcagctgctgctgcagaagcagctgcagcagcagcagcagcagccccccagccagctgtgcaccgcccccgccagcagccacgagagagccagcatgatcgacaaggccaaggaggacatcgtgaccgagcagatcgacttcagcgccgccagaaagcagttccagctgatggagaacagcagacaggccgtggccaagggccagagcacccccagactgttcagcatcaagcccttctacagacccctgggcagcgtgaacagcgacaagcccctgaccaaccccagaccccccagcgtgggcggcccccccgaggacagcggcgccagcgccgccaagggccagaagagccccggcgccctggagacccccagcgccgccggcagccagggcaacaccgccagccagggcaaggagggcccctacagcgagcccagcaagagaggccccctgagcaagctgtgggccgaggacggcgagttcaccagcgccagagccgtgctgaccgtggtgaaggacgacgaccacggcatcctggaccagttcagcagaagcgtgaacgtgagcctgacccaggaggagctggacagcggcctggacgagctgagcgtgagaagccaggacaccaccgtgctggagaccctgagcaacgacttcagcatggacaacatcagcgacagcggcgccagcaacgagaccaccaacgccctgcaggagaacagcctggccgacttcagcctgccccagaccccccagaccgacaaccccagcgagggcagaggcgagggcgtgagcaagagcttcagcgaccacggcttctacagccccagcagcaccctgggcgacagccccctggtggacgaccccctggagtaccaggccggcctgctggtgcagaacgccatccagcaggccatcgccgagcaggtggacaaggccgtgagcaagaccagcagagacggcgccgagcagcagggccccgaggccaccgtggaggaggccgaggccgccgccttcggcagcgagaagccccagagcatgttcgagcccccccaggtgagcagccccgtgcaggagaagagagacgtgctgcccaagatcctgcccgccgaggacagagccctgagagagagaggccccccccagcccctgcccgccgtgcagcccagcggccccatcaacatggaggagaccagacccgagggcagctacttcagcaagtacagcgaggccgccgagctgagaagcaccgccagcctgctggccacccaggagagcgacgtgatggtgggccccttcaagctgagaagcagaaagcagagaaccctgagcatgatcgaggaggagatcagagccgcccaggagagagaggaggagctgaagagacagagacaggtgctgcagagcacccagagccccagaaccaagaacgcccccagcctgcccagcagaacctgctacaagaccgcccccggcaagatcgagaaggtgaagcccccccccagccccaccaccgagggccccagcctgcagcccgacctggcccccgaggaggccgccggcacccagagacccaagaacctgatgcagaccctgatggaggactacgagacccacaagagcaagagaagagagagaatggacgacagcagcgtgctggaggccaccagagtgaacagaagaaagagcgccctggccctgagatgggaggccggcatctacgccaaccaggaggaggaggacaacgagtag

SEQ ID NO: 242039 - protein, 1249 aa, Artificial Sequence
  derived and/or modified sequence
MMAQFPTAMNGGPNMWAITSEERTKHDRQFDNLKPSGGYITGDQARNFFLQSGLPAPVLAEIWALSDLNKDGKMDQQEFSIAMKLIKLKLQGQQLPVVLPPIMKQPPMFSPLISARFGMGSMPNLSIPQPLPPAAPITSLSSATSGTNLPPLMMPTPLVPSVSTSSLPNGTASLIQPLPIPYSSSTLPHGSSYSLMMGGFGGASIQKAQSLIDLGSSSSTSSTASLSGNSPKTGTSEWAVPQPTRLKYRQKFNTLDKSMSGYLSGFQARNALLQSNLSQTQLATIWTLADVDGDGQLKAEEFILAMHLTDMAKAGQPLPLTLPPELVPPSFRGGKQIDSINGTLPSYQKMQEEEPQKKLPVTFEDKRKANYERGNMELEKRRQALMEQQQREAERKAQKEKEEWERKQRELQEQEWKKQLELEKRLEKQRELERQREEERRKDIERREAAKQELERQRRLEWERIRRQELLNQKNREQEEIVRLNSKKKNLHLELEALNGKHQQISGRLQDVRLKKQTQKTELEVLDKQCDLEIMEIKQLQQELQEYQNKLIYLVPEKQLLNERIKNMQFSNTPDSGVSLLHKKSLEKEELCQRLKEQLDALEKETASKLSEMDSFNNQLKCGNMDDSVLQCLLSLLSCLNNLFLLLKELRETYNTQQLALEQLYKIKRDKLKEIERKRLELMQKKKLEDEAARKAKQGKENLWKENLRKEEEEKQKRLQEEKTQEKIQEEERKAEEKQRKDKDTLKAEEKKRETASVLVNYRALYPFEARNHDEMSFNSGDIIQVDEKTVGEPGWLYGSFQGNFGWFPCNYVEKMPSSENEKAVSPKKALLPPTVSLSATSTSSEPLSSNQPASVTDYQNVSFSNLTVNTSWQKKSAFTRTVSPGSVSPIHGQGQVVENLKAQALCSWTAKKDNHLNFSKHDIITVLEQQENWWFGEVHGGRGWFPKSYVKIIPGSEVKREEPEALYAAVNKKPTSAAYSVGEEYIALYPYSSVEPGDLTFTEGEEILVTQKDGEWWTGSIGDRSGIFPSNYVKPKDQESFGSASKSGASNKKPEIAQVTSAYVASGSEQLSLAPGQLILILKKNTSGWWQGELQARGKKRQKGWFPASHVKLLGPSSERATPAFHPVCQVIAMYDYAANNEDELSFSKGQLINVMNKDDPDWWQGEINGVTGLFPSNYVKMTTDSDPSQQWCADLQTLDTMQPIERKRQGYIHELIQTEERYMADLQLVVEVRRLLLASSRGICCLS

SEQ ID NO: 242040 - DNA, 1836 bp, Artificial Sequence
  derived and/or modified sequence
atggcacagtttcctaccgccatgaatgggggacctaacatgtgggccattaccagcgaggagaggacaaaacacgaccggcagttcgataacctcaagccctcagggggatacataacgggggaccaggcccgaaatttcttcctgcaaagcggtttgccagcgccagttctcgctgagatatgggcactcagtgacttgaataaggatgggaagatggatcagcaggaattcagcatcgcaatgaagctgattaagctgaagctgcagggtcagcagctgcccgtggtacttccgcctatcatgaaacagccacccatgttttcccctctgattagtgccagattcggcatgggcagcatgccaaacctgtctattccccagccactgcctccagctgcaccgatcacaagcctgtccagcgcaacttctgggacgaatctgcccccattgatgatgcccacaccattagttcccagcgtcagcacttccagcctgcctaatggcacagcttctctaattcagcctcttcccatcccctactcttcatcaaccttgccccatggcagttcctacagtttaatgatgggagggttcggaggcgcaagcatccagaaggcacagagcctgatcgacctcggtagcagtagaagctggagctcaggctcttctgcccacagccccgccacccaccgcgcccccctgtccagcccagtgcctaactcctctacttccagtacagcgtccctaagtgggaactctccaaaaactgggacaagcgagtgggcagtaccccagcccacaaggctgaagtaccggcagaaatttaatactttggataaatccatgtccggttacctgtctggattccaggctagaaatgccctcttgcaatcgaatctgtcccagactcaactggcgactatttggacactcgcagatgtagacggggatggccagcttaaggcagaagagtttatcctggctatgcatctgactgatatggctaaagcggggcagccacttccgctgacactgcctccggagctggtgcctccctccttccgggggggaaagcagatcgactctattaatgggaccctcccctcatatcagaagatgcaagaagaagaaccccagaaaaaacttcccgtgaccttcgaagacaagagaaaagctaactatgaaagaggcaacatggaactcgagaaacggagacaggctctcatggaacagcagcagcgcgaggccgaaagaaaggctcagaaggagaaagaagagtgggaacgaaaacagcgagaactacaggagcaggaatggaagaagcagttggaactggagaaaaggcttgaaaagcagcgggaactggagagacagagggaggaagagcgccgtaaagacatcgagcggagggaagcagccaaacaagaactggaacggcagagaaggctcgagtgggaaaggatacgccggcaggagctgctcaatcagaagaatcgggagcaggaggaaattgtgcggcttaatagtaaaaaaaaaaatctccatctggagctcgaagctctaaacggcaagcaccagcagataagcggccgactgcaggacgtgcgactgaagaagcaaacgcaaaagactgaacttgaggtactagataagcaatgcgatttggaaatcatggagatcaagcaactgcagcaggagttgcaggagtatcagaacaaattgatctatttggttcctgaaaagcagctgcttaatgaaaggataaaaaatatgcaattcagcaatacccccgactctggagttagcttactgcacaagaagagcctcgaatag

SEQ ID NO: 242041 - DNA, 3750 bp, Artificial Sequence
  derived and/or modified sequence
atgatggctcagtttcctactgccatgaacggaggaccgaatatgtgggcaattacatcagaagagaggacaaagcacgaccgccagtttgataacttaaaaccaagtggcgggtatatcactggagaccaggcgcgcaatttctttcttcagagtgggcttcccgcccctgtgctggctgaaatttgggctctcagcgacctgaataaagacggtaaaatggaccagcaagagttcagcatcgcgatgaaactcatcaaattgaaactacagggacagcagttgccggtcgtgctgccacctattatgaagcaacctcccatgttttccccactgatcagcgcccgcttcggcatggggagcatgcccaatctctcaatcccgcagcctctgccccctgcagccccaatcacttccctctcatctgctacctccggcacaaacctgccacctttaatgatgcccactccactggtccctagtgtgtcaacgagcagcttacccaacgggacggcttcacttatacaacctctgcccatcccatatagtagttccacgcttcctcacggttcttcatatagcctcatgatgggcgggtttgggggcgcttccatccagaaagcccagtctctcatcgaccttggatcaagttccagcactagctcaacagctagcttaagtgggaatagcccaaaaactgggacatctgagtgggccgtgccacagcccacccgactgaaatacagacagaaatttaacactctggacaaaagcatgtccggctatctctctggcttccaagcccgcaacgcacttctccagagcaacctaagtcagacacagttggcaaccatctggaccctggccgatgtggacggggatgggcagttaaaagccgaggaatttatcctggccatgcatctgacggatatggccaaggctggacagccgctgccccttacactgccacctgaactcgtgcctccatcatttaggggaggcaagcaaatcgattccattaatggcactttaccaagttatcagaagatgcaggaagaggagccacaaaagaaactcccagtgacttttgaagataagagaaaggccaactatgagaggggcaatatggaacttgagaaacgccgccaggctctcatggagcaacaacagagagaggccgagcgcaaggctcagaaagaaaaagaggagtgggaacgcaagcagcgtgaactgcaggagcaggagtggaaaaagcagctggagttagagaaacgtttagaaaagcagagggaactggagaggcagcgtgaggaggagcgacggaaggacattgagaggcgggaggccgccaagcaggagctggaaaggcagagaaggctcgagtgggagaggatccggcgacaggagctgctcaaccagaaaaatcgggaacaagaagaaatcgtacggttgaactcaaagaaaaaaaacttgcatctggagttagaagccctgaacggtaaacaccagcaaatcagcggaagactccaggacgtcaggcttaagaagcaaacacagaaaactgaactagaagtgcttgataagcagtgcgatctggaaatcatggagataaagcagctgcagcaggaacttcaagaataccaaaataaactgatttatttagtgcctgaaaagcagctcctcaatgaaaggatcaagaacatgcaattttcaaatacccctgactctggcgtctccctccttcacaagaagtctcttgagaaagaggagctctgtcaacggctgaaagagcagctggatgctctcgagaaggagacggcatccaagctttccgagatggactccttcaataatcagctgaaatgcggcaatatggatgattctgtgttacaatgtctgttgagtctgctgagttgtctaaataatttattccttctgctgaaggagctgagggagacatataacacccaacagttggctctggagcaattgtataaaatcaagagagataagctgaaagagatcgagaggaaaaggctggaactcatgcaaaaaaaaaaactggaagatgaggccgcaaggaaggctaaacagggaaaggaaaatctctggaaggagaatctgagaaaagaagaagaagagaagcagaagcgcctccaggaggaaaaaactcaggagaagatccaggaggaagagaggaaagcagaagagaagcagagaaaggacaaagataccctgaaagcggaggagaaaaagcgcgagaccgcctccgtgctggttaactaccgggccctgtacccatttgaagctcgcaatcatgatgagatgagcttcaactcaggagacattatccaagtggacgagaaaacagtgggggaacctgggtggctctatggatccttccaaggcaatttcgggtggttcccatgcaattatgtggagaagatgcctagctctgagaatgagaaggccgtttcccccaaaaaggcgctgctgccgccaacagtgagtcttagcgcaacaagtaccagctcggaacccttgtcatccaaccagccggctagtgtgacggattatcagaatgtttccttctctaatctgacagtcaatacgagctggcagaagaaaagcgcctttacccgtacggtgtcgcctggaagcgtgagtcctatccacggacaggggcaggttgttgagaatctgaaagcccaggcactttgcagctggacagccaaaaaagacaaccacctgaacttctcgaaacacgatatcattaccgtgctggaacagcaagagaattggtggttcggcgaggttcatggtggacgcggatggttccccaagtcgtatgttaagattatccctgggagcgaggttaagcgggaggagccagaagctctatacgccgcagttaacaaaaagccaacatcagcggcctattcggtcggcgaggaatatatcgctctgtatccctactctagcgtggaaccgggagacctcacgttcaccgagggcgaggagatccttgttacccagaaagatggagaatggtggaccggatctatcggagatagaagcggaatctttcccagcaactatgtcaagcctaaagatcaagaatcgtttggcagcgcttctaagagcggggccagtaataagaaacccgaaattgcccaggtgacgagtgcctacgttgcaagcggatcagaacagctatctttagctccaggacaactgattctcattctgaaaaaaaacactagcggatggtggcagggagagctgcaagcccgggggaagaagaggcaaaagggctggttcccagcaagccatgtgaagctactgggaccttctagtgagcgggccacaccagcgtttcacccggtttgccaggttatcgctatgtatgattacgcagcaaacaacgaggacgagctcagcttttccaagggccagctgatcaatgtgatgaacaaggacgaccctgattggtggcagggagagatcaacggcgtgaccggcttgttcccctcaaattacgttaagatgacaaccgacagtgacccctcccagcagtggtgtgctgatctgcagacactggacaccatgcaacccatagaacggaagaggcaggggtatatacatgagttgatacaaacagaggagcgctacatggccgacttgcaactggtggtggaagtgcgccggttgcttcttgcatcctcccgaggcatttgttgtctcagctag

SEQ ID NO: 242042 - DNA, 4558 bp, Artificial Sequence
  derived and/or modified sequence
ggctgaggcggcgccggcggagccctgagcggctgtgacaggctacgcaacaggttcgcgggcggcggcctgacgaccaagccagctgcagtggcggcgacggcggcagagcagggtctccccgcgcctgcccgcgcccaggctgccggtgctgagggacgcggagtcgcgctgtgacgagcgggaggcgcggcgagggcgccagatggctgagagctagcaaggaaaactcaggaccatgatggctcagtttcccacagctatgaatggagggccaaacatgtgggctattacctctgaagaacgtactaagcatgacaggcagtttgataacctcaaaccttcaggaggttacataacaggtgatcaagcacgtaattttttcctacaatcaggtctgccggcccctgttttagctgaaatatgggctttatcagacctaaacaaggatgggaagatggatcagcaagagttctccatagctatgaaactcatcaaactgaagcttcaaggccaacagttgcctgtggttctccctcctattatgaagcaaccccctatgttttctccattaatttctgctcgttttggaatgggaagcatgcccaatctgtccattcctcagccattgcctccagctgcacctataacatcattgtcttctgcgacttcagggaccaaccttcctcccttaatgatgcccactcccctagtgccttctgttagcacatcatcattaccaaatggaaccgccagtctcattcagcctttacccattccttattcttcttcaacattgcctcatgggtcatcttatagtctgatgatgggaggatttggaggtgctagtatacagaaagcgcagtctctgattgatttaggatctagtagctcaacttcctcgactgcttcactctcagggaactcacccaagactgggacctcagagtgggcagttcctcagcctacaagattaaaatatcggcaaaaatttaatactcttgacaaaagtatgagtggatatctctcaggttttcaagctagaaatgcccttcttcagtcaaatctttctcaaactcagctggctactatttggactctggctgacgttgatggtgatggacagctaaaagcagaagagtttattcttgcaatgcaccttactgacatggccaaagctggacagccattaccactgactttacctcctgagcttgttcctccatctttcagaggaggaaagcaaattgattccattaatggaactctgccttcatatcagaaaatgcaagaagaggagcctcagaagaaattaccagttacttttgaggacaaacggaaagccaactatgagcgagggaacatggagctggaaaagcgacgccaagccttgatggagcagcaacaaagggaggcagaacgtaaagcccagaaagaaaaggaagagtgggaacgaaaacagagagaattacaagaacaagaatggaagaaacaacttgaattagaaaaacgcttagagaagcaacgggaattggagagacaacgagaggaagaaaggagaaaagacatagaaagacgagaggcagcaaaacaggaacttgaacgacaacgtcgcttagaatgggagagaattcggcgacaggagcttctcaatcaaaagaatagagaacaagaagaaattgtcaggttaaactctaaaaagaagaatcttcatcttgagttggaagcactgaatggcaaacatcagcagatctcaggcagacttcaggatgtccgactcaaaaagcaaactcaaaagactgagctggaagttctggataagcagtgtgacttggaaattatggaaatcaagcaacttcaacaggaacttcaggaatatcagaataagcttatctatctggtacctgagaagcaattattaaatgaaagaattaaaaacatgcagttcagtaacacacctgattcaggggtcagtttacttcataaaaaatcattagaaaaggaagaattatgccaaagacttaaagaacagttagatgctcttgaaaaagaaactgcatctaagctgtcagaaatggattcttttaacaatcaactaaagtgtgggaatatggatgactctgttcttcagtgccttttgtctctgctaagctgtctcaacaacctcttcctcttacttaaggaactgagagaaacctacaacacacagcagttagcccttgaacagctttataagatcaaacgtgacaagttgaaggaaattgaaaggaaaagattagaactaatgcagaaaaagaaactagaagatgaggctgcaaggaaagcaaagcaaggaaaagaaaacttatggaaagaaaatcttagaaaggaggaagaagaaaaacaaaagcgactccaggaagaaaaaacacaagaaaaaattcaagaagaggaacggaaagctgaggagaaacaacgtaaggataaggatactttgaaagctgaggagaaaaaacgtgagacagctagtgttttggtgaattatagagcattatacccctttgaagcaaggaaccatgatgagatgagttttaattctggagatataattcaggttgatgaaaaaaccgtaggagaacctggttggctttatggtagttttcaaggaaattttggctggtttccatgcaattatgtagaaaaaatgccatcaagtgaaaatgaaaaagctgtatctccaaagaaggccttacttcctcctacagtttctttatctgctacctcaacttcctctgaaccactttcttcaaatcaaccagcatcagtgactgattatcaaaatgtatctttttcaaacctaactgtaaatacatcatggcagaaaaaatcagccttcactcgaactgtgtcccctggatctgtatcacctattcatggacagggacaagtggtagaaaacttaaaagcacaggccctttgttcctggactgcaaagaaagataaccacttgaacttctcaaaacatgacattattactgtcttggagcagcaagaaaattggtggtttggggaggtgcatggaggaagaggatggtttcccaaatcttatgtcaagatcattcctgggagtgaagtaaaacgggaagaaccagaagctttgtatgcagctgtaaataagaaacctacctcggcagcctattcagttggagaagaatatattgcactttatccatattcaagtgtggaacctggagatttgactttcacagaaggtgaagaaatattggtgacccagaaagatggagagtggtggacaggaagtattggagatagaagtggaatttttccatcaaactatgtcaaaccaaaggatcaagagagttttgggagtgctagcaagtctggagcatcaaataaaaaacctgagattgctcaggtaacttcagcatatgttgcttctggttctgaacaacttagccttgcaccaggacagttaatattaattctaaagaaaaatacaagtgggtggtggcaaggagagttacaggccagaggaaaaaagcgacagaaaggatggtttcctgccagtcatgttaaacttttgggtccaagtagtgaaagagccacacctgcctttcatcctgtatgtcaggtgattgctatgtatgactatgcagcaaataatgaagatgagctcagtttctccaagggacaactcattaatgttatgaacaaagatgatcctgattggtggcaaggagagatcaacggggtgactggtctctttccttcaaactacgttaagatgacgacagactcagatccaagtcaacagtggtgtgctgatctgcaaaccctggacacaatgcagccaattgagaggaaaagacagggctatattcatgagctgattcagaccgaagagcggtacatggctgaccttcagctcgtcgtcgaggtgaggaggctgctgctggctagctctcggggtatctgctgtctctcatgagagatggtgggcatcagactcagggctgcctccacgcagagtcaaagcaaggcatcacttttgatgtgtgaattcacaaatagtgacggaagctctcacatcctccaaatgctgtctctgcctgccggataatgcttgagattgaaagtctctaatgagctctttcccccagatgaggtcactcagagtgaagcgggagaacaagagggcattcgcatggcttcgttggatgtggcaggagccccatcaaggaaggacggggatagagtggatgggaagggcctatggcagaccgtagcttccttggatatttgcctaatatctgttttaacatctgacattttcataaactggtatctctggaggaactgtgaaacagtgaaagtgttcacctcatggttgtatcagtttggaaaacccaatgggagcatattgtaaaatagttcccaaatatcatatagctactgtttgtttataccagtgacctctacgctgatgacagctatccttattcgagtagcactttaaaatgatttgtgcttgagtgaacaaaagaagactttccatttc

SEQ ID NO: 242043 - DNA, 1836 bp, Artificial Sequence
  derived and/or modified sequence
atggcccagttccccacagccatgaatggaggccccaacatgtgggccatcaccagcgaggagaggaccaagcatgaccggcagtttgacaacctgaagcccagcggcggctacatcaccggggaccaggccaggaacttcttcctgcagagcggcctgcctgcccctgtgctggccgagatctgggccctgagtgacctgaacaaggatggcaagatggaccagcaggagttcagcatcgccatgaagctgatcaagctgaagctgcagggccagcagctgcctgtggtgctgccccccatcatgaagcagccccccatgttcagccccctcatcagcgcccgcttcggcatgggctccatgcccaacctgagcatcccccagcccctgcccccagctgcccccatcaccagcctgagcagcgccaccagcggcaccaacctgccccccctgatgatgcccacccccctggtgcccagcgtgtccaccagcagcctgcccaacggcacagccagcctcatccagcccctgcccatcccctacagcagcagcaccctgccccacggcagcagctacagcctgatgatgggcggctttggaggagccagcatccagaaggcccagagcctgattgacctgggcagcagccgctcctggagcagcggcagcagcgcccacagccctgccacccaccgggcccccctgagcagccctgtgcccaacagcagcaccagcagcacagccagcctgagcggcaacagccccaagacaggcaccagcgagtgggccgtgccccagcccacccggctgaagtaccggcagaagttcaacaccctggacaagtccatgagcggctacctgagcggcttccaggccagaaatgccctgctgcagagcaacctgagccagacccagctggccaccatctggaccctggctgatgtggatggagatggccagctgaaggccgaggagttcatcctggccatgcacctgacagacatggccaaggccggccagcccctgcccctgaccctgcccccagagctggtgccccccagcttccggggcggcaagcagattgacagcatcaatggcaccctgcccagctaccagaagatgcaggaggaggagccccagaagaagctgcctgtgacctttgaggacaagaggaaggccaactatgagcggggcaacatggagctggagaagaggcggcaggccctgatggagcagcagcagcgggaggccgagaggaaggcccagaaggagaaggaggagtgggagaggaagcagcgggagctgcaggagcaggagtggaagaagcagctggagctggagaagaggctggagaagcagcgggagctggagcggcagcgggaggaggagaggaggaaggacatcgagcggcgggaggccgccaagcaggagctggagcggcagaggcggctggagtgggagcgcatccggcggcaggagctgctgaaccagaagaaccgggagcaggaggagatcgtgcggctgaacagcaagaagaagaacctgcacctggagctggaggccctgaatggcaagcaccagcagatcagcggccgcctgcaggatgtgcggctgaagaagcagacccagaagacagagctggaggtgctggacaagcagtgtgacctggagatcatggagatcaagcagctgcagcaggagctgcaggagtaccagaacaagctgatctacctggtgcctgagaagcagctgctgaatgaaagaatcaagaacatgcagttcagcaacaccccagacagcggcgtgtccctgctgcacaagaagagcctggagtag

SEQ ID NO: 242044 - DNA, 3750 bp, Artificial Sequence
  derived and/or modified sequence
atgatggcccagttccccacagccatgaatggaggccccaacatgtgggccatcaccagcgaggagaggaccaagcatgaccggcagtttgacaacctgaagcccagcggcggctacatcactggagaccaggccaggaacttcttcctgcagagcggcctgcctgcccctgtgctggccgagatctgggccctgagtgacctgaacaaggatggcaagatggaccagcaggagttcagcatcgccatgaagctgatcaagctgaagctgcagggccagcagctgcctgtggtgctgccccccatcatgaagcagccccccatgttcagccccctcatcagcgccaggtttggcatgggctccatgcccaacctgagcatcccccagcccctgcccccagctgcccccatcaccagcctgagcagcgccaccagcggcaccaacctgccccccctgatgatgcccacccccctggtgcccagcgtgtccaccagcagcctgcccaatggaacagccagcctcatccagcccctgcccatcccctacagcagcagcaccctgccccacggcagcagctacagcctgatgatgggcggctttggaggagccagcatccagaaggcccagagcctgattgacctgggcagcagcagcagcaccagcagcacagccagcctgagcggcaacagccccaagacaggcaccagcgagtgggccgtgccccagcccacccggctgaagtaccggcagaagttcaacaccctggacaagtccatgagcggctacctgagcggcttccaggccagaaatgccctgctgcagagcaacctgagccagacccagctggccaccatctggaccctggctgatgtggatggagatggccagctgaaggccgaggagttcatcctggccatgcacctgacagacatggccaaggccggccagcccctgcccctgaccctgcccccagagctggtgccccccagcttccggggcggcaagcagattgacagcatcaatggcaccctgcccagctaccagaagatgcaggaggaggagccccagaagaagctgcctgtgacctttgaggacaagaggaaggccaactatgagcggggcaacatggagctggagaagaggcggcaggccctgatggagcagcagcagcgggaggccgagaggaaggcccagaaggagaaggaggagtgggagaggaagcagcgggagctgcaggagcaggagtggaagaagcagctggagctggagaagaggctggagaagcagcgggagctggagcggcagcgggaggaggagaggaggaaggacatcgagcggcgggaggccgccaagcaggagctggagcggcagaggcggctggagtgggagcgcatccggcggcaggagctgctgaaccagaagaaccgggagcaggaggagatcgtgcggctgaacagcaagaagaagaacctgcacctggagctggaggccctgaatggcaagcaccagcagatcagcggccgcctgcaggatgtgcggctgaagaagcagacccagaagacagagctggaggtgctggacaagcagtgtgacctggagatcatggagatcaagcagctgcagcaggagctgcaggagtaccagaacaagctgatctacctggtgcctgagaagcagctgctgaatgaaagaatcaagaacatgcagttcagcaacaccccagacagcggcgtgtccctgctgcacaagaagagcctggagaaggaggagctgtgccagaggctgaaggagcagctggatgccctggagaaggagacagccagcaagctgtctgagatggacagcttcaacaaccagctgaagtgtggcaacatggatgacagcgtgctgcagtgcctgctgagcctgctgagctgcctgaacaacctcttcctgctgctgaaggagctgcgggagacctacaacacccagcagctggccctggagcagctgtacaagatcaagagggacaagctgaaggagattgaaaggaagaggctggagctgatgcagaagaagaagctggaggatgaggccgccaggaaggccaagcagggcaaggagaacctgtggaaggagaacctgaggaaggaggaggaggagaagcagaagaggctgcaggaggagaagacccaggagaagatccaggaggaggagaggaaggccgaggagaagcagaggaaggacaaggacaccctgaaggccgaggagaagaagcgggagacagcctctgtgctggtgaactaccgggccctgtacccctttgaggccagaaatcatgatgagatgtccttcaacagcggggacatcatccaggtggatgagaagacagtgggggagcccggctggctgtatggcagcttccagggcaactttggctggttcccctgcaactacgtggagaagatgcccagcagtgaaaatgagaaggctgtgagccccaagaaggccctgctgcccccaacagtgtccctgagcgccaccagcaccagcagcgagcccctgagcagcaaccagcctgcctctgtgacagactaccagaatgtgtccttcagcaacctgactgtgaacacctcctggcagaagaagagcgccttcaccaggacagtgtccccaggctctgtgagccccatccacggccagggccaggtggtggagaacctgaaggcccaggccctgtgctcctggacagccaagaaggacaaccacctgaacttcagcaagcatgacatcatcaccgtgctggagcagcaggagaactggtggtttggagaggtgcacggcggccggggctggttccccaagagctatgtgaagatcatccctggcagcgaggtgaagcgggaggagcctgaggccctgtatgctgctgtgaacaagaagcccaccagcgctgcctacagcgtgggggaggagtacatcgccctgtacccctacagctctgtggagcccggggacctgaccttcacagaaggagaggagatcctggtgacccagaaggatggagagtggtggacaggcagcatcggggacaggagcggcatcttccccagcaactacgtgaagcccaaggaccaggagagctttggcagcgccagcaagagcggggccagcaacaagaagccagaaattgcccaggtgaccagcgcctacgtggccagcggcagcgagcagctgagcctggcccctggccagctgatcctgatcctgaagaagaacaccagcggctggtggcagggcgagctgcaggcccggggcaagaagaggcagaagggctggttccctgccagccacgtgaagctgctgggccccagcagcgagcgggccaccccagccttccaccctgtgtgccaggtgattgccatgtatgactatgctgccaacaatgaagatgagctgtccttcagcaagggccagctgatcaacgtgatgaacaaggatgatcctgactggtggcagggcgagatcaacggggtgacaggcctcttccccagcaactacgtgaagatgaccacagacagcgaccccagccagcagtggtgtgccgacctgcagaccctggacaccatgcagcccatcgagaggaagaggcagggctacatccacgagctgatccagacagaggagcgctacatggctgacctgcagctggtggtggaggtgcggcggctgctgctggccagcagccggggcatctgctgcctgtcctag

SEQ ID NO: 242045 - DNA, 1836 bp, Artificial Sequence
  derived and/or modified sequence
atggcccagttccccaccgccatgaacggcggccccaacatgtgggctatcacatctgaggaacggacgaaacacgaccggcagttcgataatctgaaaccgtctggtggatatattacgggtgaccaggcccggaacttcttcttacaatctggtctccccgctccagttctggctgaaatctgggcactttcagatcttaataaggatggcaagatggaccagcaggagtttagcatcgctatgaagctcatcaagctcaagttacaaggacagcaattgccggtcgtccttccgcctataatgaaacagccacccatgtttagccccctgatttccgccagattcggcatgggcagtatgccgaatctctcgatccctcaacccctgcccccagccgcccccatcacttcactgagttccgccacatccggcaccaatctgccccccctcatgatgcccacccctttagtaccttcggtctccacctcctctctacccaacggaactgccagcctcattcagccattacctattccatacagtagtagcaccctgccccacggttcaagctattccctcatgatgggagggtttgggggcgcgtctattcagaaagcccagtccctgatcgacctgggcagctcacgttcttggtctagcggcagctctgcacatagccccgctacgcaccgcgcgcctctctcaagtccagttccaaacagcagcaccagttcaaccgcgtccctcagtggtaactcccccaaaactggaacctcagaatgggctgtaccccagcccacccgtttgaagtaccggcagaaatttaataccctggacaagagcatgtcaggctacttgtcagggtttcaagccaggaacgcattattacaatcaaatctgtcacaaacccaactagccaccatctggaccctcgccgacgtcgatggggacgggcagctcaaagctgaagaatttattctggcaatgcacctcactgatatggctaaagctgggcagccactgcctctgaccctacccccagaactggtgccaccttcttttcgggggggcaagcaaatcgactcgatcaacggaactctgccgtcgtaccagaagatgcaggaggaagagcctcaaaagaagcttcccgtcaccttcgaggacaagcgcaaagccaactacgagcgtgggaatatggagctggagaaaaggaggcaggcccttatggaacaacagcaaagggaagccgagcgcaaagcacagaaagagaaagaggaatgggaacgcaagcagagagagttgcaagaacaggaatggaagaaacagctggagttggaaaagcgattggagaaacagagggagttggaacgtcaaagggaggaggagcggcgcaaagacatagaacggcgcgaagccgctaaacaggaattggagcgacagagacgcctcgagtgggagcgaatacgtagacaggaactgctgaaccagaagaaccgagaacaggaagaaattgtgcgacttaattccaaaaaaaagaaccttcacctggaacttgaagcgctcaatggcaagcaccaacagatatcgggtcgtctgcaagacgttcggctgaagaaacagacccagaaaaccgagctagaagtgctggacaaacagtgcgaccttgagataatggaaattaaacagcttcagcaggaattacaggagtaccagaataaattgatctatctggtgccagaaaaacagctgttaaatgagcggattaaaaatatgcagtttagcaatactcccgatagtggggtctctttactccacaaaaagtctcttgagtag

SEQ ID NO: 242046 - DNA, 3750 bp, Artificial Sequence
  derived and/or modified sequence
atgatggcccagttccccaccgccatgaacggcggccccaacatgtgggcaataacgagtgaggaaaggacaaagcacgacaggcagtttgataatttaaaacctagcggaggctatataaccggcgaccaggcaaggaatttttttctgcaatccggcctgcccgcacctgtcctcgccgagatttgggcactttctgacctcaataaagatggcaaaatggaccaacaggagtttagcattgcaatgaagttaattaagctgaagctccaaggccagcagcttcccgttgtcctccctcccatcatgaagcagcccccaatgttcagccccttgatttccgctcgctttgggatgggatccatgccaaatctgtcaatcccacagcccctcccccctgctgctccaatcacaagcctttctagtgccactagtggcactaatctgcctcctcttatgatgcccacccccctggtgccttctgtgtcaacctcttctctcccaaatggcacggctagtctgattcagcctcttccaattccctattcctctagcactctccctcatggatcaagctactctctgatgatggggggctttggtggcgcctccattcaaaaggctcagagcctcatcgacctgggatcaagctcctcaacttcatcaacggcttcattgtcaggcaacagtcctaaaaccggcacgtcggagtgggccgtgccacagcctacgaggttgaagtacagacagaagtttaacaccctcgataagtccatgagcgggtacctctcgggctttcaagcacgcaatgcactgttacagtcgaatctatctcagacacaattggccactatttggaccctcgctgacgtggacggagacggccagcttaaggccgaagaatttattcttgccatgcacctgactgatatggctaaagcaggacagccattgccactgacccttccacctgagcttgtgcccccgtcattccgaggcgggaagcaaatagactccataaatgggacactgcctagttatcagaaaatgcaagaagaggaaccccaaaagaaactgcctgtcacatttgaagataaacggaaggccaactacgagagaggaaacatggagcttgagaaaaggaggcaggcactcatggagcagcagcaaagagaggcagagagaaaagctcagaaagagaaagaggagtgggagagaaagcagcgcgagttacaggaacaggaatggaaaaaacagttagaattggagaagaggctggaaaaacaacgggaactcgagaggcagcgggaagaagagaggcgaaaggacatcgagcggcgggaggcggccaaacaggagctggaaaggcagagacggttagagtgggaaagaattcgtcgtcaagagcttttgaaccagaaaaacagagaacaagaagaaattgtacggctcaacagcaaaaagaaaaacctgcatctcgagctggaggccctgaacggaaagcaccaacaaatcagcggacgtcttcaggatgtacgtcttaaaaaacagacgcagaaaacggagctggaagtcctggacaaacagtgtgatcttgaaattatggagatcaagcagctccagcaagagctgcaggagtaccagaataagctgatatatcttgtgcctgagaagcagctgttgaacgaacggattaaaaatatgcaattctcgaatactcccgatagcggcgtttcccttctgcacaaaaagagtttggagaaggaggagctgtgtcagaggcttaaagaacaattagatgctttggagaaggaaacggcttccaaactgagtgaaatggattcattcaacaaccagctgaaatgtgggaacatggatgactcagtgctccaatgtctgctgtccctgctcagctgtctcaataacctttttctgctgctgaaagaactgagagaaacatataatacgcaacaacttgctctcgagcagctgtataagattaaaagagacaagctaaaagaaatcgagaggaagaggctagaacttatgcagaagaagaagctggaggatgaagctgccaggaaagccaaacagggcaaagagaacctgtggaaggagaatttgagaaaggaagaggaagagaagcagaagagactgcaggaggagaagacacaggagaagatccaggaggaggagcggaaggcagaggaaaaacagagaaaagacaaagatacactaaaggcagaagagaaaaagcgcgagacagcctcagtgctggtgaactaccgcgccctgtatccattcgaggcaagaaaccacgatgagatgtccttcaacagtggagacatcattcaagttgacgagaagaccgtcggggaacccggatggctgtatggaagctttcagggtaatttcggctggttcccttgtaactacgtggaaaaaatgccatcttcagagaatgagaaagccgtttcaccgaagaaagcccttttgccgccgacggtgagcctctccgcaacctcaacaagctccgaacccctgagtagcaatcaacctgcctcagttactgattatcagaacgtgtccttctcaaatcttaccgtgaacactagctggcagaagaaaagtgcctttaccaggacagtttcacctggcagcgtctcccccattcatggacagggacaggttgtcgagaacctaaaagctcaggccttgtgttcctggacggctaaaaaggataaccacctgaactttagcaagcacgatattatcaccgttcttgagcaacaagaaaactggtggtttggcgaagtgcatggcgggcgtggctggtttcccaagtcctacgtcaaaatcatacccggaagcgaggtgaagagggaggagcccgaagcactgtatgccgcggtgaataaaaaaccaaccagtgctgcctatagcgttggtgaagaatacatcgccctgtacccatacagcagcgtcgagccaggagacttaacatttactgagggagaggaaattttggtgacccagaaggacggcgaatggtggactggctctattggcgatcggtccggaatatttcccagtaactacgtaaaacccaaggaccaggaaagtttcgggtccgcgagcaaaagtggagcgagtaacaagaaacccgagattgcccaggtaacctcagcatatgtggcctccggcagcgagcaactgtcactcgccccgggtcaactcatcctcattctgaagaagaacacttctggatggtggcagggcgaacttcaggcaaggggcaaaaaaaggcagaaaggctggttcccagcaagccacgtgaagctgctggggcctagtagcgaaagagcgactcctgcattccatcctgtgtgtcaggtgatagccatgtatgattatgcagctaataacgaagacgagctgtcattttcaaagggacaattgattaatgtcatgaacaaggacgacccagattggtggcaaggtgaaataaatggcgtaaccgggttgtttcccagtaactatgtaaagatgaccactgatagcgacccaagccagcagtggtgtgcggatctccagaccttagacacaatgcaaccgattgagcgcaaaagacaagggtacatacacgaactgatccaaaccgaggaaaggtacatggccgatctgcagctggttgtggaggtgcggcggctgctgctggcaagcagtagggggatctgctgcctatcttag

SEQ ID NO: 242047 - DNA, 1836 bp, Artificial Sequence
  derived and/or modified sequence
atggctcagtttcctacggctatgaacggcggtcccaatatgtgggcgatcacatctgaggagcgcacaaaacacgatcgccagtttgataacttaaaaccaagcggcggatacatcacgggagatcaggccaggaacttcttccttcagagcggcctgcctgctccagttctcgccgagatttgggccctcagtgatctaaacaaagacgggaagatggaccagcaagagttcagcattgcgatgaagctgataaaattgaaattacaaggacaacagctccccgtcgtgttgccaccaataatgaaacagccgccaatgtttagccctctcataagtgctcgtttcggcatgggttctatgcccaatctgtcgattcctcagcccctgccacccgctgcgcctattaccagcttatcaagtgcgaccagcggtaccaatctaccccctctcatgatgcctactcctttggtcccaagtgtttctacatcctcccttccaaacggcaccgctagcctcattcagcccctccccatcccttacagctcatccaccctaccccacggctcatcgtatagccttatgatggggggttttggaggggctagtatccaaaaggcgcagtcacttatcgacctgggatcttctcggtcctggtcttcgggttcatctgctcacagccctgctacccaccgcgctcctttgtccagccctgtccccaactcatccacttccagcacagcgtcattgtctggcaatagtcccaaaaccggcaccagcgagtgggccgtgccacaacctacaagactcaagtatcgccagaaatttaacacactcgacaaatcgatgtctggatacctttctggatttcaggcacgaaacgctctgttgcagagcaatttatcccagactcaacttgcaacgatatggactctggctgatgtggacggtgacgggcaactcaaggccgaggaatttatccttgctatgcacttaactgacatggcaaaagccggacagcctttacccctgacactgccaccagagcttgtgccaccatcattcagaggcggtaaacagatagactcaattaacggaacccttcctagctaccagaagatgcaagaagaagagcctcaaaagaaactccccgtgactttcgaggataagcgtaaggccaactacgagaggggcaatatggagctcgaaaagagacggcaggctttgatggaacaacagcaacgggaggccgaaaggaaagctcagaaggaaaaggaagagtgggaaagaaaacagcgcgagcttcaggagcaggaatggaaaaagcagctagaactagagaaacggctggaaaagcagagagagctcgaacggcagcgggaggaggaaaggagaaaggacattgaaaggcgtgaagcggcaaaacaagagcttgaaagacagcgcagattggaatgggagcgcataaggagacaggagctactgaatcaaaagaaccgggagcaggaagaaatcgtacggcttaattccaaaaagaaaaacctgcatttagaacttgaagcattgaatgggaaacatcaacagatctcgggacgcctccaagacgtacgactgaagaagcaaacacagaagactgaactcgaggtgctcgacaagcagtgtgatcttgaaattatggaaattaagcagttgcaacaagagctccaggaatatcagaataagctgatatatctggtaccagagaagcagttacttaatgagaggatcaagaacatgcagttctcaaacacacccgacagtggggtgtccctcttgcataaaaagtcgctcgaatag

SEQ ID NO: 242048 - DNA, 3750 bp, Artificial Sequence
  derived and/or modified sequence
atgatggcccagttcccaaccgccatgaatgggggaccgaatatgtgggccataacatcagaggagcgaacaaagcacgaccggcagttcgataatctcaaacccagcggaggatatataactggtgatcaggctcggaatttttttctgcagtccgggctcccagctccagtactggccgagatttgggctttaagtgacctgaacaaggacgggaagatggaccagcaagagttttccatcgcaatgaaactgatcaaattaaagcttcagggccagcagcttcccgtggttctgccacccataatgaagcagccacctatgttctctccgttgatcagcgccaggttcggtatgggctccatgcccaatttgtccattcctcagcctcttcctccggctgcccctattacatccctgtcaagtgctacaagtggaactaatctgccccctctgatgatgcccaccccactggtgccatccgtttctacgtcatcactgccaaacggcacagccagcttaatccaacctttacccataccctactccagtagtaccttacctcacggatcctcatactccctgatgatgggtggattcgggggagcctccatacaaaaggcccagtccctcatcgatctcggatccagttccagtacttccagcacagcgagcctcagcggaaattcaccaaaaacaggaacatctgagtgggcggtgccacaacccaccagactgaaatacaggcaaaaattcaatacactcgacaagagcatgagtggatatttgtcaggcttccaagcaagaaacgcgctgctgcagagcaacctgtctcagactcagcttgcgacgatttggacactggccgacgtcgatggtgacggccagctcaaggcggaagaattcatcctcgccatgcacctcaccgacatggcaaaggcgggacagccactcccattaacgcttccccctgaactcgtgccgccaagcttcaggggaggcaaacagatcgattctatcaacggcactcttccctcttatcagaagatgcaggaggaggaaccccagaaaaaactgcccgtgacctttgaggacaagcggaaagcaaactacgagagaggcaatatggagctggagaagaggcggcaggcactcatggaacagcagcaacgagaggccgagcgcaaggctcagaaggagaaggaggagtgggagcggaaacagcgcgaattacaggagcaggagtggaagaaacagttggagctggagaaacggcttgagaaacagcgagaattggagcggcagcgtgaagaggagcgaagaaaagacattgagagaagagaggctgcaaaacaagagctggaacggcagcggaggctggagtgggagcggatccgcagacaggagctgctgaatcagaagaaccgtgagcaagaggagattgttcgactcaacagtaagaaaaagaacctccatctcgagctggaggcgttgaatggtaagcaccaacagatatccggacggcttcaggacgtacgcctcaaaaaacaaacccagaagactgaactggaggtactcgacaaacaatgtgatcttgaaatcatggaaattaagcaattacagcaagagctccaggaataccagaataaactcatctaccttgtccctgagaaacagctgctgaatgagagaattaaaaatatgcagttctcaaacaccccagattccggtgtatctctcctccacaagaagagcctggaaaaagaggagctgtgccagaggctgaaggagcagctggacgcacttgagaaggagactgccagtaaattgtccgaaatggactcatttaataatcagctcaagtgtggcaacatggatgactctgttctccagtgcctacttagtcttctgagctgcttgaacaacctgttcctgctgttgaaagaactacgcgagacctacaacacacagcagctcgctctagaacaactttataaaattaagagggacaaactaaaagagatagagcgaaagcgcctggagcttatgcaaaaaaagaagcttgaggatgaggccgcacggaaagccaagcaaggcaaggaaaacctgtggaaggaaaatctgagaaaggaagaggaagagaagcagaagcgcctgcaggaagagaagacacaggagaagattcaagaggaagagagaaaggctgaggagaagcagaggaaggataaggatactttaaaagccgaagaaaagaaacgggaaactgcgagtgtgctggtcaactatcgagccctctatcccttcgaggctagaaatcatgacgaaatgagttttaatagcggtgatatcatccaggtggatgaaaaaacggtgggagaaccaggatggctgtacggcagctttcaagggaactttggctggttcccctgcaactatgtggagaagatgccatcttcagagaacgaaaaggccgtttcccctaaaaaggccctgctgccccctactgtgtctttatccgctacttccacgtcatccgagccactctcttcaaaccagcccgcatcagttacagattatcagaacgtctccttttctaatctgactgtcaatacctcgtggcagaagaagtcagcctttacccgaactgtgagccctggctccgtctcgcctattcacgggcagggccaggtggttgagaacctcaaagcgcaagcactttgtagctggactgctaagaaagacaaccatctgaatttttccaagcacgatataatcactgtgctggaacaacaggaaaattggtggtttggcgaggtccacgggggacggggttggtttccaaagagctatgtgaaaatcataccaggtagcgaagtcaaaagagaggagcccgaagcattgtatgcggctgtgaacaagaaacccacgagtgcagcctattctgtgggtgaggaatacatcgcactttacccctactcaagcgtggaacctggggatctgacatttactgagggcgaggaaatcctggtgacccagaaagacggtgaatggtggacaggctcgataggggaccgtagcggcatttttccatccaactatgtaaagccaaaagatcaagagtcattcgggtctgcgtcaaagagcggggcttccaacaagaagccggagatcgcacaagtgacatctgcatacgtggcatctggcagcgagcagctctcattagccccaggccaactgattctgattctgaagaagaacactagtggctggtggcaaggagagttacaggcacgaggaaaaaaacggcagaaggggtggttccctgcgtcccatgttaaactgctcggtccgagctctgagagagccactccagccttccacccggtgtgccaagtgattgcaatgtacgactatgccgctaacaacgaggatgagctatctttctccaagggccagctcatcaatgttatgaataaagatgaccctgattggtggcagggcgaaatcaatggcgttacaggtctgtttccttcaaactacgtgaaaatgaccaccgactctgatccatcccaacaatggtgcgctgacttgcagaccttggacacaatgcaacccatcgagaggaagcgtcagggatatattcacgaactgatccaaactgaggaacggtatatggctgatctgcagcttgtggtggaggttagacgacttcttttggccagctcccgcggtatctgctgtttgagctag

SEQ ID NO: 242049 - DNA, 1836 bp, Artificial Sequence
  derived and/or modified sequence
atggcccagttccccaccgccatgaacggcggccccaacatgtgggccatcaccagcgaggagagaaccaagcacgacagacagttcgacaacctgaagcccagcggcggctacatcaccggcgaccaggccagaaacttcttcctgcagagcggcctgcccgcccccgtgctggccgagatctgggccctgagcgacctgaacaaggacggcaagatggaccagcaggagttcagcatcgccatgaagctgatcaagctgaagctgcagggccagcagctgcccgtggtgctgccccccatcatgaagcagccccccatgttcagccccctgatcagcgccagattcggcatgggcagcatgcccaacctgagcatcccccagcccctgccccccgccgcccccatcaccagcctgagcagcgccaccagcggcaccaacctgccccccctgatgatgcccacccccctggtgcccagcgtgagcaccagcagcctgcccaacggcaccgccagcctgatccagcccctgcccatcccctacagcagcagcaccctgccccacggcagcagctacagcctgatgatgggcggcttcggcggcgccagcatccagaaggcccagagcctgatcgacctgggcagcagcagaagctggagcagcggcagcagcgcccacagccccgccacccacagagcccccctgagcagccccgtgcccaacagcagcaccagcagcaccgccagcctgagcggcaacagccccaagaccggcaccagcgagtgggccgtgccccagcccaccagactgaagtacagacagaagttcaacaccctggacaagagcatgagcggctacctgagcggcttccaggccagaaacgccctgctgcagagcaacctgagccagacccagctggccaccatctggaccctggccgacgtggacggcgacggccagctgaaggccgaggagttcatcctggccatgcacctgaccgacatggccaaggccggccagcccctgcccctgaccctgccccccgagctggtgccccccagcttcagaggcggcaagcagatcgacagcatcaacggcaccctgcccagctaccagaagatgcaggaggaggagccccagaagaagctgcccgtgaccttcgaggacaagagaaaggccaactacgagagaggcaacatggagctggagaagagaagacaggccctgatggagcagcagcagagagaggccgagagaaaggcccagaaggagaaggaggagtgggagagaaagcagagagagctgcaggagcaggagtggaagaagcagctggagctggagaagagactggagaagcagagagagctggagagacagagagaggaggagagaagaaaggacatcgagagaagagaggccgccaagcaggagctggagagacagagaagactggagtgggagagaatcagaagacaggagctgctgaaccagaagaacagagagcaggaggagatcgtgagactgaacagcaagaagaagaacctgcacctggagctggaggccctgaacggcaagcaccagcagatcagcggcagactgcaggacgtgagactgaagaagcagacccagaagaccgagctggaggtgctggacaagcagtgcgacctggagatcatggagatcaagcagctgcagcaggagctgcaggagtaccagaacaagctgatctacctggtgcccgagaagcagctgctgaacgagagaatcaagaacatgcagttcagcaacacccccgacagcggcgtgagcctgctgcacaagaagagcctggagtag

SEQ ID NO: 242050 - DNA, 3750 bp, Artificial Sequence
  derived and/or modified sequence
atgatggcccagttccccaccgccatgaacggcggccccaacatgtgggccatcaccagcgaggagagaaccaagcacgacagacagttcgacaacctgaagcccagcggcggctacatcaccggcgaccaggccagaaacttcttcctgcagagcggcctgcccgcccccgtgctggccgagatctgggccctgagcgacctgaacaaggacggcaagatggaccagcaggagttcagcatcgccatgaagctgatcaagctgaagctgcagggccagcagctgcccgtggtgctgccccccatcatgaagcagccccccatgttcagccccctgatcagcgccagattcggcatgggcagcatgcccaacctgagcatcccccagcccctgccccccgccgcccccatcaccagcctgagcagcgccaccagcggcaccaacctgccccccctgatgatgcccacccccctggtgcccagcgtgagcaccagcagcctgcccaacggcaccgccagcctgatccagcccctgcccatcccctacagcagcagcaccctgccccacggcagcagctacagcctgatgatgggcggcttcggcggcgccagcatccagaaggcccagagcctgatcgacctgggcagcagcagcagcaccagcagcaccgccagcctgagcggcaacagccccaagaccggcaccagcgagtgggccgtgccccagcccaccagactgaagtacagacagaagttcaacaccctggacaagagcatgagcggctacctgagcggcttccaggccagaaacgccctgctgcagagcaacctgagccagacccagctggccaccatctggaccctggccgacgtggacggcgacggccagctgaaggccgaggagttcatcctggccatgcacctgaccgacatggccaaggccggccagcccctgcccctgaccctgccccccgagctggtgccccccagcttcagaggcggcaagcagatcgacagcatcaacggcaccctgcccagctaccagaagatgcaggaggaggagccccagaagaagctgcccgtgaccttcgaggacaagagaaaggccaactacgagagaggcaacatggagctggagaagagaagacaggccctgatggagcagcagcagagagaggccgagagaaaggcccagaaggagaaggaggagtgggagagaaagcagagagagctgcaggagcaggagtggaagaagcagctggagctggagaagagactggagaagcagagagagctggagagacagagagaggaggagagaagaaaggacatcgagagaagagaggccgccaagcaggagctggagagacagagaagactggagtgggagagaatcagaagacaggagctgctgaaccagaagaacagagagcaggaggagatcgtgagactgaacagcaagaagaagaacctgcacctggagctggaggccctgaacggcaagcaccagcagatcagcggcagactgcaggacgtgagactgaagaagcagacccagaagaccgagctggaggtgctggacaagcagtgcgacctggagatcatggagatcaagcagctgcagcaggagctgcaggagtaccagaacaagctgatctacctggtgcccgagaagcagctgctgaacgagagaatcaagaacatgcagttcagcaacacccccgacagcggcgtgagcctgctgcacaagaagagcctggagaaggaggagctgtgccagagactgaaggagcagctggacgccctggagaaggagaccgccagcaagctgagcgagatggacagcttcaacaaccagctgaagtgcggcaacatggacgacagcgtgctgcagtgcctgctgagcctgctgagctgcctgaacaacctgttcctgctgctgaaggagctgagagagacctacaacacccagcagctggccctggagcagctgtacaagatcaagagagacaagctgaaggagatcgagagaaagagactggagctgatgcagaagaagaagctggaggacgaggccgccagaaaggccaagcagggcaaggagaacctgtggaaggagaacctgagaaaggaggaggaggagaagcagaagagactgcaggaggagaagacccaggagaagatccaggaggaggagagaaaggccgaggagaagcagagaaaggacaaggacaccctgaaggccgaggagaagaagagagagaccgccagcgtgctggtgaactacagagccctgtaccccttcgaggccagaaaccacgacgagatgagcttcaacagcggcgacatcatccaggtggacgagaagaccgtgggcgagcccggctggctgtacggcagcttccagggcaacttcggctggttcccctgcaactacgtggagaagatgcccagcagcgagaacgagaaggccgtgagccccaagaaggccctgctgccccccaccgtgagcctgagcgccaccagcaccagcagcgagcccctgagcagcaaccagcccgccagcgtgaccgactaccagaacgtgagcttcagcaacctgaccgtgaacaccagctggcagaagaagagcgccttcaccagaaccgtgagccccggcagcgtgagccccatccacggccagggccaggtggtggagaacctgaaggcccaggccctgtgcagctggaccgccaagaaggacaaccacctgaacttcagcaagcacgacatcatcaccgtgctggagcagcaggagaactggtggttcggcgaggtgcacggcggcagaggctggttccccaagagctacgtgaagatcatccccggcagcgaggtgaagagagaggagcccgaggccctgtacgccgccgtgaacaagaagcccaccagcgccgcctacagcgtgggcgaggagtacatcgccctgtacccctacagcagcgtggagcccggcgacctgaccttcaccgagggcgaggagatcctggtgacccagaaggacggcgagtggtggaccggcagcatcggcgacagaagcggcatcttccccagcaactacgtgaagcccaaggaccaggagagcttcggcagcgccagcaagagcggcgccagcaacaagaagcccgagatcgcccaggtgaccagcgcctacgtggccagcggcagcgagcagctgagcctggcccccggccagctgatcctgatcctgaagaagaacaccagcggctggtggcagggcgagctgcaggccagaggcaagaagagacagaagggctggttccccgccagccacgtgaagctgctgggccccagcagcgagagagccacccccgccttccaccccgtgtgccaggtgatcgccatgtacgactacgccgccaacaacgaggacgagctgagcttcagcaagggccagctgatcaacgtgatgaacaaggacgaccccgactggtggcagggcgagatcaacggcgtgaccggcctgttccccagcaactacgtgaagatgaccaccgacagcgaccccagccagcagtggtgcgccgacctgcagaccctggacaccatgcagcccatcgagagaaagagacagggctacatccacgagctgatccagaccgaggagagatacatggccgacctgcagctggtggtggaggtgagaagactgctgctggccagcagcagaggcatctgctgcctgagctag

SEQ ID NO: 242051 - protein, 192 aa, Artificial Sequence
  derived and/or modified sequence
MQWAVGRRWAWAALLLAVAAVLTQVVWLWLGTQSFVFQREEIAQLARQYAGLDHELAFSRLIVELRRLHPGHVLPDEELQWVFVNAGGWMGAMCLLHASLSEYVLLFGTALGSRGHSGETVVHGPGEATAVEWGPNTWMVEYGRGVIPSTLAFALADTVFSTQDFLTLFYTLRSYARGLRLELTTYLFGQDP

SEQ ID NO: 242052 - DNA, 579 bp, Artificial Sequence
  derived and/or modified sequence
atgcagtgggcagtgggacgtcgctgggcctgggccgccctgctgctcgctgtggctgctgtgcttactcaagtcgtttggctgtggctgggcacacagagctttgtgttccaaagggaggagattgcacaactcgctcgccagtacgcaggcctcgaccacgaactagctttttccaggctaatagtcgagttgagaagactgcatccgggccacgtgctccctgacgaagaactgcagtgggtttttgtgaacgctggtggctggatgggtgcgatgtgcctgctgcatgcgtcgctttccgagtacgtactcctgttcggtaccgcccttggctcccgcgggcactcaggcgagaccgtagtgcacggacctggtgaggcaaccgccgtcgaatggggtcccaacacatggatggtcgaatatggaaggggagtgattcctagtacccttgcctttgcccttgctgacactgtcttttcaacacaggactttctcacactcttttataccctccggtcttacgcccgtgggttgcgccttgagcttactacttacctgtttggccaagatccctag

SEQ ID NO: 242053 - DNA, 579 bp, Artificial Sequence
  derived and/or modified sequence
atgcagtgggccgtgggccgccgctgggcctgggccgccctgctgctggccgtggccgctgtgctgacccaggtggtgtggctgtggctgggcacccagagctttgtgttccagcgggaggagatcgcccagctggcccggcagtatgccggcctggaccacgagctggccttcagccgcctcatcgtggagctgcggcggctgcaccctggccacgtgctgcctgatgaggagctgcagtgggtgtttgtgaatgctgggggctggatgggcgccatgtgcctgctgcacgccagcctgtctgaatatgtgctgctgtttggaacagccctgggcagccggggccacagcggggagaccgtggtgcacggccctggagaggccacagctgtggagtggggccccaacacctggatggtggagtatggccggggcgtcatccccagcaccctggcctttgccctggccgacaccgtcttcagcacccaggacttcctgaccctcttctacaccctgcggagctatgcccggggcctgcggctggagctgaccacctacctgtttggccaggacccctag

SEQ ID NO: 242054 - DNA, 579 bp, Artificial Sequence
  derived and/or modified sequence
atgcagtgggccgtgggccggcggtgggcctgggccgccctgctgttagccgtggcagcagtgctgacccaggtagtttggctgtggctcggcacacaatctttcgttttccagcgggaggaaattgcacagctggcgagacagtatgctggtttggaccatgaattggccttcagccggctcattgtggaacttagacgtctacacccaggacatgtcctgcccgacgaagagctccagtgggtgttcgtcaacgccgggggctggatgggggcaatgtgtcttcttcacgcatctctgtcagaatacgtgcttttattcggcactgctttgggatcacgggggcactctggcgagaccgtggtgcatggccccggcgaggctacagctgtggaatggggcccaaatacctggatggtcgaatatggcaggggtgttatcccatctactctggccttcgccctggcagacactgtatttagtactcaggacttcctcaccctgttctatactctgaggtcctatgccagaggactccgcctcgaactgactacttaccttttcgggcaggatccatag

SEQ ID NO: 242055 - DNA, 579 bp, Artificial Sequence
  derived and/or modified sequence
atgcagtgggccgtcggcagacgctgggcgtgggctgcgctacttttggccgttgccgctgttctcacacaggtggtgtggttgtggctggggactcaaagtttcgtgttccaacgcgaagaaatcgctcagctggccagacagtacgcgggactcgaccatgaactcgcttttagccgacttatcgttgaactgagaaggctgcaccctgggcacgtgttaccagacgaggaactgcaatgggtgttcgtgaacgcaggcggatggatgggtgcgatgtgtttgctgcatgcatccctgagtgaatacgtcctgctcttcggtacggcactgggctctaggggtcactctggggagaccgtggtacatggacctggagaggctacagccgtcgagtgggggccaaacacttggatggttgaatacggtcggggagttattccttctactttggctttcgctctagctgacaccgtgttttcgacgcaagattttttgacactgttttacacgctacggtcttacgccaggggactacgccttgaactaaccacttatctttttgggcaggacccttag

SEQ ID NO: 242056 - DNA, 840 bp, Artificial Sequence
  derived and/or modified sequence
ggcggtggcgggggagcgcttcgtgggcagccggcgggctccgaggccgtgagcgcaaagcctcaggccccggctccctcctgagctgcgccgtgccaggccgcccgccgggatgcagtgggccgtgggccggcggtgggcgtgggccgcgctgctcctggctgtcgcagcggtgctgacccaggtcgtctggctctggctgggtacgcagagcttcgtcttccagcgcgaagagatagcgcagttggcgcggcagtacgctgggctggaccacgagctggccttctctcgtctgatcgtggagctgcggcggctgcacccaggccacgtgctgcccgacgaggagctgcagtgggtgttcgtgaatgcgggtggctggatgggcgccatgtgccttctgcacgcctcgctgtccgagtatgtgctgctcttcggcaccgccttgggctcccgcggccactcgggggagacggtagtacacgggcctggtgaggcaacagctgtggagtgggggccaaacacatggatggtggagtacggccggggcgtcatcccatccaccctggccttcgcgctggccgacactgtcttcagcacccaggacttcctcaccctcttctatactcttcgctcctatgctcggggcctccggcttgagctcaccacctacctctttggccaggacccttgaccagccaggcctgaaggaagacctgcggatagacaggagcgggcaggcccgcacatatccacttgctggagcccatgtttacagacagggacatacaccatgcagatcctgagttcctgctgtatgagcagggatatccatgcttatgt

SEQ ID NO: 242057 - DNA, 579 bp, Artificial Sequence
  derived and/or modified sequence
atgcagtgggccgtgggcagaagatgggcctgggccgccctgctgctggccgtggccgccgtgctgacccaggtggtgtggctgtggctgggcacccagagcttcgtgttccagagagaggagatcgcccagctggccagacagtacgccggcctggaccacgagctggccttcagcagactgatcgtggagctgagaagactgcaccccggccacgtgctgcccgacgaggagctgcagtgggtgttcgtgaacgccggcggctggatgggcgccatgtgcctgctgcacgccagcctgagcgagtacgtgctgctgttcggcaccgccctgggcagcagaggccacagcggcgagaccgtggtgcacggccccggcgaggccaccgccgtggagtggggccccaacacctggatggtggagtacggcagaggcgtgatccccagcaccctggccttcgccctggccgacaccgtgttcagcacccaggacttcctgaccctgttctacaccctgagaagctacgccagaggcctgagactggagctgaccacctacctgttcggccaggacccctag

SEQ ID NO: 242058 - protein, 147 aa, Artificial Sequence
  derived and/or modified sequence
MALRACGLIIFRRCLIPKVDNNAIEFLLLQASDGIHHWTPPKGHVEPGEDDLETALRETQEEAGIEAGQLTIIEGFKRELNYVARNKPKTVIYWLAEVKDYDVEIRLSHEHQAYRWLGLEEACQLAQFKEMKAALQEGHQFLCSIEA

SEQ ID NO: 242059 - DNA, 444 bp, Artificial Sequence
  derived and/or modified sequence
atggccctgcgggcctgcggtctaattatttttcgccggtgcctgatccctaaagttgataataacgctatagagtttctactgctgcaagcgtcagatggaatccaccactggacacccccaaagggccacgtggagcctggcgaagatgatctggaaacagccctccgcgagacacaggaagaggccgggattgaagctggacaactgacgataatcgaaggattcaagcgcgagctgaactacgttgcacgcaacaaacccaagactgtgatatactggcttgcggaagtcaaggactacgacgtggagatacgactgtcccatgaacatcaggcctatcggtggctgggccttgaggaggcatgccagcttgcccaatttaaagagatgaaagctgccttgcaagaggggcatcagttcctgtgttctatcgaggcgtag

SEQ ID NO: 242060 - DNA, 444 bp, Artificial Sequence
  derived and/or modified sequence
atggctttgagagcctgcgggctcattatcttccgccgatgtttgattccaaaggttgataataatgctattgaatttctccttctccaggcatccgatgggatacaccactggaccccccccaaagggcacgttgaacctggagaagatgacctggaaactgctctgcgagagacacaggaggaggcagggatcgaggctggacagctgaccatcatagagggattcaagcgagagttgaactatgtggcgcgcaataagccaaaaactgtcatttactggctggctgaggttaaggactatgatgtggagatccggctgtctcacgagcaccaggcttacaggtggctgggtctcgaagaagcatgtcagttagcccagttcaaggagatgaaagccgctcttcaggaaggtcatcagtttctgtgttccattgaggcttag

SEQ ID NO: 242061 - DNA, 444 bp, Artificial Sequence
  derived and/or modified sequence
atggctctccgagcctgtggtctgatcatcttccggcgctgtctgatcccgaaggtcgacaacaatgccattgaatttttgcttttacaagccagcgacggtattcaccactggacccctccaaagggtcacgttgagccaggcgaggacgaccttgagacagccttgcgagaaacccaggaagaggccggtattgaggcaggtcagctgacgatcatcgagggctttaaaagagaactcaactatgtggccaggaataaacctaagaccgtgatttactggctggctgaagtgaaagactacgacgtggagatacggctgtctcacgaacatcaggcataccgttggttaggtctcgaagaggcgtgccaactcgcccagttcaaagagatgaaagctgcacttcaggagggccaccagttcctgtgctcgatagaggcttag

SEQ ID NO: 242062 - DNA, 444 bp, Artificial Sequence
  derived and/or modified sequence
atggccttgagagcatgtggactgataatctttagaaggtgtctgattccaaaagttgacaataacgccatcgaatttctactgttgcaggcctctgacggaatccaccactggaccccccccaagggtcacgtggagccgggagaggacgacctcgaaactgctctccgcgagacccaggaggaggcagggattgaggctggacagcttacaattatcgaaggatttaagagagagcttaattatgttgctagaaacaaaccgaaaaccgtaatttattggctggcggaggtgaaggattacgacgtcgagattcgtctgtcgcacgagcatcaggcgtataggtggttggggctcgaggaggcctgccagctggcgcagtttaaagaaatgaaagcggcactgcaagagggacaccagtttctgtgcagcatagaggcctag

SEQ ID NO: 242063 - DNA, 444 bp, Artificial Sequence
  derived and/or modified sequence
atggctttgagggcctgcggccttattatttttcgtagatgtctcatccctaaagttgataataatgcaatcgaatttctgcttctgcaggcttctgacggaattcaccattggactccacctaaggggcacgtagagccaggcgaagatgacctggagactgccctacgggagactcaggaagaggccgggatagaagccggacagctaaccattatcgagggttttaagcgggagctgaactacgtcgcccgtaacaagccaaaaaccgtgatttactggctggccgaagtcaaggactatgacgtggagatccgcctctctcacgaacatcaagcgtaccggtggctgggtctcgaagaggcctgccagctggcacaatttaaggagatgaaggctgctttacaggagggccaccaatttttgtgcagtatcgaagcatag

SEQ ID NO: 242064 - DNA, 444 bp, Artificial Sequence
  derived and/or modified sequence
atggccctgcgggcctgtggcctcatcatcttccgccgctgcctgatccccaaggtggacaacaatgccatcgagttcctgctgctgcaggccagtgatggcatccaccactggaccccacccaagggccacgtggagcctggagaagatgacctggagacagccctgcgggagacccaggaggaggccggcattgaagctggccagctgaccatcatcgagggcttcaagcgggagctgaactacgtggccaggaacaagcccaagacagtcatctactggctggccgaggtgaaggactatgatgtggagatccggctgagccatgagcaccaggcctaccgctggctgggcctggaggaggcctgccagctggcccagttcaaggagatgaaggccgccctgcaggagggccaccagttcctgtgcagcattgaggcctag

SEQ ID NO: 242065 - DNA, 444 bp, Artificial Sequence
  derived and/or modified sequence
atggccctgcgggcctgcggcctgatcatcttccggcggtgcctgatccctaaagtggacaataatgccatcgaatttctgctgctgcaggcatcggacggtattcatcattggaccccaccgaaaggtcacgtggaacctggcgaagatgatctggagaccgccttgagagagacccaagaagaggcaggaattgaagccggacaattgaccatcattgaagggtttaaacgagaactgaattacgtggccaggaataaaccaaagaccgtgatatattggctcgctgaagttaaagattatgatgtggaaattcggttaagtcacgaacatcaggcctatcggtggctcggcctggaggaggcttgtcagctcgcccaatttaaggagatgaaggctgcactgcaggaaggacatcagtttctatgttccatcgaggcctag

SEQ ID NO: 242066 - DNA, 444 bp, Artificial Sequence
  derived and/or modified sequence
atggccctgcgggcctgcggcctgatcatcttccggcggtgcctgatccccaaagtggacaacaacgccattgagttcttgctacttcaggccagcgacggcatccatcactggacaccaccgaaaggtcatgtcgagcctggggaggatgatctggagaccgcgttacgcgaaacccaggaggaagcgggcattgaggccggacagctgactattattgaaggctttaagagggagttaaactacgtagctcgcaataaacctaaaaccgtcatatattggcttgccgaggtgaaagactacgatgttgagattagactttctcacgaacatcaagcctatagatggctggggcttgaggaggcctgtcaactggctcaatttaaagaaatgaaggccgctctacaagaggggcaccagtttctgtgttccatagaagcatag

SEQ ID NO: 242067 - DNA, 444 bp, Artificial Sequence
  derived and/or modified sequence
atggccctgcgggcctgcggcctgatcatcttccggcggtgcctgattcccaaggtcgataacaacgctatcgagtttttactcctacaggcctcagatggtattcaccactggaccccaccgaaaggtcacgttgagcccggagaggacgacctggaaactgccctcagggagacccaggaggaggccgggattgaggccgggcagctcacaatcatcgagggattcaagcgcgaactgaactacgttgcaagaaataagccaaagacggtgatttattggctggcagaggttaaagattatgacgttgagatcaggctatcccacgaacaccaggcataccggtggttaggcctagaggaggcctgccagctggcccaatttaaggaaatgaaggctgcattacaggagggtcaccagtttctgtgcagtatcgaggcctag

SEQ ID NO: 242068 - DNA, 444 bp, Artificial Sequence
  derived and/or modified sequence
atggccctgcgggcctgcggcctgatcatcttccggcggtgcctgatccctaaggtggataataatgccatagaattcttgctgctccaggccagcgacggcattcaccactggacaccacctaaaggccacgtggagcccggcgaggacgacctcgagaccgctctgagagagacgcaggaagaagctggaatcgaggcagggcaacttactataatcgaggggtttaaaagagagctgaactatgttgctcgtaacaaacccaaaactgtgatctattggctggctgaagtcaaagattacgacgtggagatcaggttatcgcacgaacaccaagcgtacaggtggctgggccttgaagaggcgtgccaacttgcccagtttaaagaaatgaaggccgctctccaggaagggcaccagttcctatgttccattgaggcttag

SEQ ID NO: 242069 - DNA, 444 bp, Artificial Sequence
  derived and/or modified sequence
atggccctgcgggcctgcggcctgatcatcttccggcggtgcctgattcccaaagttgataacaatgctatagagttcttactattgcaggcaagcgatggcatacaccattggacgcccccaaaagggcacgtagagccaggcgaggacgacttggagaccgccctgcgggaaactcaggaggaggccggaatcgaggccggacaactgactataattgagggctttaagcgggagctgaattacgtcgctcggaataagccgaaaacagtaatatattggctcgcagaagtcaaagactacgatgtagagattagactgtctcatgaacatcaggcatatcggtggctgggcctggaagaggcatgccaactcgctcagttcaaggagatgaaagccgctctccaggaaggccatcagttcctctgttccattgaagcttag

SEQ ID NO: 242070 - DNA, 1060 bp, Artificial Sequence
  derived and/or modified sequence
ctattgatgggcccaagcgtaaccaggctcttctgattggccggtgtacttcagtttccgtccaaggtccgcctcctacctccttctgcttcggggagggcatgggatcagctacctgtttctgcctcaaccacggaccaataatatgagatctttgttcaccagttctacagtgatggggtgcttccttttggcttctggaatgggtgcgtttgcttctgaggatctccagtgtcacaacaaacacatgccagccctgttttacagggagccctggaggagttgggatagaggccacattgactgagggtagttgccagggtcctgcagttatacacaaagtccttaggataagaccatggccttgagagcatgtggcttgatcatcttccgaagatgcctcattcccaaagtggacaacaatgcaattgagtttttactgctgcaggcatcagatggcattcatcactggactcctcccaaaggccatgtggaaccaggagaggatgacttggaaacagccctgagggagacccaagaggaagcaggcatagaagcaggccagctgaccattattgaggggttcaaaagggaactcaattatgtggccaggaacaagcctaaaacagtcatttactggctggcggaggtgaaggactatgacgtggagatccgcctctcccatgagcaccaagcctaccgctggctggggctggaggaggcctgccagttggctcagttcaaggagatgaaggcagcgctccaagaaggacaccagtttctttgctccatagaggcctgagctgactggagcagagtcatttgcttcagcaggatccttgtgggccttctaagatgaagccaccctcaggtccagggaaggttgtgctggtatttggctcatgacagccaagagcagatttgtgaaatcggctcaactcccaggtgagagcaagcaaaaatcttggctgggtggaaaggaaggcaaaagagtaaaaattaaaaaggccaggcccagtaagtgtaccttgtactttataaataaacctcaagcagctca

SEQ ID NO: 242071 - DNA, 960 bp, Artificial Sequence
  derived and/or modified sequence
ctattgatgggcccaagcgtaaccaggctcttctgattggccggtgtacttcagtttccgtccaaggtccgcctcctacctccttctgcttcggtgcgtttgcttctgaggatctccagtgtcacaacaaacacatgccagccctgttttacagggagccctggaggagttgggatagaggccacattgactgagggtagttgccagggtcctgcagttatacacaaagtccttaggataagaccatggccttgagagcatgtggcttgatcatcttccgaagatgcctcattcccaaagtggacaacaatgcaattgagtttttactgctgcaggcatcagatggcattcatcactggactcctcccaaaggccatgtggaaccaggagaggatgacttggaaacagccctgagggagacccaagaggaagcaggcatagaagcaggccagctgaccattattgaggggttcaaaagggaactcaattatgtggccaggaacaagcctaaaacagtcatttactggctggcggaggtgaaggactatgacgtggagatccgcctctcccatgagcaccaagcctaccgctggctggggctggaggaggcctgccagttggctcagttcaaggagatgaaggcagcgctccaagaaggacaccagtttctttgctccatagaggcctgagctgactggagcagagtcatttgcttcagcaggatccttgtgggccttctaagatgaagccaccctcaggtccagggaaggttgtgctggtatttggctcatgacagccaagagcagatttgtgaaatcggctcaactcccaggtgagagcaagcaaaaatcttggctgggtggaaaggaaggcaaaagagtaaaaattaaaaaggccaggcccagtaagtgtaccttgtactttataaataaacctcaagcagctcaaggttgtccttct

SEQ ID NO: 242072 - DNA, 1047 bp, Artificial Sequence
  derived and/or modified sequence
ctattgatgggcccaagcgtaaccaggctcttctgattggccggtgtacttcagtttccgtccaaggtccgcctcctacctccttctgcttcgggtaaaatctcctgtttcctccctcagccaatagcaaaaataacaaaatgactcagcagcttcgtctctgcaagaatggagtggcagatgtccagggaaagtgcgtttgcttctgaggatctccagtgtcacaacaaacacatgccagccctgttttacagggagccctggaggagttgggatagaggccacattgactgagggtagttgccagggtcctgcagttatacacaaagaccatggccttgagagcatgtggcttgatcatcttccgaagatgcctcattcccaaagtggacaacaatgcaattgagtttttactgctgcaggcatcagatggcattcatcactggactcctcccaaaggccatgtggaaccaggagaggatgacttggaaacagccctgagggagacccaagaggaagcaggcatagaagcaggccagctgaccattattgaggggttcaaaagggaactcaattatgtggccaggaacaagcctaaaacagtcatttactggctggcggaggtgaaggactatgacgtggagatccgcctctcccatgagcaccaagcctaccgctggctggggctggaggaggcctgccagttggctcagttcaaggagatgaaggcagcgctccaagaaggacaccagtttctttgctccatagaggcctgagctgactggagcagagtcatttgcttcagcaggatccttgtgggccttctaagatgaagccaccctcaggtccagggaaggttgtgctggtatttggctcatgacagccaagagcagatttgtgaaatcggctcaactcccaggtgagagcaagcaaaaatcttggctgggtggaaaggaaggcaaaagagtaaaaattaaaaaggccaggcccagtaagtgtaccttgtactttataaataaacctcaagcagctcaaggttgtccttct

SEQ ID NO: 242073 - DNA, 1002 bp, Artificial Sequence
  derived and/or modified sequence
ctattgatgggcccaagcgtaaccaggctcttctgattggccggtgtacttcagtttccgtccaaggtccgcctcctacctccttctgcttcggttctacagtgatggggtgcttccttttggcttctggaatgggtgcgtttgcttctgaggatctccagtgtcacaacaaacacatgccagccctgttttacagggagccctggaggagttgggatagaggccacattgactgagggtagttgccagggtcctgcagttatacacaaagtccttaggataagaccatggccttgagagcatgtggcttgatcatcttccgaagatgcctcattcccaaagtggacaacaatgcaattgagtttttactgctgcaggcatcagatggcattcatcactggactcctcccaaaggccatgtggaaccaggagaggatgacttggaaacagccctgagggagacccaagaggaagcaggcatagaagcaggccagctgaccattattgaggggttcaaaagggaactcaattatgtggccaggaacaagcctaaaacagtcatttactggctggcggaggtgaaggactatgacgtggagatccgcctctcccatgagcaccaagcctaccgctggctggggctggaggaggcctgccagttggctcagttcaaggagatgaaggcagcgctccaagaaggacaccagtttctttgctccatagaggcctgagctgactggagcagagtcatttgcttcagcaggatccttgtgggccttctaagatgaagccaccctcaggtccagggaaggttgtgctggtatttggctcatgacagccaagagcagatttgtgaaatcggctcaactcccaggtgagagcaagcaaaaatcttggctgggtggaaaggaaggcaaaagagtaaaaattaaaaaggccaggcccagtaagtgtaccttgtactttataaataaacctcaagcagctcaaggttgtccttct

SEQ ID NO: 242074 - DNA, 1074 bp, Artificial Sequence
  derived and/or modified sequence
ctattgatgggcccaagcgtaaccaggctcttctgattggccggtgtacttcagtttccgtccaaggtccgcctcctacctccttctgcttcgggggagggcatgggatcagctacctgtttctgcctcaaccacggaccaataatatgagatctttgttcaccagttctacagtgatggggtgcttccttttggcttctggaatgggtgcgtttgcttctgaggatctccagtgtcacaacaaacacatgccagccctgttttacagggagccctggaggagttgggatagaggccacattgactgagggtagttgccagggtcctgcagttatacacaaagtccttaggataagaccatggccttgagagcatgtggcttgatcatcttccgaagatgcctcattcccaaagtggacaacaatgcaattgagtttttactgctgcaggcatcagatggcattcatcactggactcctcccaaaggccatgtggaaccaggagaggatgacttggaaacagccctgagggagacccaagaggaagcaggcatagaagcaggccagctgaccattattgaggggttcaaaagggaactcaattatgtggccaggaacaagcctaaaacagtcatttactggctggcggaggtgaaggactatgacgtggagatccgcctctcccatgagcaccaagcctaccgctggctggggctggaggaggcctgccagttggctcagttcaaggagatgaaggcagcgctccaagaaggacaccagtttctttgctccatagaggcctgagctgactggagcagagtcatttgcttcagcaggatccttgtgggccttctaagatgaagccaccctcaggtccagggaaggttgtgctggtatttggctcatgacagccaagagcagatttgtgaaatcggctcaactcccaggtgagagcaagcaaaaatcttggctgggtggaaaggaaggcaaaagagtaaaaattaaaaaggccaggcccagtaagtgtaccttgtactttataaataaacctcaagcagctcaaggttgtccttct

SEQ ID NO: 242075 - DNA, 444 bp, Artificial Sequence
  derived and/or modified sequence
atggcactgcgcgcatgcggcctgattatcttcaggcggtgcctgatacctaaagtggacaataatgccatcgagtttcttctgcttcaggcgtctgatgggatccatcactggaccccacccaaggggcacgtggagcctggcgaagacgacctcgagaccgcgcttagagaaacacaagaggaggctggaattgaggcaggccagttgactattattgagggttttaagcgtgagctgaactacgtggcaagaaacaagcccaagaccgtgatttattggctcgcagaggtgaaggattatgacgtcgagatacgtctctctcacgaacaccaggcttacagatggctcggacttgaagaagcatgccagctggcacagtttaaggagatgaaagccgcactccaggaaggacaccagttcttatgcagcatcgaggcctag

SEQ ID NO: 242076 - DNA, 444 bp, Artificial Sequence
  derived and/or modified sequence
atggcgctgagagcctgtggtctgattattttccgtcggtgtttaatcccaaaagtggacaacaacgcaattgaatttctcctcctccaggccagcgatggaatacatcactggacaccacccaagggacacgtagagcccggagaagatgacttagaaacagccttgagggagactcaggaagaggcgggtatcgaagcaggtcagctgaccattatagagggatttaagcgcgagctgaactacgtcgcaagaaataaaccgaagaccgtgatctattggctggccgaggtgaaggactatgatgtcgagatcagactaagccacgagcatcaggcctatcggtggctcggattggaggaggcatgccagctcgcccagtttaaggagatgaaagccgctctgcaggaaggacaccagtttctatgtagcattgaggcttag

SEQ ID NO: 242077 - DNA, 444 bp, Artificial Sequence
  derived and/or modified sequence
atggcattgcgggcttgtggactcattatcttcaggcgctgcctgattcctaaagtggataataatgcgattgaattcttactcctccaagcgtccgatggcatacaccactggacgccccctaaaggacatgtggaacccggtgaggatgacctggagacagccttaagggaaacgcaggaggaagccggaatcgaggctgggcagctaacaatcatcgagggatttaagcgcgaactgaactacgtcgcacggaacaaacccaagactgtaatctattggttggcagaggtaaaggactacgatgtcgaaatccggctttctcacgagcatcaggcttaccgatggctgggactggaagaagcctgtcagctggcacaattcaaagaaatgaaggcagccctccaggagggacaccagttcctttgcagtatcgaggcttag

SEQ ID NO: 242078 - DNA, 444 bp, Artificial Sequence
  derived and/or modified sequence
atggccctgcgggcttgcggtctgatcattttcagaaggtgcttgatccccaaggttgacaacaatgctattgagtttttgctgcttcaagcctccgacggcatccatcattggacccccccaaaaggacatgttgagccaggcgaagacgacttagagaccgcgcttcgcgagacgcaggaggaggcaggtattgaagccggacaactgactattattgaaggcttcaaaagggagctcaactatgtcgccaggaacaaacccaagaccgtcatttattggctcgctgaagtgaaggactatgacgtggagattcggttaagccacgagcaccaggcttatcgctggttaggtctggaggaggcgtgtcaacttgcacagttcaaggagatgaaagccgctttacaagagggccaccagtttctatgtagtattgaagcctag

SEQ ID NO: 242079 - DNA, 444 bp, Artificial Sequence
  derived and/or modified sequence
atggccctccgcgcttgcggactgattattttcaggcggtgtctgattcctaaggtggataataacgcgatagagttcctgctcctacaagcatctgatggcatacaccactggacgccgccaaaagggcatgtggagcctggagaagacgacctcgagacagcactgcgcgagacccaggaggaagctggcatagaagcagggcaattgactatcatcgaaggattcaaacgcgagttgaactacgtagcccgtaataagcctaagacggttatctattggctggccgaagtaaaggactacgatgtggagatcagactgagtcatgagcaccaggcgtacaggtggttgggactcgaagaggcttgccagctagcacagtttaaagaaatgaaggcagcgctacaggagggccaccaattcctctgctcgattgaggcgtag

SEQ ID NO: 242080 - DNA, 444 bp, Artificial Sequence
  derived and/or modified sequence
atggccctgagagcctgcggcctgatcatcttcagaagatgcctgatccccaaggtggacaacaacgccatcgagttcctgctgctgcaggccagcgacggcatccaccactggaccccccccaagggccacgtggagcccggcgaggacgacctggagaccgccctgagagagacccaggaggaggccggcatcgaggccggccagctgaccatcatcgagggcttcaagagagagctgaactacgtggccagaaacaagcccaagaccgtgatctactggctggccgaggtgaaggactacgacgtggagatcagactgagccacgagcaccaggcctacagatggctgggcctggaggaggcctgccagctggcccagttcaaggagatgaaggccgccctgcaggagggccaccagttcctgtgcagcatcgaggcctag

SEQ ID NO: 242081 - protein, 605 aa, Artificial Sequence
  derived and/or modified sequence
MALPACAVREFEPPRQPERGAPVRTTCPRRHSRVEAELAASRPGSVAASVRAGPPRGVSHGFHTRPLLDKPRKASSSLAGAACAPLFALLSRGRRRRMHVLRRRWDLGSLCRALLTRGLAALGHSLKHVLGAIFSKIFGPMASVGNMDEKSNKLLLALVMLFLFAVIVLQYVCPGTECQLLRLQAFSSPVPDPYRSEDESSARFVPRYNFTRGDLLRKVDFDIKGDDLIVFLHIQKTGGTTFGRHLVRNIQLEQPCECRVGQKKCTCHRPGKRETWLFSRFSTGWSCGLHADWTELTSCVPSVVDGKRDARLRPSRNFHYITILRDPVSRYLSEWRHVQRGATWKASLHVCDGRPPTSEELPSCYTGDDWSGCPLKEFMDCPYNLANNRQVRMLSDLTLVGCYNLSVMPEKQRNKVLLESAKSNLKHMAFFGLTEFQRKTQYLFEKTFNMNFISPFTQYNTTRASSVEINEEIQKRIEGLNFLDMELYSYAKDLFLQRYQFMRQKEHQEARRKRQEQRKFLKGRLLQTHFQSQGQGQSQNPNQNQSQNPNPNANQNLTQNLMQNLTQSLSQKENRESPKQNSGKEQNDNTSNGTNDYIGSVEKWR

SEQ ID NO: 242082 - protein, 459 aa, Artificial Sequence
  derived and/or modified sequence
MDEKSNKLLLALVMLFLFAVIVLQYVCPGTECQLLRLQAFSSPVPDPYRSEDESSARFVPRYNFTRGDLLRKVDFDIKGDDLIVFLHIQKTGGTTFGRHLVRNIQLEQPCECRVGQKKCTCHRPGKRETWLFSRFSTGWSCGLHADWTELTSCVPSVVDGKRDARLRPSRNFHYITILRDPVSRYLSEWRHVQRGATWKASLHVCDGRPPTSEELPSCYTGDDWSGCPLKEFMDCPYNLANNRQVRMLSDLTLVGCYNLSVMPEKQRNKVLLESAKSNLKHMAFFGLTEFQRKTQYLFEKTFNMNFISPFTQYNTTRASSVEINEEIQKRIEGLNFLDMELYSYAKDLFLQRYQFMRQKEHQEARRKRQEQRKFLKGRLLQTHFQSQGQGQSQNPNQNQSQNPNPNANQNLTQNLMQNLTQSLSQKENRESPKQNSGKEQNDNTSNGTNDYIGSVEKWR

SEQ ID NO: 242083 - DNA, 1818 bp, Artificial Sequence
  derived and/or modified sequence
atggctctgccagcctgtgccgtaagggagtttgagccaccccgccagcctgaacgcggggctcctgtgagaactacctgtcctagacggcattcacgggttgaggccgagttagctgctagccgtcccggatccgtggctgctagtgtccgcgctggaccgccacggggagtcagccacgggttccataccagacccttactcgataaacccaggaaagccagcagctctcttgccggcgcggcatgtgcgccgctgtttgcactgttatccagaggcaggcgccgccgaatgcatgtgctgcgacggcgttgggatctgggttccctctgccgtgcactgctgacgcgcggcctggccgcactgggtcacagtctgaagcacgtccttggcgccatattctccaagattttcggcccaatggcctctgttggcaacatggacgaaaagtctaacaaactgctattagccctggtcatgttgtttttgttcgctgtcatcgtcttgcagtatgtctgccccggaactgagtgccagctcttgcgactacaggctttcagtagtcctgtgccagacccataccggagcgaggatgagagttcagctagatttgtgcccagatacaactttacacgcggtgatctgctgaggaaagtagacttcgacattaagggtgacgacctcattgtctttctgcacatacaaaagacgggaggtacaacatttggcaggcaccttgttaggaatattcagctggagcagccatgtgaatgtagagtgggacagaaaaaatgcacgtgccatcggcctggaaagagagagacctggctgttttctcgattctcaactgggtggagttgcgggttgcacgccgactggacagagcttacatcctgcgttccatccgtagtagatggcaagcgcgacgcacgactgaggcccagccggaactttcattatattactatcttaagggacccggtgtcaaggtatctctccgagtggcgacatgtgcagagaggcgcgacctggaaagccagcttacatgtctgtgacggacgacctccaacttcggaggagcttcccagctgttatacaggtgatgactggagcggatgcccgttaaaggagttcatggactgtccttataatctggccaataataggcaggtgcgtatgctttcagacctgacactcgtgggatgctataatctctctgtgatgcccgagaagcaacgaaacaaagtactgctggagtcggccaagagcaatcttaaacacatggccttcttcggactgaccgagtttcaaagaaagactcagtacctctttgaaaagaccttcaacatgaatttcatctctcccttcactcaatacaacactacacgcgctagttccgtagagatcaacgaggaaatccaaaaacggattgaggggttgaatttcctcgacatggaactgtactcttacgcaaaagatctgtttcttcagcgctaccagtttatgcggcagaaagaacaccaggaagcaagaagaaagaggcaggagcagaggaaatttttgaaggggcggctgcttcaaactcactttcagagccaaggccagggccaatcgcagaaccccaaccaaaaccagagccaaaatccaaatcctaacgcaaaccaaaatctcacacagaaccttatgcagaaccttacccaaagtctctcccagaaggagaacagggagagcccaaaacaaaacagcggcaaggagcagaacgacaacacctcaaacggcaccaacgactatatcggttccgtagagaaatggaggtag

SEQ ID NO: 242084 - DNA, 1380 bp, Artificial Sequence
  derived and/or modified sequence
atggacgagaagagtaacaagcttttgctggccttggtcatgctctttctctttgctgtgattgtgctgcagtacgtgtgcccgggcactgagtgccagttgctccggttgcaagcctttagctcaccagttcctgacccctatcgtagcgaagacgaaagttcagcaaggtttgtccctaggtacaactttaccaggggcgacttgctccgcaaagtagactttgacataaaaggcgatgatcttattgtattccttcacattcaaaagacgggaggaacaacgttcggcaggcatctggtcagaaatattcagctggagcagccatgcgaatgtagggttgggcaaaaaaaatgcacctgtcaccgacccggtaagcgggaaacttggctttttagccgatttagtacgggttggtcctgcggattacatgctgactggacggaacttacatcatgcgtcccatctgttgtcgatggaaaacgggacgctagactccggccctcccgaaactttcattatattaccattttgagagaccccgttagccgttatttgagcgaatggcggcacgtgcaacgaggtgcaacgtggaaagcaagtctgcacgtttgcgatggtagacctcctacgtctgaagagctgcccagttgttacacaggcgatgattggtccggatgtcctctgaaggagtttatggattgcccctataacctggcgaataatcgtcaggtccggatgctgtctgatcttacactggtaggctgctacaacctttctgtaatgcctgaaaaacagcgcaacaaggttcttctggagtccgccaagtccaatctcaagcacatggctttttttggcctgactgagtttcagcgcaagactcagtatctttttgaaaaaaccttcaacatgaattttatttcccccttcacccagtacaacacaaccagggcaagtagcgttgaaattaacgaggaaatccaaaaaaggattgagggcctaaatttccttgacatggagctgtactcctacgctaaggacctcttcttgcagagataccagtttatgaggcagaaagagcatcaagaggctcgtcgcaagaggcaggagcagaggaagttccttaaagggaggctgctccagacccactttcaatctcaaggccagggccagagtcaaaaccccaaccagaaccagtcacagaacccaaaccctaacgcaaatcagaatctgacccaaaaccttatgcaaaatttgacacaatccttaagccagaaggaaaacagagaaagtcccaagcaaaatagcggcaaggagcagaatgataacacatcaaatggcacgaacgattatataggcagcgtggaaaaatggcgttag

SEQ ID NO: 242085 - DNA, 4441 bp, Artificial Sequence
  derived and/or modified sequence
aagccaggctgacctttatgctcccagaatcatcagccttttcattggaaaccatggaaggacggttctgggaaaataatgaaaatcataccacaccatagagacaaccagaagccctgctcagatgacagagttctcctcgccttccagaaaatgcccccgcttccgctggagaatggaaattggcaaagagagacggaaaagctccaatttgcgcctttgctattttaggagaggttgaaattacgagccaaagtggagtgatgcgctaagcggagtgacctccgtactccaagaaaagagaaaacccaggttctctgcttgtgaagtggctcgagctcttaggcgtgaggcattattatataaattcaagctcgctcgtgatccttagtaccctgagttgcctgaaggggggaatggcactgcctgcgtgtgcagtccgggagttcgagccgccgcggcaaccggagcgaggagcgcccgtccgcaccacctgtccccgccggcattccagagtagaggccgaattggcagcgagccggcccgggtcggtcgccgcctcagttcgcgcgggccctcctaggggtgtgtctcacggattccacacccggccgctcctggacaagccccgaaaggcgtcttcttccctggcgggagccgcgtgcgccccgcttttcgcgctgctgtcccggggccgccgcaggcggatgcacgtcctcaggcgacgctgggacctgggctccctctgccgggccctgctcactcggggcctggccgccctgggccactcgctgaagcacgtgctcggtgcgatcttctccaagattttcggccccatggccagcgtcgggaacatggatgagaaatccaacaagctgctgctagctttggtgatgctcttcctatttgccgtgatcgtcctccaatacgtgtgccccggcacagaatgccagctcctccgcctgcaggcgttcagctccccggtgccggacccgtaccgctcggaggatgagagctccgccaggttcgtgccccgctacaatttcacccgcggcgacctcctgcgcaaggtagacttcgacatcaagggcgatgacctgatcgtgttcctgcacatccagaagaccgggggcaccactttcggccgccacttggtgcgtaacatccagctggagcagccgtgcgagtgccgcgtgggtcagaagaaatgcacttgccaccggccgggtaagcgggaaacctggctcttctccaggttctccacgggctggagctgcgggttgcacgccgactggaccgagctcaccagctgtgtgccctccgtggtggacggcaagcgcgacgccaggctgagaccgtccaggaacttccactacatcaccatcctccgagacccagtgtcccggtacttgagtgagtggaggcatgtccagagaggggcaacatggaaagcatccctgcatgtctgcgatggaaggcctccaacctccgaagagctgcccagctgctacactggcgatgactggtctggctgccccctcaaagagtttatggactgtccctacaatctagccaacaaccgccaggtgcgcatgctctccgacctgaccctggtaggctgctacaacctctctgtcatgcctgaaaagcaaagaaacaaggtccttctggaaagtgccaagtcaaatctgaagcacatggcgttcttcggcctcactgagtttcagcggaagacccaatatctgtttgagaaaaccttcaacatgaactttatttcgccatttacccagtataataccactagggcctctagtgtagagatcaatgaggaaattcaaaagcgtattgagggactgaattttctggatatggagttgtacagctatgccaaagacctttttttgcagaggtatcagtttatgaggcagaaagagcatcaggaggccaggcgaaagcgtcaggaacaacgcaaatttctgaagggaaggctccttcagacccatttccagagccagggtcagggccagagccagaatccgaatcagaatcagagtcagaacccaaatccgaatgccaatcagaacctgactcagaatctgatgcagaatctgactcagagtttgagccagaaggagaaccgggaaagcccgaagcagaactcaggcaaggagcagaatgataacaccagcaatggcaccaacgactacataggcagtgtagagaaatggcgttaaatggctcaaaaaggcctgtacatacttctcccaaagcgccactgaaaagatggcatagcttaaaagatgaaagtgtccaaacacatcctgcttccttcattggggaagttttaaaaaaaagtttagatgttgcctttacagttgcctttcaattcagtgttatactgtgtgtaggtaaaacaaatctcaatatggaattaaattgtctttttggggttggactaaatatgaaatccgaaagccaaaccagactcaccagaaattgctgtttagatattttaagaagttcttaaattagttatggagacaaagtgaaaacataaaatgtgaccatttaacttatggctaagaaatggactttaaattattcatgatacactgttaaaacccaatcttggaatcaaatattttttccaggggtgagaataagtataaacataaagcaactaaaatgaaacataaaaccttttattttcttctgattttaacaaggaatctatttaaatagaataacaactgatggtgaatcttaccgagctgtagaaaataaaaaattcctctccaaacatgggtagttttatgtcaaaatattggcttttcaagaacaggactcatatcttgatatttaagagatgtttaaaattttaaactttttctaccttctactgtttaaaggttttacacagggtgtatctcacattaaacaaaacacctttttttcaaaatgaaataccaatgtaaagatctaatttccaggcgctttcagggcactgtaatttcaacaatactggaatcattttggcgctgcttctcattcattttaaggcttctctgaattgtgctcattccaaattaacccatgtatagaatctttcttcatcatctaaatggtgtgttgctgaagttattgtggtatataatcctggattaaagtcaggactttctttctatagaattattttatcaatatttgtgtagtgaggtcctaatcaagaaacttgaacaggataatgtgtctaaaaatattgctgaagttattcttgatcagatagaatttaacctaaaatgtgaactcttacttactttttgtacatctctattgtaatgtttccagttgggccaactatttctagccctttagttctttttcatgttgacagatttgtagacaattacaaaagccaaaaaaggataaaataagcattaggaaggctagccagttattcaatagcaccttgataatgtgggcaaacccttctacaaagtttttgttttgaaaagagcaaaagtaaaaagtgttctgtagtgaggttacatatcaggaacatatgagttgagcagagtaatttggtagtgtaagtcgatgcaaaaatacttctatggtacctattacaagctgaccaagataaaaagaagtatgtaacccactgtgctgtcaagcatcatgattccgggcagttttcattttactgtggattttgctatacttatgcaaggacttacactaacctcctggctgtaaatcaaacaaggtgactgaaagtggcatttatgttttcacaagggacatgcttagaagtgtgaccataaagtcacatcttgtacaatctgctcatgtgtttcatctgtagtaatatagccacaaactggacaagaagctgggtatttgggtttaaaatagattttcttgactctgagcttgtatcagtatttctagcttttgttttgtctgacagtattgcagtcttgaaaatcctgagagctaaaaaactgaaaggaatttttccacaccttgaagtcacagtgttttagagtaaaactattttgtgtacaattgtgtttttaaaatagttagtagatcactatggtatttcaattttctttagttttaattgaaaatgtttgcttttaaaactgataggtattgttggaaagcaggatgaagcctgagccagtggaaaagcttgttacagaaaaaacattttgtgttattgctgtggtgtgcatgatttgcaaagattaagtgcattttctctgtctatactgattattgtatatagaggatgttataaatatacatatacatttttgccattatgtaaatcccatgatttcaactgtaaacatctgtccattggtgtagctttacaaaccattcactgattttgtgtaatttaacaatagatatgaaataaagtttaaattac

SEQ ID NO: 242086 - DNA, 3607 bp, Artificial Sequence
  derived and/or modified sequence
ccagcgtcgggaacatggatgagaaatccaacaagctgctgctagctttggtgatgctcttcctatttgccgtgatcgtcctccaatacgtgtgccccggcacagaatgccagctcctccgcctgcaggcgttcagctccccggtgccggacccgtaccgctcggaggatgagagctccgccaggttcgtgccccgctacaatttcacccgcggcgacctcctgcgcaaggtagacttcgacatcaagggcgatgacctgatcgtgttcctgcacatccagaagaccgggggcaccactttcggccgccacttggtgcgtaacatccagctggagcagccgtgcgagtgccgcgtgggtcagaagaaatgcacttgccaccggccgggtaagcgggaaacctggctcttctccaggttctccacgggctggagctgcgggttgcacgccgactggaccgagctcaccagctgtgtgccctccgtggtggacggcaagcgcgacgccaggctgagaccgtccaggaacttccactacatcaccatcctccgagacccagtgtcccggtacttgagtgagtggaggcatgtccagagaggggcaacatggaaagcatccctgcatgtctgcgatggaaggcctccaacctccgaagagctgcccagctgctacactggcgatgactggtctggctgccccctcaaagagtttatggactgtccctacaatctagccaacaaccgccaggtgcgcatgctctccgacctgaccctggtaggctgctacaacctctctgtcatgcctgaaaagcaaagaaacaaggtccttctggaaagtgccaagtcaaatctgaagcacatggcgttcttcggcctcactgagtttcagcggaagacccaatatctgtttgagaaaaccttcaacatgaactttatttcgccatttacccagtataataccactagggcctctagtgtagagatcaatgaggaaattcaaaagcgtattgagggactgaattttctggatatggagttgtacagctatgccaaagacctttttttgcagaggtatcagtttatgaggcagaaagagcatcaggaggccaggcgaaagcgtcaggaacaacgcaaatttctgaagggaaggctccttcagacccatttccagagccagggtcagggccagagccagaatccgaatcagaatcagagtcagaacccaaatccgaatgccaatcagaacctgactcagaatctgatgcagaatctgactcagagtttgagccagaaggagaaccgggaaagcccgaagcagaactcaggcaaggagcagaatgataacaccagcaatggcaccaacgactacataggcagtgtagagaaatggcgttaaatggctcaaaaaggcctgtacatacttctcccaaagcgccactgaaaagatggcatagcttaaaagatgaaagtgtccaaacacatcctgcttccttcattggggaagttttaaaaaaaagtttagatgttgcctttacagttgcctttcaattcagtgttatactgtgtgtaggtaaaacaaatctcaatatggaattaaattgtctttttggggttggactaaatatgaaatccgaaagccaaaccagactcaccagaaattgctgtttagatattttaagaagttcttaaattagttatggagacaaagtgaaaacataaaatgtgaccatttaacttatggctaagaaatggactttaaattattcatgatacactgttaaaacccaatcttggaatcaaatattttttccaggggtgagaataagtataaacataaagcaactaaaatgaaacataaaaccttttattttcttctgattttaacaaggaatctatttaaatagaataacaactgatggtgaatcttaccgagctgtagaaaataaaaaattcctctccaaacatgggtagttttatgtcaaaatattggcttttcaagaacaggactcatatcttgatatttaagagatgtttaaaattttaaactttttctaccttctactgtttaaaggttttacacagggtgtatctcacattaaacaaaacacctttttttcaaaatgaaataccaatgtaaagatctaatttccaggcgctttcagggcactgtaatttcaacaatactggaatcattttggcgctgcttctcattcattttaaggcttctctgaattgtgctcattccaaattaacccatgtatagaatctttcttcatcatctaaatggtgtgttgctgaagttattgtggtatataatcctggattaaagtcaggactttctttctatagaattattttatcaatatttgtgtagtgaggtcctaatcaagaaacttgaacaggataatgtgtctaaaaatattgctgaagttattcttgatcagatagaatttaacctaaaatgtgaactcttacttactttttgtacatctctattgtaatgtttccagttgggccaactatttctagccctttagttctttttcatgttgacagatttgtagacaattacaaaagccaaaaaaggataaaataagcattaggaaggctagccagttattcaatagcaccttgataatgtgggcaaacccttctacaaagtttttgttttgaaaagagcaaaagtaaaaagtgttctgtagtgaggttacatatcaggaacatatgagttgagcagagtaatttggtagtgtaagtcgatgcaaaaatacttctatggtacctattacaagctgaccaagataaaaagaagtatgtaacccactgtgctgtcaagcatcatgattccgggcagttttcattttactgtggattttgctatacttatgcaaggacttacactaacctcctggctgtaaatcaaacaaggtgactgaaagtggcatttatgttttcacaagggacatgcttagaagtgtgaccataaagtcacatcttgtacaatctgctcatgtgtttcatctgtagtaatatagccacaaactggacaagaagctgggtatttgggtttaaaatagattttcttgactctgagcttgtatcagtatttctagcttttgttttgtctgacagtattgcagtcttgaaaatcctgagagctaaaaaactgaaaggaatttttccacaccttgaagtcacagtgttttagagtaaaactattttgtgtacaattgtgtttttaaaatagttagtagatcactatggtatttcaattttctttagttttaattgaaaatgtttgcttttaaaactgataggtattgttggaaagcaggatgaagcctgagccagtggaaaagcttgttacagaaaaaacattttgtgttattgctgtggtgtgcatgatttgcaaagattaagtgcattttctctgtctatactgattattgtatatagaggatgttataaatatacatatacatttttgccattatgtaaatcccatgatttcaactgtaaacatctgtccattggtgtagctttacaaaccattcactgattttgtgtaatttaacaatagatatgaaataaagtttaaattacaggctc

SEQ ID NO: 242087 - DNA, 1818 bp, Artificial Sequence
  derived and/or modified sequence
atggccctgcctgcctgtgctgtgcgggagtttgagcccccccggcagcctgagcggggggcccctgtgaggaccacctgccccaggaggcacagccgggtggaggccgagctggccgccagcaggcctggctctgtggccgcctctgtgcgggccggccccccccggggcgtgagccacggcttccacacccggcccctgctggacaagcccaggaaggccagcagcagcctggccggggccgcctgtgcccccctgtttgccctgctgagccggggcagaagaagaaggatgcacgtgctgcggcggcgctgggacctgggcagcctgtgccgggccctgctgacccggggcctggccgccctgggccacagcctgaagcacgtgctgggcgccatcttcagcaagatcttcggccccatggcctctgtgggcaacatggatgagaagagcaacaagctgctgctggccctggtgatgctgttcctgtttgctgtgattgtgctgcagtatgtgtgccccggcacagagtgccagctgctgcggctgcaggccttcagcagccctgtgcctgacccctacagaagtgaagatgagagcagcgccaggtttgtgccccgctacaacttcaccaggggggacctgctgaggaaggtggactttgacatcaagggagatgacctgattgtgttcctgcacatccagaagacaggaggcaccaccttcggccgccacctggtgaggaacatccagctggagcagccctgtgaatgtcgggtgggccagaagaagtgcacctgccacaggcctgggaagcgggagacctggctgttcagccgcttcagcacaggctggagctgtggcctgcatgctgactggacagagctgaccagctgtgtgcccagcgtggtggatggcaagagagatgcccggctgcggcccagcaggaacttccactacatcaccatcctgcgggaccctgtgagccgctacctgtctgagtggaggcatgtgcagagaggagccacctggaaggccagcctgcacgtgtgtgatggccggccccccaccagcgaggagctgcccagctgctacacaggagatgactggagcggctgccccctgaaggagttcatggactgcccctacaacctggccaacaaccggcaggtgaggatgctgagtgacctgaccctggtgggctgctacaacctgtctgtgatgcctgagaagcagaggaacaaggtgctgctggagagcgccaagagcaacctgaagcacatggccttcttcggcctgacagagttccagaggaagacccagtacctgtttgagaagaccttcaacatgaacttcatcagccccttcacccagtacaacaccacccgggccagctctgtggagatcaatgaggagatccagaagagaattgagggcctgaacttcctggacatggagctgtacagctatgccaaggacctcttcctgcagcgctaccagttcatgaggcagaaggagcaccaggaggcccggaggaagaggcaggagcagaggaagttcctgaagggccgcctgctgcagacccacttccagagccagggccagggccagagccagaaccccaaccagaaccagagccagaaccccaaccccaatgccaaccagaacctgacccagaacctgatgcagaacctgacccagagcctgagccagaaggaaaatcgggagagccccaagcagaacagcggcaaggagcagaatgacaacaccagcaatggcaccaatgactacatcggctctgtggagaagtggaggtag

SEQ ID NO: 242088 - DNA, 1380 bp, Artificial Sequence
  derived and/or modified sequence
atggatgagaagagcaacaagctgctgctggccctggtgatgctgttcctgtttgctgtgattgtgctgcagtatgtgtgccccggcacagagtgccagctgctgcggctgcaggccttcagcagccctgtgcctgacccctacagaagtgaagatgagagcagcgccaggtttgtgccccgctacaacttcaccaggggggacctgctgaggaaggtggactttgacatcaagggagatgacctgattgtgttcctgcacatccagaagacaggaggcaccaccttcggccgccacctggtgaggaacatccagctggagcagccctgtgaatgtcgggtgggccagaagaagtgcacctgccacaggcctgggaagcgggagacctggctgttcagccgcttcagcacaggctggagctgtggcctgcatgctgactggacagagctgaccagctgtgtgcccagcgtggtggatggcaagagagatgcccggctgcggcccagcaggaacttccactacatcaccatcctgcgggaccctgtgagccgctacctgtctgagtggaggcatgtgcagagaggagccacctggaaggccagcctgcacgtgtgtgatggccggccccccaccagcgaggagctgcccagctgctacacaggagatgactggagcggctgccccctgaaggagttcatggactgcccctacaacctggccaacaaccggcaggtgaggatgctgagtgacctgaccctggtgggctgctacaacctgtctgtgatgcctgagaagcagaggaacaaggtgctgctggagagcgccaagagcaacctgaagcacatggccttcttcggcctgacagagttccagaggaagacccagtacctgtttgagaagaccttcaacatgaacttcatcagccccttcacccagtacaacaccacccgggccagctctgtggagatcaatgaggagatccagaagagaattgagggcctgaacttcctggacatggagctgtacagctatgccaaggacctcttcctgcagcgctaccagttcatgaggcagaaggagcaccaggaggcccggaggaagaggcaggagcagaggaagttcctgaagggccgcctgctgcagacccacttccagagccagggccagggccagagccagaaccccaaccagaaccagagccagaaccccaaccccaatgccaaccagaacctgacccagaacctgatgcagaacctgacccagagcctgagccagaaggaaaatcgggagagccccaagcagaacagcggcaaggagcagaatgacaacaccagcaatggcaccaatgactacatcggctctgtggagaagtggaggtag

SEQ ID NO: 242089 - DNA, 1818 bp, Artificial Sequence
  derived and/or modified sequence
atggccctgcccgcctgcgccgtgcgggagttcgagcccccccggcaaccggaaaggggagccccagtccggaccacctgtcctcgacgacacagtagagtggaggccgaactggcggcttcacgccccgggtcggtcgccgcctctgtccgcgccggcccccccagaggggtctctcatgggttccacacaagaccactccttgataaacctaggaaggcgtccagttctctggccggggctgcatgcgctcccctttttgccttactctccagaggacgccgaagaaggatgcatgtgctccggagacggtgggatcttggaagcctgtgcagggcgctgcttacacgagggctggccgcccttggccatagcttgaaacatgtactcggcgccatctttagcaagatcttcggccctatggcaagcgtggggaatatggacgagaaatccaacaagctccttctggcactcgtgatgttgtttctgtttgcggttattgtcctccaatacgtttgtccagggactgagtgtcagcttctccgactacaagccttttcctcccccgtgccagatccctaccgctctgaagatgaatcatctgcccggtttgtgccgcgctacaactttacccgcggagacctgctgaggaaagtcgactttgacatcaaaggcgacgatctgattgtgtttcttcacatccagaagacaggagggaccacattcggtcgacatctggtccggaacattcagctcgaacaaccttgcgaatgccgagtgggccaaaagaagtgtacatgccaccggccagggaagcgggaaacgtggctgttctcaaggtttagtaccggatggagttgcggactgcacgctgactggaccgagcttacaagctgtgtcccttctgtcgtggatggcaagcgagatgcacgcttaagaccctctagaaacttccactatatcacaatcctgcgggacccggtgtctagatatctatctgagtggcgacacgtgcagagaggggctacatggaaggccagcttacacgtgtgtgacggcagacctcctacctcagaggaacttccatcatgttacaccggagacgattggagtggttgcccgctgaaggagtttatggactgcccttacaacctggccaataacaggcaagttaggatgctgagcgatctcactctcgtgggatgttacaatttgtcagtcatgcccgagaagcagcggaacaaagtcctactcgagagcgccaaatccaacttgaaacatatggctttcttcggactgacggaatttcagaggaagacacagtatctcttcgagaaaacctttaatatgaactttataagccccttcacacaatacaataccacccgcgcctcctctgtggagattaacgaagagatccaaaagcgcatagagggtttgaacttcctggatatggagctttactcttatgccaaggacctgttcctccagaggtaccagttcatgagacaaaaggaacaccaggaagctcgcagaaaacgccaggagcagagaaaatttctgaaaggtcgcctacttcagacccattttcagtcacaggggcagggccagagtcagaaccctaaccagaatcaaagccagaatcctaatcccaacgccaatcagaaccttactcagaacctcatgcagaacctgactcagtctttgtctcagaaggaaaatcgcgagtcccctaagcagaacagcggaaaggagcagaacgataatacatccaatggaactaatgattacattggtagcgtggagaagtggcggtag

SEQ ID NO: 242090 - DNA, 1380 bp, Artificial Sequence
  derived and/or modified sequence
atggacgagaagagcaacaagctgctgctggccctggtgatgctgttcctattcgccgtcatcgtgctccagtatgtttgccccgggacagaatgccagctgctcagattgcaagcgttctcgagcccggtgcctgacccttatagatcggaggacgagtccagtgcgcgcttcgttcctaggtacaacttcaccagaggcgatttgctgcggaaggtggactttgacatcaaaggcgacgacctcatcgtcttcctgcacattcagaaaactggcggtacaactttcggtagacatttggtccgcaatattcaactcgaacaaccttgtgagtgcagagtcggccaaaagaagtgcacttgtcatcgtcccggtaagcgagagacatggctcttctctcgttttagcaccggctggtcttgcgggttacatgcagattggacggaacttaccagctgtgtgccatccgttgtggatggcaagagggacgctcgtcttagaccctcgcgaaacttccactacattaccattttgagggaccctgtgagcaggtacctaagtgagtggaggcacgtccagcggggcgcgacatggaaagccagcctccacgtttgtgacggtcgccctccgacctccgaggaacttccttcttgttacaccggcgacgactggagcgggtgccccctgaaggaattcatggactgcccttacaatctcgccaacaaccgtcaggtcagaatgctaagcgatctgactctcgttggctgctacaatttatcagtgatgccagaaaaacagagaaataaagtcctcctcgaaagcgcaaagtccaacctgaagcatatggccttctttggcctgactgaattccaaaggaaaactcagtatctgtttgaaaagacatttaatatgaattttatctcccccttcactcagtacaatacaacgagagcctcttccgtggagatcaatgaggaaattcagaagcgcattgagggacttaacttcttggatatggagctgtattcctacgccaaggacttgtttctgcagcggtatcagtttatgaggcaaaaggaacatcaggaagctcgcagaaagcgacaggagcaacgtaagttcctgaagggtagactgttgcagacccactttcagtctcaaggtcagggccagtcccagaaccccaaccagaatcagagccagaacccgaacccaaacgccaatcagaacctgacgcaaaacctcatgcagaacttaacccagtccctgagccagaaggagaatcgggagtctcctaaacagaatagcggaaaagaacagaacgataacaccagtaacggcaccaacgattatatagggtcagtggagaaatggaggtag

SEQ ID NO: 242091 - DNA, 1818 bp, Artificial Sequence
  derived and/or modified sequence
atggccctgcccgcttgtgctgtcagagaatttgaaccacctagacagccagaaaggggcgctcccgtgagaaccacatgtccccgaaggcattctagagtcgaagctgagttggctgcaagtagaccaggttctgtggccgcatctgtgagggccggtccacccaggggagtgagccacgggtttcacacacgcccactgctggataaacccagaaaggcatcttccagtctggccggagcagcttgcgctccactgtttgccctgctatctaggggcaggcgaagacgaatgcacgtactgcggaggcggtgggatttaggatcactgtgccgagccttgctaactaggggtctggctgctctgggccatagcctcaagcacgtgctgggggctatcttctctaagatcttcgggccaatggcttctgtgggaaatatggacgaaaagagcaataagctcctgctcgccctagtgatgctgttcctgtttgcagtaatcgtccttcaatacgtgtgccctggcaccgaatgtcagctgctgaggctgcaggcattctcctcacccgtgcccgacccttataggtccgaagatgagtctagcgcccgttttgtgccacgctacaactttactaggggcgacctgctgcgcaaggtggactttgacatcaagggcgatgatcttattgtgttcctccacatacagaagacgggtggcacaacctttggtcggcatcttgttaggaatattcagctcgaacagccttgcgagtgtagggtaggacagaagaaatgcacttgccatagacctggaaagagagaaacctggctttttagccgattcagcaccggctggtcttgtggtttacacgctgactggaccgaattgacatcctgcgtcccctccgtggtcgatggcaaacgcgatgctaggcttagaccctccaggaactttcactatatcaccattcttcgagaccccgtctcccgatatttgtcggagtggcgacatgtccagcggggagctacctggaaggcctctcttcacgtttgtgacggacggcctcccacatcagaggagctaccctcttgttatactggcgatgattggagcggctgccccttgaaagagttcatggactgcccctataatctggccaacaatcggcaagtcagaatgttgtccgacttgacattggtaggatgctacaacctgtcagtgatgccagagaagcaaagaaataaagtgctactcgaatctgctaaatcaaacctgaaacacatggctttctttggcctgaccgagttccaaaggaaaacacaatacttgttcgagaagactttcaacatgaactttatctccccttttacccagtacaatactacaagagcctcctccgtggaaataaatgaggagatccaaaaacgcatcgagggactgaattttctagacatggaactgtacagctacgctaaggatctatttctgcaacgttaccagtttatgaggcaaaaagagcatcaagaagctcggaggaagagacaagagcagcgcaaatttttgaagggtcggttgttacaaacccacttccagtcccaagggcagggtcagtcacagaatcctaaccagaatcagtcacaaaaccccaacccgaacgctaatcaaaaccttactcagaacctgatgcagaacctgacccagtctttgagtcagaaggaaaaccgcgaatctccaaaacagaactcagggaaggagcaaaatgataacactagtaatggcacgaatgactacattggcagtgtggagaagtggcgatag

SEQ ID NO: 242092 - DNA, 1380 bp, Artificial Sequence
  derived and/or modified sequence
atggatgaaaaatcaaataaattactgttggccctcgtcatgcttttcttgtttgcggtgatcgtcttgcaatacgtctgccctggtacagagtgccagctgctgcggttgcaggctttctcatctcccgtgcccgacccttatcgctccgaagatgagtcatctgctcgttttgtgcctaggtataatttcacaaggggtgatctactgaggaaggttgatttcgatattaagggcgacgatctcatcgtgtttctccacattcagaagaccggaggtacgacctttggaaggcaccttgtgaggaatatccaactagaacagccctgcgagtgtcgggtgggccaaaaaaaatgtacctgtcatagaccgggaaaaagggaaacatggctcttctcgcgcttttccaccggatggagctgcggactgcatgcagattggaccgagctgaccagttgcgtccctagcgttgttgacggcaagagagatgccagattgcgcccttcacgaaactttcactacatcaccatccttagagaccctgttagccgctacctgtccgaatggcgccatgtgcagaggggggctacctggaaagccagccttcacgtgtgtgatggacgccctcccacttcagaggaacttccttcttgctacactggggacgactggtccggctgtcctctgaaggaattcatggattgtccatacaatctcgccaacaacagacaggtccgaatgctgagcgatcttacactggttggctgctataatctaagtgtcatgcctgagaagcagcgcaacaaagtgcttctggagtccgctaagtccaatctgaaacatatggccttcttcggactgactgaattccagcgtaagacacagtacttgtttgaaaaaaccttcaatatgaattttatttcaccatttacgcaatacaatacaaccagagcgagcagtgttgaaatcaatgaggaaattcagaaacgaattgaagggctcaacttcctcgacatggagttgtacagctatgctaaggacttattcttgcagaggtaccaattcatgcgtcagaaagagcaccaggaagcacgccgaaagcgtcaggagcagaggaagtttctgaaaggtcgtctgcttcaaacccactttcagtcacagggtcagggacagtctcagaaccccaaccagaaccagtcacaaaaccccaaccctaatgcgaaccagaaccttacccagaatctcatgcagaacctgacgcagtccttgtctcagaaggagaatagggagtcccctaagcaaaattcaggcaaggaacagaatgataacaccagcaacggaactaatgactatatcggctctgttgagaagtggcgttag

SEQ ID NO: 242093 - DNA, 1818 bp, Artificial Sequence
  derived and/or modified sequence
atggccctgcccgcctgcgccgtgagagagttcgagccccccagacagcccgagagaggcgcccccgtgagaaccacctgccccagaagacacagcagagtggaggccgagctggccgccagcagacccggcagcgtggccgccagcgtgagagccggcccccccagaggcgtgagccacggcttccacaccagacccctgctggacaagcccagaaaggccagcagcagcctggccggcgccgcctgcgcccccctgttcgccctgctgagcagaggcagaagaagaagaatgcacgtgctgagaagaagatgggacctgggcagcctgtgcagagccctgctgaccagaggcctggccgccctgggccacagcctgaagcacgtgctgggcgccatcttcagcaagatcttcggccccatggccagcgtgggcaacatggacgagaagagcaacaagctgctgctggccctggtgatgctgttcctgttcgccgtgatcgtgctgcagtacgtgtgccccggcaccgagtgccagctgctgagactgcaggccttcagcagccccgtgcccgacccctacagaagcgaggacgagagcagcgccagattcgtgcccagatacaacttcaccagaggcgacctgctgagaaaggtggacttcgacatcaagggcgacgacctgatcgtgttcctgcacatccagaagaccggcggcaccaccttcggcagacacctggtgagaaacatccagctggagcagccctgcgagtgcagagtgggccagaagaagtgcacctgccacagacccggcaagagagagacctggctgttcagcagattcagcaccggctggagctgcggcctgcacgccgactggaccgagctgaccagctgcgtgcccagcgtggtggacggcaagagagacgccagactgagacccagcagaaacttccactacatcaccatcctgagagaccccgtgagcagatacctgagcgagtggagacacgtgcagagaggcgccacctggaaggccagcctgcacgtgtgcgacggcagaccccccaccagcgaggagctgcccagctgctacaccggcgacgactggagcggctgccccctgaaggagttcatggactgcccctacaacctggccaacaacagacaggtgagaatgctgagcgacctgaccctggtgggctgctacaacctgagcgtgatgcccgagaagcagagaaacaaggtgctgctggagagcgccaagagcaacctgaagcacatggccttcttcggcctgaccgagttccagagaaagacccagtacctgttcgagaagaccttcaacatgaacttcatcagccccttcacccagtacaacaccaccagagccagcagcgtggagatcaacgaggagatccagaagagaatcgagggcctgaacttcctggacatggagctgtacagctacgccaaggacctgttcctgcagagataccagttcatgagacagaaggagcaccaggaggccagaagaaagagacaggagcagagaaagttcctgaagggcagactgctgcagacccacttccagagccagggccagggccagagccagaaccccaaccagaaccagagccagaaccccaaccccaacgccaaccagaacctgacccagaacctgatgcagaacctgacccagagcctgagccagaaggagaacagagagagccccaagcagaacagcggcaaggagcagaacgacaacaccagcaacggcaccaacgactacatcggcagcgtggagaagtggagatag

SEQ ID NO: 242094 - DNA, 1380 bp, Artificial Sequence
  derived and/or modified sequence
atggacgagaagagcaacaagctgctgctggccctggtgatgctgttcctgttcgccgtgatcgtgctgcagtacgtgtgccccggcaccgagtgccagctgctgagactgcaggccttcagcagccccgtgcccgacccctacagaagcgaggacgagagcagcgccagattcgtgcccagatacaacttcaccagaggcgacctgctgagaaaggtggacttcgacatcaagggcgacgacctgatcgtgttcctgcacatccagaagaccggcggcaccaccttcggcagacacctggtgagaaacatccagctggagcagccctgcgagtgcagagtgggccagaagaagtgcacctgccacagacccggcaagagagagacctggctgttcagcagattcagcaccggctggagctgcggcctgcacgccgactggaccgagctgaccagctgcgtgcccagcgtggtggacggcaagagagacgccagactgagacccagcagaaacttccactacatcaccatcctgagagaccccgtgagcagatacctgagcgagtggagacacgtgcagagaggcgccacctggaaggccagcctgcacgtgtgcgacggcagaccccccaccagcgaggagctgcccagctgctacaccggcgacgactggagcggctgccccctgaaggagttcatggactgcccctacaacctggccaacaacagacaggtgagaatgctgagcgacctgaccctggtgggctgctacaacctgagcgtgatgcccgagaagcagagaaacaaggtgctgctggagagcgccaagagcaacctgaagcacatggccttcttcggcctgaccgagttccagagaaagacccagtacctgttcgagaagaccttcaacatgaacttcatcagccccttcacccagtacaacaccaccagagccagcagcgtggagatcaacgaggagatccagaagagaatcgagggcctgaacttcctggacatggagctgtacagctacgccaaggacctgttcctgcagagataccagttcatgagacagaaggagcaccaggaggccagaagaaagagacaggagcagagaaagttcctgaagggcagactgctgcagacccacttccagagccagggccagggccagagccagaaccccaaccagaaccagagccagaaccccaaccccaacgccaaccagaacctgacccagaacctgatgcagaacctgacccagagcctgagccagaaggagaacagagagagccccaagcagaacagcggcaaggagcagaacgacaacaccagcaacggcaccaacgactacatcggcagcgtggagaagtggagatag

SEQ ID NO: 242095 - protein, 173 aa, Artificial Sequence
  derived and/or modified sequence
MSTMGNEASYPAEMCSHFDNDEIKRLGRRFKKLDLDKSGSLSVEEFMSLPELRHNPLVRRVIDVFDTDGDGEVDFKEFILGTSQFSVKGDEEQKLRFAFSIYDMDKDGYISNGELFQVLKMMVGNNLTDWQLQQLVDKTIIILDKDGDGKISFEEFSAVVRDLEIHKKLVLIV

SEQ ID NO: 242096 - protein, 139 aa, Artificial Sequence [sequence omitted]

SEQ ID NO: 242097 - DNA, 522 bp, Artificial Sequence
  derived and/or modified sequence
atgagcaccatgggcaacgaggccagctaccccgccgagatgtgcagccacttcgacaacgacgagatcaagagactgggcagaagattcaagaagctggacctggacaagagcggcagcctgagcgtggaggagttcatgagcctgcccgagctgagacacaaccccctggtgagaagagtgatcgacgtgttcgacaccgacggcgacggcgaggtggacttcaaggagttcatcctgggcaccagccagttcagcgtgaagggcgacgaggagcagaagctgagattcgccttcagcatctacgacatggacaaggacggctacatcagcaacggcgagctgttccaggtgctgaagatgatggtgggcaacaacctgaccgactggcagctgcagcagctggtggacaagaccatcatcatcctggacaaggacggcgacggcaagatcagcttcgaggagttcagcgccgtggtgagagacctggagatccacaagaagctggtgctgatcgtgtag

SEQ ID NO: 242098 - DNA, 420 bp, Artificial Sequence
  derived and/or modified sequence
atgagcaccatgggcaacgaggccagctaccccgccgagatgtgcagccacttcgacaacgacgagatcaagagactgggcagaagattcaagaagctggacctggacaagagcggcagcctgagcgtggaggagttcatgagcctgcccgagctgagacacaaccccctggtgagaagagtgatcgacgtgttcgacaccgacggcgacggcgaggtggacttcaaggagttcatcctgggcaccagccagttcagcgtgaagggcgacgaggagcagaagctgagattcgccttcagcatctacgacatggacaaggacggctacatcagcaacggcgagctgttccaggtgctgaagatgatggtgggcaacaacctgaccgactggcagctgcagcagctggtgctgatcgtgtag

SEQ ID NO: 242099 - DNA, 522 bp, Artificial Sequence
  derived and/or modified sequence
atgagtactatgggcaatgaggcgagttaccccgctgaaatgtgtagccactttgataacgacgagataaaacgtcttgggcgccgattcaaaaagcttgacctggacaaaagcggctctctgagcgtcgaggagttcatgtccctgccagaactcagacacaaccctttggtccggcgagtgatcgatgtgttcgatactgacggggatggcgaggttgacttcaaggagttcattttgggcacatctcagttctctgtaaagggagacgaggagcagaagctgagatttgcatttagcatctatgatatggataaggacggttacatcagcaatggagagttattccaggtgttgaagatgatggtaggaaacaacctcactgactggcaattacaacaattggtggacaaaacgatcatcatattggacaaggatggagacggtaaaatctcattcgaagagtttagtgccgtcgtgcgggatcttgaaatccataagaaactggtacttatcgtctag

SEQ ID NO: 242100 - DNA, 420 bp, Artificial Sequence
  derived and/or modified sequence
atgtctactatggggaatgaagccagctatcctgctgagatgtgttcacactttgacaacgatgaaatcaaaaggcttggcagacgatttaaaaaactggacctcgacaagtctggcagtctgagcgttgaggaatttatgtcactgccagagctgcgtcataacccactggtaaggcgagtgattgatgtctttgataccgatggagacggtgaagtcgatttcaaagagttcattctgggtacctcacagttttctgtgaaaggcgatgaggaacagaaattacgatttgccttttctatttacgacatggacaaggatggatacatctcaaacggtgaactgtttcaggtactgaaaatgatggtagggaataacctaaccgactggcagctccagcagctggtgctcatagtgtag

SEQ ID NO: 242101 - DNA, 522 bp, Artificial Sequence
  derived and/or modified sequence
atgagcaccatgggaaatgaggccagctacccagctgagatgtgcagccactttgacaatgatgagatcaagaggctgggccgccgcttcaagaagctggacctggacaagagcggcagcctgtctgtggaggagttcatgagcctgcctgagctgcggcacaaccccctggtgagaagagtgattgatgtgtttgacacagatggagatggagaggtggacttcaaggagttcatcctgggcaccagccagttctctgtgaagggagatgaggagcagaagctgcgctttgccttcagcatctatgacatggacaaggatggctacatcagcaatggagagctgttccaggtgctgaagatgatggtgggcaacaacctgacagactggcagctgcagcagctggtggacaagaccatcatcatcctggacaaggatggagatggcaagatcagctttgaggagttctctgctgtggtgcgggacctggagatccacaagaagctggtgctgattgtgtag

SEQ ID NO: 242102 - DNA, 420 bp, Artificial Sequence
  derived and/or modified sequence
atgagcaccatgggaaatgaggccagctacccagctgagatgtgcagccactttgacaatgatgagatcaagaggctgggccgccgcttcaagaagctggacctggacaagagcggcagcctgtctgtggaggagttcatgagcctgcctgagctgcggcacaaccccctggtgagaagagtgattgatgtgtttgacacagatggagatggagaggtggacttcaaggagttcatcctgggcaccagccagttctctgtgaagggagatgaggagcagaagctgcgctttgccttcagcatctatgacatggacaaggatggctacatcagcaatggagagctgttccaggtgctgaagatgatggtgggcaacaacctgacagactggcagctgcagcagctggtgctgattgtgtag

SEQ ID NO: 242103 - DNA, 522 bp, Artificial Sequence
  derived and/or modified sequence
atgagcaccatgggcaacgaggccagctaccccgccgagatgtgcagccactttgataatgatgagattaaaaggttgggccggcgtttcaaaaagctggatttggacaaaagtggttcgctgagtgtggaggaattcatgagtctgcctgaattaagacacaatcctttggtcaggcgtgtgattgacgtgttcgacactgacggcgatggagaggtcgactttaaagagttcatcttaggaacatctcagttcagcgtgaagggcgatgaagagcaaaaactgaggtttgccttttctatctatgatatggacaaggacggatatatttccaatggtgagctttttcaggtgctgaagatgatggtgggaaacaatctgaccgactggcagttgcaacagctcgtagacaagaccattattattttagacaaagacggagatgggaagatcagctttgaggagttttccgctgtcgtccgggatctggagattcataaaaagctggtgttaatcgtatag

SEQ ID NO: 242104 - DNA, 420 bp, Artificial Sequence
  derived and/or modified sequence
atgagcaccatgggcaacgaggccagctaccccgccgagatgtgctctcattttgataacgacgaaattaagaggctgggccgccggtttaagaagctggacttggataagtccggctctttgagtgtggaggagtttatgtctctgccagagcttagacacaatcctttggtgcgcagagtgatcgatgtgttcgacaccgatggagatggggaagtggatttcaaagaattcattctgggaacttcccagtttagtgtgaaaggcgatgaggaacagaaattgaggttcgcatttagcatatacgatatggataaggacggctacatcagcaacggagagctgttccaggtactgaaaatgatggtgggtaataacttgaccgactggcagcttcagcagctcgtcctcatcgtctag

SEQ ID NO: 242105 - DNA, 522 bp, Artificial Sequence
  derived and/or modified sequence
atgtctacgatgggcaatgaggcttcttaccccgcagagatgtgctctcatttcgataatgatgagattaagcgattgggacggcgttttaaaaaacttgacctggacaagtccgggagcctctcggtggaggaatttatgtcgctaccagaactccggcacaatcctctagtgaggcgtgtcatcgacgtttttgacacggatggtgatggtgaagtggactttaaggaatttattctgggaactagccagttttctgtaaagggagatgaagagcagaaactgcgatttgctttttccatctatgacatggataaggacggttacataagtaacggcgagctctttcaggtgctgaagatgatggtcgggaacaacctaactgactggcagctgcagcagttggtagacaaaacgattataattctcgacaaagatggcgatggcaaaatctcctttgaggaatttagcgcggtggttcgcgacctggaaatccacaaaaaactggtcctgatcgtgtag

SEQ ID NO: 242106 - DNA, 420 bp, Artificial Sequence
  derived and/or modified sequence
atgtcaaccatggggaacgaggccagctatcctgccgagatgtgcagccactttgataatgatgagatcaaacggttgggtaggcgcttcaagaaactggatctggataagagcggatctctgtcagtcgaagagttcatgtctcttcccgagctccgtcacaatcctctggtgaggcgtgtgatcgatgtcttcgatactgacggcgatggggaagtcgactttaaggaattcatccttgggacatctcaattcagcgtcaaaggtgacgaggagcagaagttaagatttgcgttttctatctacgacatggacaaagacggctatatatccaatggggagttgttccaagtcctgaagatgatggtgggaaataatctcaccgattggcagctgcaacagttggtgcttatagtgtag

SEQ ID NO: 242107 - DNA, 3387 bp, Artificial Sequence
  derived and/or modified sequence
gggcacgagccccgcccgagctcaccgcccctgctcccctctccgaccctttgagccgtggccgttgccagatgtccacaatgggaaacgaggccagttacccggcggagatgtgctcccactttgacaatgatgaaattaaaaggctgggcaggaggtttaagaagttggacttggacaaatcagggtctctgagcgtggaggagttcatgtccctgccggagctgcgccacaacccgttggtgcggcgagtgatcgacgtcttcgacaccgacggtgatggagaagtggacttcaaggaattcatcctggggacctcccagttcagcgtcaagggcgacgaggagcagaagttgaggtttgcgttcagcatttacgacatggataaagatggctacatttccaacggggagctcttccaggtgctgaagatgatggtgggcaacaacctgacggactggcagctccagcagctggtcgacaaaaccatcatcatcctggacaaggatggcgatgggaagatatcctttgaggaattcagtgctgtggtcagagacctggagatccacaagaagctggtcctcatcgtatgagcctttttcttacaagcaccacccaacaacttctgctttcttccctatctctttcaagatttgctcaagacgtccaactgtctctctgacttatctggaagtatttctttttgtgaagccatatgtcctaacaggagcttcatcaccaactcagtgctattaattctccttctctgaatgactcagggtaccctatagggggaagagcaagtcaaatgagcatagtggggaaagaaaaggaaatggcttttataaacatcttttactttgttttgattcaaagaccaaactagaactttaaaagttcaaaaataagaaagtatacatttttgctgttatttctcatcattttgtatatgggaggaaatttataatttgcatgggtgttaggtgaactgttttcatttgcttgtgttcagatatcttgccagattgttaacttcctattgtagcaacagggacaaatatatttgtctttgctgggcatctcgtaatcacttttcttaggggacagaatcccatcttttccttcggcagattgcagccccattccccacaatgcatccagaaatcgctgtgcatgtttgaggggtaggagttcatttggcctcctcctgacttgttgctccagctcctgaacagaaactagcttcagggctcttataggaaatgctaagcctggactaagtgcccagctcagccatcatcctcattagcagtgggtttccagggttggcagcccacaccagcattaatttcaatgaaggggacctccagctaaatagggcaagcaaagtgttctcccagaaagtgctctcacctccgacactggtccctacccccaggtggagacaatgagacatttagttagttgtcctacggaggagaggcagtagagtcaggctgcagtggaatctccctaggatgccaaagtggcattatgtctgttgctcacagatgcagagactgacaattgtgtctccacagcagaggtggatgctagctacaccagctatgctgattttgaaaatcagatctgaggcctagaagagaaactgagagctctctcattccaggaagccttttccctagtggaacattcagtgcagaagtcctcacacactaacagatctccaccattgggtgagccggagcctgtggttccaggggagatccagaatgcatgtgtctcttcccacgcatttatgtcatgttggtagctttagatcagccatggtgagaaaagaacaaaagcttttagttgtttttgttttgttttggagaatttgtttaccagtaaatacatcactgcctgtaccccaaatgttaccagctccctgaggtgtcccacatactattgtgagttctcagagcatgaactgtcctcagaagagcagggctaggacttgtcccagcatctgtgcctccataccaatcctctttctcacagagaaccacttcccatataagatgcttaaggctctcaaaacagcagaacaatgaaacatactctccctacacttgcttagccaagagataccactcaggtaacttttttcaggacatggaagatctgtttcaaggagatttactgctattttatttggaagaagctggcaactggtcttgaccaaaatagaaaaaaaaaaaaaaagtccacaaatttaatcacttgtagggaacccatctatcaaggtaccctaccatatacttttgtatttaatagattacttagaaaccacaaaaataggaatccttaccccttcaattcctgttcaaccctaaaaactgtgataaacgctcccaaccctgtggtgatcagggttatgtaatgttcaaagattcagacacacctgggtttggattcagttgcaactgggttgttatcacactcacttctttttagctgtgtgagcatgaataatttacttagcctctctgtgtctttccacctaattaaagaggatccaccccagggttattttgaggattcaaaaaggcatgcaacacacctggagcacaattccactttcattcaactaattcccttcccttcccccttcttccccttctacaagatcaatatgtaaaggagacatgaggcttactggttgcttttgaacacttacttagttcttagctacacccactctaaaattaactggacattagtgtacagcccatgtccaagcccagagagaaaacaatgggaacaatttcaaggtcctcaccactccttcatttgcagaggggacaacagactttctgacctgagaactggagaatttttaaaacaaaatctctcattccagcccaacctatttaactttttgtggaggaattttacatggaggaagtgagcacatgtcatgctagccaagaggacattattgtcattaaagagaggcattatttatacaccctgcaatgtgcacattaaaatatggaaattttaaaattatgaccaagggcttgaaacatattggattacatgctcacatttaacaaagagaggaaatgtgtttcagtttctggagtggctggaatttacaagctaattgttcaataaatctactcaagatagttacctaaggctttgtggcaatgaccttgaactgagagcctgtatctggatttagcacttgaaagatctaactggatatttgggttaaaagaatcacatttattcccaaatcggaatgctttgtttttcctgtcagttaattgccagttgccaacaaatctagttctatacagtttcttgggatgatgataataaacatttattgagcaa

SEQ ID NO: 242108 - DNA, 907 bp, Artificial Sequence
  derived and/or modified sequence
tccgaccctttgagccgtggccgttgccagatgtccacaatgggaaacgaggccagttacccggcggagatgtgctcccactttgacaatgatgaaattaaaaggctgggcaggaggtttaagaagttggacttggacaaatcagggtctctgagcgtggaggagttcatgtccctgccggagctgcgccacaacccgttggtgcggcgagtgatcgacgtcttcgacaccgacggtgatggagaagtggacttcaaggaattcatcctggggacctcccagttcagcgtcaagggcgacgaggagcagaagttgaggtttgcgttcagcatttacgacatggataaagatggctacatttccaacggggagctcttccaggtgctgaagatgatggtgggcaacaacctgacggactggcagctccagcagctggtcctcatcgtatgagcctttttcttacaagcaccacccaacaacttctgctttcttccctatctctttcaagatttgctcaagacgtccaactgtctctctgacttatctggaagtatttctttttgtgaagccatatgtcctaacaggagcttcatcaccaactcagtgctattaattctccttctctgaatgactcagggtaccctatagggggaagagcaagtcaaatgagcatagtggggaaagaaaaggaaatggcttttataaacatcttttactttgttttgattcaaagaccaaactagaactttaaaagttcaaaaataagaaagtatacatttttgctgttatttctcatcattttgtatatgggaggaaatttataatttgcatgggtgttaggtgaactgttttcatttgcttgtgttcagatatcttgccagattgttaacttcctattgtagcaaca

SEQ ID NO: 242109 - protein, 216 aa, Artificial Sequence
  derived and/or modified sequence
MNVRRVESISAQLEEASSTGDSVEDELEMATVRHRPEALELLEAQSKFTKKELQILYRGFKNECPSGVVNEETFKEIYSQFFPQGDSTTYAHFLFNAFDTDHNGAVSFEDFIKGLSILLRGTVQEKLNWAFNLYDINKDGYITKEEMLDIMKAIYDMMGKCTYPVLKEDAPRQHVETFFQKMDKNKDGVVTIDEFIESCQKDENIMRSMQLFENVI

SEQ ID NO: 242110 - DNA, 651 bp, Artificial Sequence
  derived and/or modified sequence
atgaacgtgcgcagggtcgagtcaataagtgcacagttggaagaggctagcagcacgggcgactctgtggaggatgagttggagatggctaccgttcgtcatcgcccggaagccctcgaactactggaagcacagagcaaatttacaaagaaagagctccagatcctctacagaggtttcaagaatgagtgtcctagtggcgtggtgaatgaagaaaccttcaaggaaatatactcacaattttttccacagggtgattccaccacatacgctcatttcttatttaatgcattcgacaccgatcataacggagcagtgagcttcgaagatttcatcaaaggactgtcaattttgctccgcgggacagttcaggagaagttgaattgggcattcaatctctacgacataaataaggatggttacattacaaaagaagaaatgctcgatataatgaaagcaatttatgacatgatgggaaaatgcacttatcctgtgctcaaggaggatgctccgcgtcagcacgtggagactttttttcagaagatggacaaaaataaggacggagttgttaccattgatgaattcatcgagtcttgtcagaaagacgaaaacatcatgcgaagcatgcaattgtttgagaacgtgatttag

SEQ ID NO: 242111 - DNA, 1641 bp, Artificial Sequence
  derived and/or modified sequence
agcgccacggacgcccccgggccgagcggcggtgcgctcccgtgcagacccgtggacagacgcccctggccggtggactctcgagtctcgcttctgcaccctgcgtccctagacatgaatgtgaggagggtggaaagcatttcggctcagctggaggaggccagctctacaggcgacagcgtggaagatgaactggagatggccaccgtcaggcatcggcctgaagcccttgagcttctggaagcccagagcaaatttaccaagaaagagcttcagatcctttacagaggatttaagaatgaatgccccagtggtgttgttaatgaagaaaccttcaaagagatttactcgcagttctttccacagggagactctacaacatatgcacattttctgttcaatgcatttgatacagaccacaatggagctgtgagtttcgaggatttcatcaaaggtctttccattttgctccgggggacagtacaagaaaaactcaattgggcatttaatctgtatgacataaataaagatggctacatcactaaagaggaaatgcttgatataatgaaagcaatatacgatatgatgggtaaatgtacatatcctgtcctcaaagaagatgctcccagacaacacgttgaaacattttttcagaaaatggacaaaaataaagatggggttgttaccatagatgagttcattgaaagctgccaaaaagatgaaaacataatgcgctccatgcagctctttgaaaatgtgatttaacttgtcaaatagatcctgaatccaacagacaaatgtgaactattctaccacccttaaagttggagctaccacttttagcatagattgctcagcttgacactgaagcatattatgcaaacaagctttgttttaatataaagcaatccccaaaagatttgagctttcagttataaatttgcatccttttcataatgccactgagttcaggggatggtctaactcatttcatactctgtgaatattcaaaagtaatagaatctggcatatagttttattggttccttagccatgggattattgaggctttcacatatcagtgattttaaaatatcagtgttttttgctactcatttgtatgtattcagtcctaggattttgaatggttttctaatatagtgacatctgcatttaatttccagaaattaaattaattttcatgtttgaatgctgtaattccatttaaattccatttatatactttaaggaaacaagattacaacaattaaaaaaacacatagttccagtttctatggccttcccaccttctgttagaaattagttttatctggcatttttaaacatttaaaaattattaaacatttaaaaattagtttattatcagatatcagcatatgcctaataaaacttattttaataagcatttaattttccataatatgttacagccaaggcctatataataattttggatttgttcaatctttcttacaggctgttttctattgtatcaatcattagtatcaatcattaagtggaagttgaagaaggcatcaaacaaaacaaggatgtttacagacatatgcaaagggtcaggatatctatcctccagtatatagtaatgcttaataacaagta

SEQ ID NO: 242112 - DNA, 651 bp, Artificial Sequence
  derived and/or modified sequence
atgaatgtgcggcgggtggagagcatcagcgcccagctggaggaggccagcagcactggagacagcgtggaggatgagctggagatggccaccgtgcgccacaggcctgaggccctggagctgctggaggcccagagcaagttcaccaagaaggagctgcagatcctgtaccggggcttcaagaatgaatgtcccagcggcgtggtgaatgaggagaccttcaaggagatctacagccagttcttcccccagggcgacagcaccacctacgcccacttcctgttcaatgcctttgacacagaccacaatggagctgtgtcctttgaggacttcatcaagggcctgagcatcctgctgcggggcaccgtgcaggagaagctgaactgggccttcaacctgtatgacatcaacaaggatggctacatcaccaaggaggagatgctggacatcatgaaggccatctatgacatgatgggcaagtgcacctaccctgtgctgaaggaggatgccccccggcagcacgtggagaccttcttccagaagatggacaagaacaaggatggagtggtgaccattgatgagttcatcgagagctgccagaaggatgagaacatcatgaggtccatgcagctgtttgaaaatgtcatctag

SEQ ID NO: 242113 - DNA, 651 bp, Artificial Sequence
  derived and/or modified sequence
atgaacgtgcggcgggtggagagcatcagcgcccagctggaggaggccagcagcaccggagacagcgtagaagacgaattggaaatggcaaccgttagacataggcccgaagctctcgaactgctggaggcacagtcaaagttcaccaagaaggaacttcagatcttgtacaggggcttcaagaatgagtgcccgtctggcgtggtgaacgaggagacatttaaagagatttatagtcagttttttcctcagggcgactcgactacctatgcgcacttcctgttcaatgcatttgataccgatcacaacggagccgtgtcttttgaagatttcattaagggcctgtcaattctcttgcgtggcactgtgcaggagaagctcaactgggctttcaacctctacgatattaacaaggatggatacataacaaaggaggagatgctcgacattatgaaagccatctatgatatgatgggcaaatgtacatacccagtgcttaaggaggatgcccctcgccaacatgtagagacattttttcagaagatggacaagaacaaggacggagtcgtgaccatcgacgagtttattgaatcatgtcagaaagacgaaaacattatgagatccatgcagttattcgagaacgtgatttag

SEQ ID NO: 242114 - DNA, 651 bp, Artificial Sequence
  derived and/or modified sequence
atgaacgtcaggcgcgtagaaagtatcagcgcccagttagaggaggccagctccacgggggacagcgtcgaggacgagctcgagatggccacagttaggcacaggccagaagccctcgagttactcgaggcacagtccaagtttaccaagaaggaactgcagatcctgtatagaggctttaaaaacgaatgccccagcggggtcgtaaatgaggagacgttcaaggaaatctattctcagtttttcccacagggtgattccaccacttatgcgcactttcttttcaacgcgttcgataccgaccacaatggggctgtctcttttgaggacttcattaagggactgtctatccttctgaggggcactgtccaggaaaagctcaactgggcttttaacctctacgacataaacaaggatggctatattactaaagaggaaatgctagacattatgaaggcgatctacgacatgatgggtaaatgtacctaccccgtgttaaaagaggatgccccacgtcagcatgtggagactttcttccagaagatggacaaaaataaagacggcgtggtgactatagatgagtttatcgagagttgccagaaggatgaaaatattatgaggagcatgcagctgtttgaaaatgtcatttag

SEQ ID NO: 242115 - DNA, 651 bp, Artificial Sequence
  derived and/or modified sequence
atgaacgtgagaagagtggagagcatcagcgcccagctggaggaggccagcagcaccggcgacagcgtggaggacgagctggagatggccaccgtgagacacagacccgaggccctggagctgctggaggcccagagcaagttcaccaagaaggagctgcagatcctgtacagaggcttcaagaacgagtgccccagcggcgtggtgaacgaggagaccttcaaggagatctacagccagttcttcccccagggcgacagcaccacctacgcccacttcctgttcaacgccttcgacaccgaccacaacggcgccgtgagcttcgaggacttcatcaagggcctgagcatcctgctgagaggcaccgtgcaggagaagctgaactgggccttcaacctgtacgacatcaacaaggacggctacatcaccaaggaggagatgctggacatcatgaaggccatctacgacatgatgggcaagtgcacctaccccgtgctgaaggaggacgcccccagacagcacgtggagaccttcttccagaagatggacaagaacaaggacggcgtggtgaccatcgacgagttcatcgagagctgccagaaggacgagaacatcatgagaagcatgcagctgttcgagaacgtgatctag

SEQ ID NO: 242116 - DNA, 567 bp, Artificial Sequence
  derived and/or modified sequence
atggccaccgtgaggcaccgccccgaagccctggagctgttggaggcccagagcaagttcacaaagaaggagctccagatcctgtacaggggatttaaaaatgaatgtccctcgggagtggttaacgaggagacatttaaagagatttattcccaattcttccctcagggagatagcactacctatgcgcactttctgttcaacgcattcgataccgatcacaacggagccgtatcatttgaggatttcatcaagggattgagcatactgttaaggggcactgtgcaggagaagctgaattgggcatttaatctttacgacattaataaggatggatacattacaaaggaagaaatgcttgatatcatgaaggccatttacgacatgatgggcaaatgcacctacccggtgctcaaagaggatgcacctagacagcatgtcgagactttctttcagaaaatggataaaaacaaagacggagttgtaactatcgacgagttcattgagagttgccagaaggacgaaaacattatgagatcaatgcaattgttcgagaatgtaatttag

SEQ ID NO: 242117 - DNA, 567 bp, Artificial Sequence
  derived and/or modified sequence
atggccactgtgaggcatagaccagaggccctggagctgctggaagcacaatcaaaattcacaaagaaggagctacagatcctttacagaggttttaagaatgagtgcccatccggggttgtgaacgaggaaaccttcaaagaaatctactcccagtttttccctcagggagattccactacctacgctcattttctcttcaatgcgttcgataccgaccataacggtgctgtttcatttgaggattttataaaaggactgagcatcctactgcgtggaaccgtacaggagaagctgaattgggcgtttaatctgtatgacattaataaggatggatacatcaccaaggaagagatgctcgacatcatgaaggctatctacgacatgatgggtaagtgtacctatccggtgctgaaagaggacgccccaaggcagcacgttgaaacatttttccagaaaatggacaaaaataaagatggcgttgtgacaattgatgagttcattgagagctgccagaaagacgaaaacataatgcgatcaatgcagctgttcgagaatgtgatctag

SEQ ID NO: 242118 - DNA, 567 bp, Artificial Sequence
  derived and/or modified sequence
atggccactgtgaggcaccgccctgaggccttagagttactggaagcccagtccaagtttactaaaaaggagctgcaaatcctgtacaggggattcaagaatgagtgtccgtctggggtggtaaatgaggagactttcaaggaaatctacagccagtttttcccacagggagattctaccacatacgctcatttcttgtttaacgcattcgacacggatcacaatggagccgtatccttcgaggatttcattaaagggctctcaatactcctgagaggaacggtgcaagagaagctgaactgggccttcaatttgtacgatattaacaaggatggctacattactaaagaggaaatgttagacattatgaaagcgatctatgatatgatgggcaagtgtacttaccccgtgctgaaagaggatgccccgcgtcagcatgtggaaactttctttcagaaaatggacaagaataaagacggcgtggtgaccatagatgagtttattgagtcctgccagaaggacgagaatatcatgcgctcaatgcaattattcgaaaacgtcatatag

SEQ ID NO: 242119 - DNA, 567 bp, Artificial Sequence
  derived and/or modified sequence
atggccaccgtgcgccacaggcctgaggccctggagctgctggaggcccagagcaagttcaccaagaaggagctgcagatcctgtaccggggcttcaagaatgaatgtcccagcggcgtggtgaatgaggagaccttcaaggagatctacagccagttcttcccccagggcgacagcaccacctacgcccacttcctgttcaatgcctttgacacagaccacaatggagctgtgtcctttgaggacttcatcaagggcctgagcatcctgctgcggggcaccgtgcaggagaagctgaactgggccttcaacctgtatgacatcaacaaggatggctacatcaccaaggaggagatgctggacatcatgaaggccatctatgacatgatgggcaagtgcacctaccctgtgctgaaggaggatgccccccggcagcacgtggagaccttcttccagaagatggacaagaacaaggatggagtggtgaccattgatgagttcatcgagagctgccagaaggatgagaacatcatgaggtccatgcagctgtttgaaaatgtcatctag

SEQ ID NO: 242120 - DNA, 567 bp, Artificial Sequence
  derived and/or modified sequence
atggccaccgtgcggcaccggcccgaggccctggagctgctggaggctcaaagtaagtttactaagaaggagctgcaaattttgtacagaggcttcaagaatgagtgcccatcgggagtcgtaaatgaagaaacgttcaaggagatttattcccagtttttccctcagggggattctacaacctatgcccattttttgttcaatgctttcgacacagatcacaacggtgccgtttcttttgaagatttcatcaagggtctcagtatccttctgcgggggacggtccaagaaaagctgaattgggctttcaacctgtacgacatcaataaggatgggtacatcacaaaagaggaaatgctagatattatgaaggcaatctacgatatgatgggaaaatgcacgtacccagttttaaaggaagatgcccccagacagcatgtcgagactttcttccagaaaatggataagaataaggacggtgtcgtcactatcgacgagtttatcgagtcctgccagaaagatgagaatataatgcgttctatgcagctgttcgaaaatgtgatatag

SEQ ID NO: 242121 - DNA, 567 bp, Artificial Sequence
  derived and/or modified sequence
atggccaccgtgcggcaccggcccgaggccctggagctgctggaggcccagtctaaattcacgaaaaaggagcttcagattctgtacaggggatttaagaacgaatgcccaagtggcgtcgttaacgaggaaaccttcaaggaaatctactctcagtttttccctcagggggattccactacatacgctcacttcctcttcaatgcctttgacacggatcacaacggtgcagttagctttgaggactttattaagggcctatctatcctgttgcgcggtaccgttcaggaaaaattgaattgggcattcaacctctatgacatcaataaggacggttatatcaccaaggaggaaatgttagacattatgaaggctatctacgacatgatgggaaagtgtacatacccagtgctaaaggaggacgcccctcgccagcatgtagagaccttctttcagaagatggataagaataaagacggggtggtgacaatagacgaatttatcgagagttgccaaaaggatgagaacatcatgcggagcatgcaacttttcgaaaatgtaatctag

SEQ ID NO: 242122 - DNA, 567 bp, Artificial Sequence
  derived and/or modified sequence
atggccaccgtgcggcaccggcccgaggccctggagctgctggaggcccagagtaaattcactaaaaaagaactgcagattctctatagagggttcaagaacgagtgcccctccggggtcgtgaatgaggagacctttaaagaaatttattctcagtttttccctcagggggattcgacaacctatgcccacttccttttcaatgccttcgatacagaccataatggagccgtgagctttgaggatttcatcaagggcctttctattctcctgaggggcaccgtgcaagagaaactcaattgggcctttaacctgtacgatataaataaagatgggtatatcactaaggaagagatgctagacataatgaaggccatttatgatatgatggggaagtgcacctacccggtgttaaaagaggacgcgccccggcaacatgtagagactttttttcagaaaatggacaagaataaggatggtgtagtgaccatcgacgaattcatcgaaagttgtcaaaaagatgagaatattatgcgttccatgcagttgttcgagaacgttatctag

SEQ ID NO: 242123 - DNA, 567 bp, Artificial Sequence
  derived and/or modified sequence
atggccacagttcgacacaggcccgaggctctggaactcctcgaagcgcaatctaagttcactaagaaagagctacaaattctgtaccgagggttcaaaaacgagtgcccttcaggcgtggttaacgaggagacatttaaggagatttactcccaattttttccgcagggcgatagcaccacgtatgcacacttcttattcaatgcattcgacacagaccacaatggggctgtgtctttcgaggactttattaaggggctaagcattctgctgcgaggaacggttcaggagaaactcaattgggcttttaacttatatgacattaataaagacggatacatcaccaaggaggaaatgctggacattatgaaagccatttacgatatgatgggcaagtgcacgtatccggttctgaaggaggatgctcctaggcagcatgtcgaaactttcttccagaagatggacaagaacaaagatggagtggtgacgatcgatgaattcatcgaatcttgccagaaggatgagaacataatgagatctatgcagctgtttgaaaatgtgatctag

SEQ ID NO: 242124 - DNA, 567 bp, Artificial Sequence
  derived and/or modified sequence
atggccaccgtgcggcaccggcctgaagctttagaactgctggaggcacagtcgaagttcaccaaaaaggaacttcaaattctgtaccgcggtttcaagaacgagtgtcccagcggagtggtgaacgaagagaccttcaaggagatttactctcagttctttcctcagggagactccacaacttacgcacatttcctcttcaatgcctttgacactgaccataatggcgctgtttcctttgaggatttcattaagggcctgtcaattcttctgcgaggcacagttcaggagaagctgaactgggcctttaatctctacgacatcaacaaggacggctatattacaaaggaagagatgttagacataatgaaggccatttacgatatgatgggaaagtgtacttaccccgttcttaaagaggatgcacccaggcaacatgtggagacgtttttccagaaaatggacaagaacaaggacggtgtggtgacaattgatgagtttattgaatcttgccagaaggacgaaaatataatgcggtccatgcagctgtttgagaatgtgatctag

SEQ ID NO: 242125 - DNA, 567 bp, Artificial Sequence
  derived and/or modified sequence
atggcgacggtgcggcacaggccagaagccctggagttgcttgaagcacagtcgaagtttactaagaaagagctgcagattttataccgcggatttaaaaacgaatgcccgagcggtgtggttaacgaggagacctttaaggagatatactctcaattctttccccagggggattccacaacctatgctcacttcctctttaacgctttcgataccgaccacaacggcgctgtttctttcgaagatttcattaagggactgagcatcctgctccgtggcacggtgcaggagaagttaaattgggcgttcaacctatacgatataaacaaggatgggtatatcaccaaagaggagatgctcgatattatgaaggccatctatgatatgatggggaagtgtacataccccgtcctcaaggaggacgctccaaggcaacatgtagaaacctttttccagaagatggacaaaaataaggacggcgtggtgacaatcgatgagttcattgaaagttgtcaaaaggatgaaaacatcatgcgaagcatgcagctgttcgaaaatgttatctag

SEQ ID NO: 242126 - DNA, 567 bp, Artificial Sequence
  derived and/or modified sequence
atggccaccgtgagacacagacccgaggccctggagctgctggaggcccagagcaagttcaccaagaaggagctgcagatcctgtacagaggcttcaagaacgagtgccccagcggcgtggtgaacgaggagaccttcaaggagatctacagccagttcttcccccagggcgacagcaccacctacgcccacttcctgttcaacgccttcgacaccgaccacaacggcgccgtgagcttcgaggacttcatcaagggcctgagcatcctgctgagaggcaccgtgcaggagaagctgaactgggccttcaacctgtacgacatcaacaaggacggctacatcaccaaggaggagatgctggacatcatgaaggccatctacgacatgatgggcaagtgcacctaccccgtgctgaaggaggacgcccccagacagcacgtggagaccttcttccagaagatggacaagaacaaggacggcgtggtgaccatcgacgagttcatcgagagctgccagaaggacgagaacatcatgagaagcatgcagctgttcgagaacgtgatctag

SEQ ID NO: 242127 - protein, 229 aa, Artificial Sequence
  derived and/or modified sequence
MNLEGLEMIAVLIVIVLFVKLLEQFGLIEAGLEDSVEDELEMATVRHRPEALELLEAQSKFTKKELQILYRGFKNECPSGVVNEETFKEIYSQFFPQGDSTTYAHFLFNAFDTDHNGAVSFEDFIKGLSILLRGTVQEKLNWAFNLYDINKDGYITKEEMLDIMKAIYDMMGKCTYPVLKEDAPRQHVETFFQKMDKNKDGVVTIDEFIESCQKDENIMRSMQLFENVI

SEQ ID NO: 242128 - DNA, 690 bp, Artificial Sequence
  derived and/or modified sequence
atgaatttagaggggttagaaatgatcgctgtgctcatcgtaatcgtattgtttgtcaaactcctggaacaatttggcctgattgaggcaggcttggaggattctgtggaggacgaactggaaatggctacggtcaggcatagacctgaagctctggaacttctggaagcacagtctaaattcaccaaaaaggagctccagattttgtaccgcgggtttaaaaatgagtgcccatctggggtggtgaacgaggaaacattcaaagagatctacagccagtttttccctcagggtgatagcaccacgtacgcacatttcctgttcaatgcctttgacaccgatcacaatggcgctgtgagctttgaggatttcataaaggggttaagtatccttctgcggggcaccgtacaggagaagttgaactgggcctttaacctctacgatattaacaaagacggttacatcacgaaagaagagatgcttgacattatgaaggcaatttacgacatgatgggaaagtgcacatatcctgtcctgaaggaggacgcaccccgccagcacgtagagaccttttttcaaaaaatggataaaaataaagacggcgtagtcaccatcgacgagttcatcgaaagttgccagaaggatgaaaacataatgagaagcatgcagctgtttgagaacgtgatttag

SEQ ID NO: 242129 - DNA, 1645 bp, Artificial Sequence
  derived and/or modified sequence
aatgtagtttaatggctttacaaagaaagccaggcagaggagcacttctcagtggctgtggtcggaccatgacctagctgaccatgaacttggaagggcttgaaatgatagcagttctgatcgtcattgtgctttttgttaaattattggaacagtttgggctgattgaagcaggtttagaagacagcgtggaagatgaactggagatggccaccgtcaggcatcggcctgaagcccttgagcttctggaagcccagagcaaatttaccaagaaagagcttcagatcctttacagaggatttaagaatgaatgccccagtggtgttgttaatgaagaaaccttcaaagagatttactcgcagttctttccacagggagactctacaacatatgcacattttctgttcaatgcatttgatacagaccacaatggagctgtgagtttcgaggatttcatcaaaggtctttccattttgctccgggggacagtacaagaaaaactcaattgggcatttaatctgtatgacataaataaagatggctacatcactaaagaggaaatgcttgatataatgaaagcaatatacgatatgatgggtaaatgtacatatcctgtcctcaaagaagatgctcccagacaacacgttgaaacattttttcagaaaatggacaaaaataaagatggggttgttaccatagatgagttcattgaaagctgccaaaaagatgaaaacataatgcgctccatgcagctctttgaaaatgtgatttaacttgtcaaatagatcctgaatccaacagacaaatgtgaactattctaccacccttaaagttggagctaccacttttagcatagattgctcagcttgacactgaagcatattatgcaaacaagctttgttttaatataaagcaatccccaaaagatttgagctttcagttataaatttgcatccttttcataatgccactgagttcaggggatggtctaactcatttcatactctgtgaatattcaaaagtaatagaatctggcatatagttttattggttccttagccatgggattattgaggctttcacatatcagtgattttaaaatatcagtgttttttgctactcatttgtatgtattcagtcctaggattttgaatggttttctaatatagtgacatctgcatttaatttccagaaattaaattaattttcatgtttgaatgctgtaattccatttaaattccatttatatactttaaggaaacaagattacaacaattaaaaaaacacatagttccagtttctatggccttcccaccttctgttagaaattagttttatctggcatttttaaacatttaaaaattattaaacatttaaaaattagtttattatcagatatcagcatatgcctaataaaacttattttaataagcatttaattttccataatatgttacagccaaggcctatataataattttggatttgttcaatctttcttacaggctgttttctattgtatcaatcattagtatcaatcattaagtggaagttgaagaaggcatcaaacaaaacaaggatgtttacagacatatgcaaagggtcaggatatctatcctccagtatatagtaatgcttaataaca

SEQ ID NO: 242130 - DNA, 690 bp, Artificial Sequence
  derived and/or modified sequence
atgaacctggagggcctggagatgattgctgtgctgattgtgattgtgctgtttgtgaagctgctggagcagtttggcctcatcgaggccggcctggaggacagcgtggaggatgagctggagatggccaccgtgcgccacaggcctgaggccctggagctgctggaggcccagagcaagttcaccaagaaggagctgcagatcctgtaccggggcttcaagaatgaatgtccttctggagtggtgaatgaggagaccttcaaggagatctacagccagttcttcccccagggcgacagcaccacctacgcccacttcctgttcaatgcctttgacacagaccacaacggggctgtgtcctttgaggacttcatcaagggcctgagcatcctgctgcggggcaccgtgcaggagaagctgaactgggccttcaacctgtatgacatcaacaaggatggctacatcaccaaggaggagatgctggacatcatgaaggccatctatgacatgatgggcaagtgcacctaccctgtgctgaaggaggatgccccccggcagcacgtggagaccttcttccagaagatggacaagaacaaggatggagtggtgaccattgatgagttcatcgagagctgccagaaggatgagaacatcatgaggtccatgcagctgtttgaaaatgtcatctag

SEQ ID NO: 242131 - DNA, 690 bp, Artificial Sequence
  derived and/or modified sequence
atgaacctggagggcctggagatgatcgccgtgctgatcgtgatcgtgctgttcgttaagcttctggagcaatttggactgatcgaagccgggctggaagatagcgtggaggacgaactggaaatggccactgtcagacatcgccccgaagctcttgagctcttagaagcacagtctaaatttaccaagaaggagctccagattctctacagagggttcaaaaacgaatgccccagtggggtggtgaacgaagaaacgtttaaagagatctatagccagttttttccacaaggggactccacgacctacgcccactttctgttcaatgcctttgataccgaccataacggggcagtttcattcgaagatttcataaagggcctcagtatcttacttagaggtacggtccaggagaagttgaactgggcctttaacctgtatgacattaacaaggatggatacatcaccaaagaggaaatgctggatattatgaaggccatctacgatatgatggggaagtgcacctatcccgtgctgaaagaagatgcacctcgccagcatgtggagacattcttccagaagatggacaagaataaggacggcgtggtcactatcgacgagtttattgagagctgtcagaaggatgaaaacataatgcgaagtatgcagttgttcgagaatgttatatag

SEQ ID NO: 242132 - DNA, 690 bp, Artificial Sequence
  derived and/or modified sequence
atgaatctagagggtttggaaatgatagccgtcctcatagttatcgtcctgttcgtgaagctgctggagcaatttggactgatcgaggctgggttagaagattccgtggaggacgagctggagatggctacggtgcggcatcgtccggaggctcttgagctgcttgaagcgcaaagcaagttcaccaaaaaggagctgcagattctgtaccggggtttcaagaacgagtgtcctagtggcgtggtcaacgaggaaacattcaaagagatttactcccagttcttcccccagggggatagtaccacgtacgcccattttctgttcaatgcttttgatactgatcataacggagccgtcagcttcgaagatttcatcaagggattatcaattttactaagggggacagttcaggagaagctgaactgggcctttaacttatatgacatcaacaaggacgggtacattaccaaggaagaaatgctggacatcatgaaagccatctatgatatgatgggtaagtgtacataccccgtactgaaggaggacgctccccgtcagcacgtcgagacgtttttccagaaaatggataaaaataaagatggcgttgtgactattgacgagttcatcgaatcttgtcagaaggacgagaatatcatgcgaagtatgcagctgttcgagaacgtgatatag

SEQ ID NO: 242133 - DNA, 690 bp, Artificial Sequence
  derived and/or modified sequence
atgaacctggagggcctggagatgatcgccgtgctgatcgtgatcgtgctgttcgtgaagctgctggagcagttcggcctgatcgaggccggcctggaggacagcgtggaggacgagctggagatggccaccgtgagacacagacccgaggccctggagctgctggaggcccagagcaagttcaccaagaaggagctgcagatcctgtacagaggcttcaagaacgagtgccccagcggcgtggtgaacgaggagaccttcaaggagatctacagccagttcttcccccagggcgacagcaccacctacgcccacttcctgttcaacgccttcgacaccgaccacaacggcgccgtgagcttcgaggacttcatcaagggcctgagcatcctgctgagaggcaccgtgcaggagaagctgaactgggccttcaacctgtacgacatcaacaaggacggctacatcaccaaggaggagatgctggacatcatgaaggccatctacgacatgatgggcaagtgcacctaccccgtgctgaaggaggacgcccccagacagcacgtggagaccttcttccagaagatggacaagaacaaggacggcgtggtgaccatcgacgagttcatcgagagctgccagaaggacgagaacatcatgagaagcatgcagctgttcgagaacgtgatctag

SEQ ID NO: 242134 - protein, 332 aa, Artificial Sequence
  derived and/or modified sequence
MLAVHFDKPGGPENLYVKEVAKPSPGEGEVLLKVAASALNRADLMQRQGQYDPPPGASNILGLEASGHVAELGPGCQGHWKIGDTAMALLPGGGQAQYVTVPEGLLMPIPEGLTLTQAAAIPEAWLTAFQLLHLVGNVQAGDYVLIHAGLSGVGTAAIQLTRMAGAIPLVTAGSQKKLQMAEKLGAAAGFNYKKEDFSEATLKFTKGAGVNLILDCIGGSYWEKNVNCLALDGRWVLYGLMGGGDINGPLFSKLLFKRGSLITSLLRSRDNKYKQMLVNAFTEQILPHFSTEGPQRLLPVLDRIYPVTEIQEAHKYMEANKNIGKIVLELPQ

SEQ ID NO: 242135 - protein, 216 aa, Artificial Sequence
  derived and/or modified sequence
FDKPGGPENLYVKEVAKPSPGEGEVLLKVAASALNRADLMQRQGQYDPPPGASNILGLEASGHVAELGPGCQGHWKIGDTAMALLPGGGQAQYVTVPEGLLMPIPEGLTLTQAAAIPEAWLTAFQLLHLVGNVQAGDYVLIHAGLSGVGTAAIQLTRMAGAIPLVTAGSQKKLQMAEKLGAAAGFNYKKEDFSEATLKFTKGKQLLLQFSRNLRDD

SEQ ID NO: 242136 - DNA, 999 bp, Artificial Sequence
  derived and/or modified sequence
atgctggccgtgcacttcgacaagcccggcggccccgagaacctgtacgtgaaggaggtggccaagcccagccccggcgagggcgaggtgctgctgaaggtggccgccagcgccctgaacagagccgacctgatgcagagacagggccagtacgaccccccccccggcgccagcaacatcctgggcctggaggccagcggccacgtggccgagctgggccccggctgccagggccactggaagatcggcgacaccgccatggccctgctgcccggcggcggccaggcccagtacgtgaccgtgcccgagggcctgctgatgcccatccccgagggcctgaccctgacccaggccgccgccatccccgaggcctggctgaccgccttccagctgctgcacctggtgggcaacgtgcaggccggcgactacgtgctgatccacgccggcctgagcggcgtgggcaccgccgccatccagctgaccagaatggccggcgccatccccctggtgaccgccggcagccagaagaagctgcagatggccgagaagctgggcgccgccgccggcttcaactacaagaaggaggacttcagcgaggccaccctgaagttcaccaagggcgccggcgtgaacctgatcctggactgcatcggcggcagctactgggagaagaacgtgaactgcctggccctggacggcagatgggtgctgtacggcctgatgggcggcggcgacatcaacggccccctgttcagcaagctgctgttcaagagaggcagcctgatcaccagcctgctgagaagcagagacaacaagtacaagcagatgctggtgaacgccttcaccgagcagatcctgccccacttcagcaccgagggcccccagagactgctgcccgtgctggacagaatctaccccgtgaccgagatccaggaggcccacaagtacatggaggccaacaagaacatcggcaagatcgtgctggagctgccccagtag

SEQ ID NO: 242137 - DNA, 999 bp, Artificial Sequence
  derived and/or modified sequence
atgctggctgtgcattttgataaacctgggggacctgaaaatctctacgtgaaggaggttgctaaaccgtcgcctggagagggcgaagtgctcttgaaggttgcagcgtcggctctcaatcgggccgatctgatgcagcggcagggccagtatgaccccccacccggagcgtcaaacatcttgggactggaggcctcagggcacgtcgctgagctgggtccaggctgccaaggacattggaagatcggcgacacagcaatggccctgttgccaggggggggtcaggctcagtacgtaactgttcccgaaggtttgctcatgcccatacctgaaggattgactctgactcaggccgcagctattcccgaagcttggctcacagccttccagttgttgcatttggtcggaaatgtccaggccggggattacgtgctaatccacgcaggactgagcggtgtcggtacggctgccatccagctgactcggatggccggggccatccctctcgtcaccgctggctcgcagaaaaaattgcagatggccgagaagctgggggccgcggccgggtttaattataagaaggaggactttagcgaggccactctaaagtttaccaagggcgcgggcgtcaacttaatcttggattgcatcggcggctcctactgggagaaaaacgtgaactgcctggcccttgatggcagatgggtgctatacggtctgatgggagggggggacatcaatgggcctctgttttccaagctgctgttcaaaaggggctccctgattacgtccctacttagaagtcgagataataagtacaagcagatgctggtgaacgcttttactgagcaaatcttgccccattttagcacggagggtccccaaagactattaccagtcctcgacaggatctatccagtgaccgaaattcaggaggcacacaaatacatggaggccaataaaaatatcggcaagatcgtactggaactgccccagtag

SEQ ID NO: 242138 - DNA, 999 bp, Artificial Sequence
  derived and/or modified sequence
atgcttgccgtccactttgacaagccaggtggccccgaaaacctctatgtcaaggaagtggctaagcccagtccaggagaaggggaggtgcttctgaaagtggccgccagcgctttgaatcgagctgatttgatgcagagacagggtcagtatgaccctcctccgggggcttcgaacattctgggcctggaggcctccggccacgtggcagagttggggccgggctgccagggccattggaaaattggcgacactgccatggccctcttgcctggaggagggcaggcgcagtacgttacagttcccgaggggctgctgatgccaatcccagagggactgacactcactcaggcagctgccatcccggaagcttggctcacggcattccagctgttgcacctcgtgggaaacgttcaggcaggggactacgtgttaatacatgcgggcttgtctggtgtggggacagccgccattcagctcacacggatggctggagccattcctcttgtaactgctggatctcagaagaagttgcagatggccgagaaactgggagccgccgccggcttcaattataaaaaggaggacttcagcgaggcaactctgaagttcaccaagggggcgggagtgaatctcattctcgattgtattgggggcagttattgggagaagaacgttaactgtctagccctggatggtaggtgggtgctgtacgggctgatgggtggcggagatattaacgggcccctgttcagcaaactcttatttaagcggggctctttaattacttccctgctgagatctcgcgataataagtataagcagatgctggttaacgcctttaccgagcaaatcctcccacatttttcgaccgaaggaccacagcgcctgctgcccgtactcgatcggatctatcctgtgactgaaattcaggaggcacataagtacatggaggcgaataagaatatagggaaaatcgttctggagcttccccaatag

SEQ ID NO: 242139 - DNA, 999 bp, Artificial Sequence
  derived and/or modified sequence
atgctggccgtgcactttgacaagccaggcggccctgagaacctgtatgtgaaggaggtggccaagcccagccctggagagggggaggtgctgctgaaggtggccgccagcgccctgaacagagctgacctgatgcagaggcagggccagtatgaccccccacctggggccagcaacatcctgggcctggaggccagcggccacgtggccgagctgggccctggctgccagggccactggaagatcggggacacagccatggccctgctgcccggcggcggccaggcccagtatgtgacagtgcctgagggcctgctgatgcccatccctgagggcctgaccctgacccaggccgccgccatccctgaggcctggctgacagccttccagctgctgcacctggtgggcaatgtgcaggccggggactatgtgctgattcatgctggcctgtctggagtgggcacagctgccatccagctgaccaggatggccggggccatccccctggtgacagctggcagccagaagaagctgcagatggccgagaagctgggcgctgctgctggcttcaactacaagaaggaggacttcagcgaggccaccctgaagttcaccaagggggccggcgtgaacctgatcctggactgcattggaggcagctactgggagaagaatgtgaactgcctggccctggatggccgctgggtgctgtatggcctgatgggcggcggggacatcaatggccccctcttcagcaagctgctcttcaagaggggcagcctcatcaccagcctgctgcggagccgggacaacaagtacaagcagatgctggtgaatgccttcacagagcagatcctgccccacttcagcacagagggcccccagaggctgctgcctgtgctggaccgcatctaccctgtgacagagatccaggaggcccacaagtacatggaggccaacaagaacatcggcaagatcgtgctggagctgccccagtag

SEQ ID NO: 242140 - DNA, 999 bp, Artificial Sequence
  derived and/or modified sequence
atgctggccgtgcacttcgacaagcccggcggccccgagaacctgtacgtgaaggaagttgccaagccttcgcccggtgagggagaagtgctgcttaaagtagccgcctcagcactgaaccgcgcggatctgatgcaaagacaggggcagtacgaccccccccccggtgctagcaacattctgggcctggaagcttctggccacgtcgcagagctggggcctggctgtcagggccactggaagatcggtgacacagctatggctttgctccctggtggcggccaggcgcagtatgtgaccgtgcccgaggggctacttatgcctatacctgagggcttaacccttacacaggctgcagccattcctgaggcgtggcttaccgctttccagctactccatttggttggaaacgtccaagccggagactacgtgctgatacacgccggcctgtctggtgtaggcactgccgcgatccagttgacccgcatggctggtgccatacctctggtgacagcaggttctcagaaaaagctgcagatggcagaaaagctcggagccgcagctggattcaactacaagaaagaggacttctccgaggctaccctgaagttcactaaaggagcaggggtgaatctgatactcgactgtatcggcggaagttactgggagaagaatgtgaactgtcttgcactcgatggcaggtgggtgctgtatgggctgatgggtgggggagacattaacgggcctttgttcagcaaactgctgttcaagcgagggagtctgatcactagcttgttgcggagtagggataacaagtacaaacagatgctcgtgaacgcatttaccgaacaaatccttccacacttttctacggagggaccacagcggttgctgcctgtgctggatagaatctatcccgtgacggaaatacaagaggcccataaatacatggaagccaacaagaacattggaaaaattgtgttggaactcccacagtag

SEQ ID NO: 242141 - DNA, 999 bp, Artificial Sequence
  derived and/or modified sequence
atgctggccgtgcacttcgacaagcccggcggccccgagaacctgtatgtgaaagaagtcgctaaaccctcccccggggagggagaggtgctgctgaaggtggccgcatcagctctgaacagggcggacttgatgcagcgccaggggcagtatgatcccccaccaggggcctccaacatccttggccttgaggcaagtggccacgtcgccgagctggggcccgggtgtcagggccactggaagatcggggacactgctatggctctgctgcccggtggcggccaggcccaatacgtgacagttcccgagggcctgctcatgccgatccccgaaggtttgacgctgacgcaggcggccgccatccccgaggcttggctcacagcttttcagcttttgcacttggtcggaaacgtgcaagctggtgactacgttttgatccatgccggccttagtggcgtggggaccgctgcaatacagctaactagaatggccggcgccattcccctagtgactgccggtagccagaagaagctgcaaatggcagaaaaactcggcgccgcagccggcttcaattacaagaaagaggatttctcggaagcaactctaaagtttacgaagggtgccggggtgaaccttatccttgattgtatcggtggcagttattgggagaagaatgtgaactgcctggccctcgacggacggtgggttctgtatggtttgatgggggggggagatattaatggaccactgttttccaagctcctgttcaaacgaggcagcctcatcaccagcctcctgagatcccgggacaacaagtataagcagatgctcgtgaacgccttcacagaacagatcctgcctcacttctccacagaaggcccacaaagactgctgccagtgctggacaggatttatcctgtgacagagatacaagaagcccacaaatacatggaggcgaataagaacatcggcaagatcgtgctggaattaccccagtag

SEQ ID NO: 242142 - DNA, 999 bp, Artificial Sequence
  derived and/or modified sequence
atgttagcagtgcacttcgataagcctggcggtccagagaatctatatgtgaaggaagtggccaagccctctccaggggaaggtgaagttctgctcaaagtcgctgcaagtgccctgaatcgggctgacctgatgcagaggcagggacagtacgacccccctcctggggcttcgaacattctagggctcgaagcctcaggacatgtggccgaactgggtccaggatgccagggtcactggaagattggggacacagccatggccctcctccccggaggcggtcaggcacagtacgtgacggttcctgaaggcctcttgatgccaatccccgagggactaaccctgactcaggccgctgccatcccagaggcctggctcacagcctttcagctcctgcacttagtgggcaacgtgcaggccggtgattacgtattgatccatgcgggtctctccggtgtaggaacagcagctatacagttaacacgcatggcaggggcaatcccactcgttacagccggatctcagaagaagctgcagatggccgaaaagttgggggctgccgctggctttaattataagaaagaggattttagcgaggcaactttgaagttcaccaaaggtgctggcgtgaacctgatcctggactgtatcggagggagttactgggagaagaacgtgaactgtctggcattagacggacgctgggtgctctacgggcttatgggcggtggggatatcaacgggccattgttcagtaagcttctgtttaagaggggcagtctgataacgagcctcttgaggtcacgtgacaataaatacaagcagatgcttgtcaatgcttttactgagcaaattctgccacacttcagtaccgaaggcccacaacgtctcctcccagtgctcgaccggatctaccccgttaccgaaattcaggaggcacataagtatatggaggctaacaaaaacattggcaagatagtactggaacttccccaatag

SEQ ID NO: 242143 - DNA, 999 bp, Artificial Sequence
  derived and/or modified sequence
atgttagccgtccactttgataagcctggcggtcccgaaaatctgtacgttaaagaagtggccaagcccagcccaggtgaaggtgaggttcttctgaaagtggctgccagtgcccttaaccgcgcagatctgatgcagcgccagggccagtacgatccacctccaggggctagcaatattttggggctcgaggccagcggccacgttgctgagctgggtccgggttgccagggtcactggaagattggcgacactgccatggcattactgcctggtggaggccaagctcagtatgtaacggttccggaaggattgctaatgcccattcctgagggtctgacactgacacaagccgctgctatcccagaagcatggctgacggcttttcagttactgcatcttgtcggcaatgtgcaggctggggactatgttcttatccacgccggtttgagcggtgttggcaccgcagctatccagcttacccgaatggcaggtgcgatccccctggttaccgcaggttctcagaagaagttacagatggccgagaagctcggggctgctgccggattcaattacaagaaagaggacttcagcgaagcgaccttaaagttcactaaaggagcgggtgtgaatttgatcctggactgcattggcggatcctactgggagaaaaacgtgaactgtctggctctggacggccgttgggtgctatatgggctcatgggaggcggagatattaatggccctttattctcaaagctcctattcaagcgcggaagtctgattaccagtctgctgcgaagccgggacaacaaatataagcagatgcttgtcaatgcctttactgaacagatcctgccccatttcagcaccgaaggccctcagaggctgctaccggtgctggacaggatatacccagtgactgagatacaggaagcccacaaatacatggaggctaacaagaatattggtaaaatagttcttgagctaccccaatag

SEQ ID NO: 242144 - DNA, 1998 bp, Artificial Sequence
  derived and/or modified sequence
cttgcccacccatgctcaagatgggcgggatgccagcctgttacataaatgtgccaaaagcctggccatgcctggaaaatggaccaatccgcccgccaagaggttgggtctcgttccctagagagaaggaagtttcctctccttgaagtgagagctagaatcgcactttctgtcaagctgagagaaagactcttttccagaggctaaaaggacaagaaaatctgatttgcttgcttctaactttgcgttttaaagggggaaggaggaaaggaaagagggggagggtggttctgcttagccccacccctccggctaccccaggtccagccgtccattccggtggaggcagaggcagtcctggggctctggggctcgggctttgtcaccgggacccgcaggagccagaaccactcggcgccgcctggtgcatgggaggggagccgggccaggagtaagtaactcatacgggcgccggggacccgggtcgggctgggggcttccaactcagagggagtgtgatttgcctgatcctcttcggcgttgtcctgctctgccgcatccagccctgtaccgccatcccacttcccgccgttcccatctgtgttccgggtgggatcggtctggaggcggccgaggacttcccaggcaggagctcggggcggaggccgggtccgcggcagaccagggcagcgaggcgctggccggcagggggcgctgcggtgccagcctgaggctgggctgctccgcgaggatacagcggcccctgccctgtcctgtcctgccctgccctgtcctgtcctgccctgccctgccctgtcctgtcctgccctgccctgccctgtgtcctcagacaatatgttagccgtgcactttgacaagccgggaggaccggaaaacctctacgtgaaggaggtggccaagccgagcccgggggagggtgaagtcctcctgaaggtggcggccagcgccctgaaccgggcggacttaatgcagagacaaggccagtatgacccacctccaggagccagcaacattttgggacttgaggcatctggacatgtggcagagctggggcctggctgccagggacactggaagatcggggacacagccatggctctgctccccggtgggggccaggctcagtacgtcactgtccccgaagggctcctcatgcctatcccagagggattgaccctgacccaggctgcagccatcccagaggcctggctcaccgccttccagctgttacatcttgtgggaaatgttcaggctggagactatgtgctaatccatgcaggactgagtggtgtgggcacagctgctatccaactcacccggatggctggagctattcctctggtcacagctggctcccagaagaagcttcaaatggcagaaaagcttggagcagctgctggattcaattacaaaaaagaggatttctctgaagcaacgctgaaattcaccaaaggtgctggagttaatcttattctagactgcataggcggatcctactgggagaagaacgtcaactgcctggctcttgatggtcgatgggttctctatggtctgatgggaggaggtgacatcaatgggcccctgttttcaaagctactttttaagcgaggaagtctgatcaccagtttgctgaggtctagggacaataagtacaagcaaatgctggtgaatgctttcacggagcaaattctgcctcacttctccacggagggcccccaacgtctgctgccggttctggacagaatctacccagtgaccgaaatccaggaggcccataagtacatggaggccaacaagaacataggcaagatcgtcctggaactgccccagtgaaggaggatggggcaggacaggacgcggccaccccaggcctttccagagcaaacctggagaagattcacaatagacaggccaagaaacccggtgcttcctccagagccgtttaaagctgatatgaggaaataaagagtgaactgg

SEQ ID NO: 242145 - DNA, 1635 bp, Artificial Sequence
  derived and/or modified sequence
aacggctcctttctcttctcttagcagcacccagcttgcccacccatgctcaagatgggcgggatgccagcctgttacataaatgtgccaaaagcctggccatgcctggaaaatggaccaatccgcccgccaagaggttgggtctcgttccctagagagaaggaagtttcctctccttgaagtgagagctagaatcgcactttctgtcaagctgagagaaagactcttttccagaggctaaaaggacaagaaaatctgatttgcttgcttctaactttgcgttttaaagggggaaggaggaaaggaaagagggggagggtggttctgcttagccccacccctccggctaccccaggtccagccgtccattccggtggaggcagaggcagtcctggggctctggggctcgggctttgtcaccgggacccgcaggagccagaaccactcggcgccgcctggtgcatgggaggggagccgggccaggaacaatatgttagccgtgcactttgacaagccgggaggaccggaaaacctctacgtgaaggaggtggccaagccgagcccgggggagggtgaagtcctcctgaaggtggcggccagcgccctgaaccgggcggacttaatgcagagacaaggccagtatgacccacctccaggagccagcaacattttgggacttgaggcatctggacatgtggcagagctggggcctggctgccagggacactggaagatcggggacacagccatggctctgctccccggtgggggccaggctcagtacgtcactgtccccgaagggctcctcatgcctatcccagagggattgaccctgacccaggctgcagccatcccagaggcctggctcaccgccttccagctgttacatcttgtgggaaatgttcaggctggagactatgtgctaatccatgcaggactgagtggtgtgggcacagctgctatccaactcacccggatggctggagctattcctctggtcacagctggctcccagaagaagcttcaaatggcagaaaagcttggagcagctgctggattcaattacaaaaaagaggatttctctgaagcaacgctgaaattcaccaaaggtgctggagttaatcttattctagactgcataggcggatcctactgggagaagaacgtcaactgcctggctcttgatggtcgatgggttctctatggtctgatgggaggaggtgacatcaatgggcccctgttttcaaagctactttttaagcgaggaagtctgatcaccagtttgctgaggtctagggacaataagtacaagcaaatgctggtgaatgctttcacggagcaaattctgcctcacttctccacggagggcccccaacgtctgctgccggttctggacagaatctacccagtgaccgaaatccaggaggcccataagtacatggaggccaacaagaacataggcaagatcgtcctggaactgccccagtgaaggaggatggggcaggacaggacgcggccaccccaggcctttccagagcaaacctggagaagattcacaatagacaggccaagaaacccggtgcttcctccagagccgtttaaagctgatatgaggaaataaagagtgaactggaa

SEQ ID NO: 242146 - protein, 411 aa, Artificial Sequence
  derived and/or modified sequence
MEQRGQNAPAASGARKRHGPGPREARGARPGPRVPKTLVLVVAAVLLLVSAESALITQQDLAPQQRAAPQQKRSSPSEGLCPPGHHISEDGRDCISCKYGQDYSTHWNDLLFCLRCTRCDSGEVELSPCTTTRNTVCQCEEGTFREEDSPEMCRKCRTGCPRGMVKVGDCTPWSDIECVHKESGIIIGVTVAAVVLIVAVFVCKSLLWKKVLPYLKGICSGGGGDPERVDRSSQRPGAEDNVLNEIVSILQPTQVPEQEMEVQEPAEPTGVNMLSPGESEHLLEPAEAERSQRRRLLVPANEGDPTETLRQCFDDFADLVPFDSWEPLMRKLGLMDNEIKVAKAEAAGHRDTLYTMLIKWVNKTGRDASVHTLLDALETLGERLAKQKIEDHLLSSGKFMYLEGNADSAMS

SEQ ID NO: 242147 - protein, 260 aa, Artificial Sequence
  derived and/or modified sequence
MCRKCRTGCPRGMVKVGDCTPWSDIECVHKESGIIIGVTVAAVVLIVAVFVCKSLLWKKVLPYLKGICSGGGGDPERVDRSSQRPGAEDNVLNEIVSILQPTQVPEQEMEVQEPAEPTGVNMLSPGESEHLLEPAEAERSQRRRLLVPANEGDPTETLRQCFDDFADLVPFDSWEPLMRKLGLMDNEIKVAKAEAAGHRDTLYTMLIKWVNKTGRDASVHTLLDALETLGERLAKQKIEDHLLSSGKFMYLEGNADSAMS

SEQ ID NO: 242148 - DNA, 1236 bp, Artificial Sequence
  derived and/or modified sequence
atggagcagagaggccagaacgcccccgccgccagcggcgccagaaagagacacggccccggccccagagaggccagaggcgccagacccggccccagagtgcccaagaccctggtgctggtggtggccgccgtgctgctgctggtgagcgccgagagcgccctgatcacccagcaggacctggccccccagcagagagccgccccccagcagaagagaagcagccccagcgagggcctgtgcccccccggccaccacatcagcgaggacggcagagactgcatcagctgcaagtacggccaggactacagcacccactggaacgacctgctgttctgcctgagatgcaccagatgcgacagcggcgaggtggagctgagcccctgcaccaccaccagaaacaccgtgtgccagtgcgaggagggcaccttcagagaggaggacagccccgagatgtgcagaaagtgcagaaccggctgccccagaggcatggtgaaggtgggcgactgcaccccctggagcgacatcgagtgcgtgcacaaggagagcggcatcatcatcggcgtgaccgtggccgccgtggtgctgatcgtggccgtgttcgtgtgcaagagcctgctgtggaagaaggtgctgccctacctgaagggcatctgcagcggcggcggcggcgaccccgagagagtggacagaagcagccagagacccggcgccgaggacaacgtgctgaacgagatcgtgagcatcctgcagcccacccaggtgcccgagcaggagatggaggtgcaggagcccgccgagcccaccggcgtgaacatgctgagccccggcgagagcgagcacctgctggagcccgccgaggccgagagaagccagagaagaagactgctggtgcccgccaacgagggcgaccccaccgagaccctgagacagtgcttcgacgacttcgccgacctggtgcccttcgacagctgggagcccctgatgagaaagctgggcctgatggacaacgagatcaaggtggccaaggccgaggccgccggccacagagacaccctgtacaccatgctgatcaagtgggtgaacaagaccggcagagacgccagcgtgcacaccctgctggacgccctggagaccctgggcgagagactggccaagcagaagatcgaggaccacctgctgagcagcggcaagttcatgtacctggagggcaacgccgacagcgccatgagctag

SEQ ID NO: 242149 - DNA, 783 bp, Artificial Sequence
  derived and/or modified sequence
atgtgcagaaagtgcagaaccggctgccccagaggcatggtgaaggtgggcgactgcaccccctggagcgacatcgagtgcgtgcacaaggagagcggcatcatcatcggcgtgaccgtggccgccgtggtgctgatcgtggccgtgttcgtgtgcaagagcctgctgtggaagaaggtgctgccctacctgaagggcatctgcagcggcggcggcggcgaccccgagagagtggacagaagcagccagagacccggcgccgaggacaacgtgctgaacgagatcgtgagcatcctgcagcccacccaggtgcccgagcaggagatggaggtgcaggagcccgccgagcccaccggcgtgaacatgctgagccccggcgagagcgagcacctgctggagcccgccgaggccgagagaagccagagaagaagactgctggtgcccgccaacgagggcgaccccaccgagaccctgagacagtgcttcgacgacttcgccgacctggtgcccttcgacagctgggagcccctgatgagaaagctgggcctgatggacaacgagatcaaggtggccaaggccgaggccgccggccacagagacaccctgtacaccatgctgatcaagtgggtgaacaagaccggcagagacgccagcgtgcacaccctgctggacgccctggagaccctgggcgagagactggccaagcagaagatcgaggaccacctgctgagcagcggcaagttcatgtacctggagggcaacgccgacagcgccatgagctag

SEQ ID NO: 242150 - DNA, 1236 bp, Artificial Sequence
  derived and/or modified sequence
atggagcagcgaggccagaacgccccagccgcaagcggtgctaggaaacgacatggtccgggtccgcgggaggctcgtggcgcaaggccgggcccccgagtgcccaagacactcgtactagtcgttgccgcagtgctgctgctggtgtccgccgaatcagcattgataacacagcaggatctggcccctcaacagcgcgctgctccacaacagaagcgcagttctccttctgaggggctgtgccctccaggccaccacatctctgaggatgggagggattgcatttcctgtaaatatggtcaggattattccactcattggaacgacctgctgttctgcctgcgctgcacgcgttgcgattctggcgaggtggaactgtctccctgcacaacaacacggaataccgtgtgtcagtgtgaagaagggacgtttagagaggaagactcccccgaaatgtgtaggaagtgcagaactggctgtccccgcggaatggttaaagttggggattgcactccctggagcgatattgagtgtgtacataaagagagtggtatcatcattggagtgacagttgcggccgtggtcctcattgtggctgtatttgtgtgcaaatcactgctttggaaaaaggtgctgccatacctgaagggaatctgcagtggaggaggcggagatcctgagcgggtcgaccggtcgtctcaacgtccaggcgccgaggataacgtgctgaacgagatcgtgtcaattcttcagcccactcaggtcccagaacaagaaatggaggtgcaggagcccgccgagcccaccggagtcaacatgctgtcccctggggagtctgagcatctgttggaacccgctgaagctgagcgctcacagagacgtagactgttggtgccagctaacgagggcgacccaaccgagacactgcgtcagtgtttcgacgatttcgctgaccttgtcccttttgactcgtgggagccgctgatgagaaaactgggacttatggacaacgaaatcaaagtcgcgaaggccgaggctgccggtcatcgcgatacactgtacactatgctgatcaagtgggtgaacaaaactggcagggatgcctctgtccacacactgctggacgctcttgagacactcggcgagcggctggccaagcagaagatagaggatcacctcttgtctagcggaaagttcatgtacttggaggggaatgctgacagcgccatgtcttag

SEQ ID NO: 242151 - DNA, 783 bp, Artificial Sequence
  derived and/or modified sequence
atgtgtcgcaagtgtcgcaccggctgccccagggggatggtgaaagtaggcgactgcacaccctggtccgacattgaatgcgtccacaaggagagcggtattataattggggttacagtcgccgccgtcgtgctcatagtggcagtgttcgtgtgtaaatcccttttatggaaaaaggtcctgccttacctgaaaggcatctgctccggaggaggtggggacccggagagggtggatcgctcaagccagcggccaggagccgaggacaatgtcctgaacgagatcgtttccattctgcagcccactcaggtcccagagcaggaaatggaggtgcaggaaccagcagaacccaccggagtcaacatgctttccccgggcgaatccgagcacctgctagagcctgctgaagccgaaagaagtcagagacggcggctcttggtacccgctaacgagggggatccaaccgagacacttcgacaatgctttgatgacttcgcggatcttgtgccatttgactcttgggagccattaatgcgcaaactgggactgatggataatgagattaaagtcgcaaaagccgaagccgccggacaccgcgacactctgtacactatgttaattaagtgggtgaataagaccggtagggacgcgtcagtacatactctcttggatgccttagaaactctgggagagcgattagctaaacaaaaaattgaggatcacctattgtcatctggcaagttcatgtacctggaaggcaacgctgactctgctatgagctag

SEQ ID NO: 242152 - DNA, 1236 bp, Artificial Sequence
  derived and/or modified sequence
atggagcagaggggccagaatgccccagctgccagcggggccaggaagagacatggccctggcccccgggaggcccggggggcccggcccggcccccgggtgcccaagaccctggtgctggtggtggccgctgtgctgctgctggtgtctgctgagagcgccctgatcacccagcaggacctggccccccagcagagagctgccccccagcagaagaggagcagccccagcgagggcctgtgccccccaggccaccacatcagtgaagatggccgggactgcatcagctgcaagtatggccaggactacagcacccactggaatgacctgctcttctgcctgcgctgcacccgctgtgacagcggggaggtggagctgagcccctgcaccaccaccaggaacacagtgtgccagtgtgaggagggcaccttccgggaggaggacagccctgagatgtgcaggaaatgtagaacaggctgcccccggggcatggtgaaggtgggggactgcaccccctggagcgacattgaatgtgtgcacaaggagagcggcatcatcattggagtgacagtggccgctgtggtgctgattgtggccgtgtttgtgtgcaagagcctgctgtggaagaaggtgctgccctacctgaagggcatctgcagcggcggcggcggggaccctgagcgggtggacaggagcagccagaggcctggagcagaagataatgtgctgaatgagatcgtgtccatcctgcagcccacccaggtgcctgagcaggagatggaggtgcaggagcctgctgagcccactggagtgaacatgctgagccctggagagagcgagcacctgctggagcctgctgaggccgagaggagccagaggcggcggctgctggtgcctgccaatgaaggagaccccacagagaccctgcggcagtgctttgatgactttgctgacctggtgccctttgacagctgggagcccctgatgaggaagctgggcctgatggacaatgagatcaaggtggccaaggccgaggccgccggccaccgggacaccctgtacaccatgctgatcaagtgggtgaacaagacaggaagagatgcctctgtgcacaccctgctggatgccctggagaccctgggggagcggctggccaagcagaagattgaggaccacctgctgagcagcggcaagttcatgtacctggagggcaatgctgacagcgccatgtcctag

SEQ ID NO: 242153 - DNA, 783 bp, Artificial Sequence
  derived and/or modified sequence
atgtgcaggaagtgcaggacaggctgcccccggggcatggtgaaggtgggggactgcaccccctggagcgacattgaatgtgtgcacaaggagagcggcatcatcatcggcgtgacagtggccgctgtggtgctgattgtggccgtgtttgtgtgcaagagcctgctgtggaagaaggtgctgccctacctgaagggcatctgcagcggcggcggcggggaccctgagcgggtggacaggagcagccagaggcctggagctgaggacaacgtgctgaatgaaattgtgtccatcctgcagcccacccaggtgcctgagcaggagatggaggtgcaggagcctgctgagcccaccggggtgaacatgctgagccctggagagagcgagcacctgctggagcctgctgaggccgagaggagccagaggcggcggctgctggtgcctgccaatgaaggagaccccacagagaccctgcggcagtgctttgatgactttgctgacctggtgccctttgacagctgggagcccctgatgaggaagctgggcctgatggacaatgagatcaaggtggccaaggccgaggccgccggccaccgggacaccctgtacaccatgctgatcaagtgggtgaacaagacaggaagagatgcctctgtgcacaccctgctggatgccctggagaccctgggggagcggctggccaagcagaagattgaggaccacctgctgagcagcggcaagttcatgtacctggagggcaatgctgacagcgccatgtcctag

SEQ ID NO: 242154 - DNA, 1236 bp, Artificial Sequence
  derived and/or modified sequence
atggagcagcggggccagaacgcccccgccgccagcggcgcccggaagaggcacggaccagggccgagggaagcaagaggagcgaggcccgggccacgtgtgccgaagaccctggttctggtggtggcagcggtgctcctgcttgtatccgctgaatccgcactgatcactcagcaggacctcgcacctcagcagcgcgcagcaccccaacagaagcggagttcacctagcgagggtctttgcccccctgggcaccacatcagcgaggacggccgtgactgcatcagctgtaaatatggtcaggactattcgacccattggaacgatctgctgttctgcttgaggtgtacccggtgtgatagcggggaggtggagttatccccctgcacaactaccaggaacaccgtatgccagtgcgaggaagggaccttccgcgaagaagactcgcccgagatgtgtcggaagtgtcgcacaggatgcccccgcggcatggtcaaggtgggcgactgtactccgtggtctgatatcgaatgtgttcacaaagagtccgggataattattggcgtgacagtggccgcagttgtcctcatcgtagccgtttttgtttgtaagagtttactgtggaagaaggtactgccttatttgaagggaatctgtagtggcggagggggcgacccagagagagtggatagaagttcccagagaccaggggcagaagataatgtgttaaacgagattgtaagcattctgcagcccacacaggtacctgagcaggagatggaggttcaggaacctgccgaaccaaccggtgtgaatatgctgtcgcccggagagtcagagcacctattggagcctgcagaagctgaacgcagtcagcgacgaaggttactggttcccgctaatgagggggatcccactgagacccttaggcagtgcttcgatgattttgctgacctggtgccattcgattcatgggaacccctgatgcggaagctgggactgatggataacgagattaaggtcgctaaggccgaggccgcggggcatcgtgacaccctctatacaatgctgatcaaatgggtgaacaaaacaggtagggatgcttccgtacacacgctcttggacgccctggagaccctcggggaacggctggcaaagcagaaaattgaggatcatctgctatcctctggtaaatttatgtacttagagggcaacgctgactccgcaatgtcttag

SEQ ID NO: 242155 - DNA, 783 bp, Artificial Sequence
  derived and/or modified sequence
atgtgccggaagtgccggaccggctgcccccggggcatggtgaaggtcggagactgcactccttggtccgatattgagtgtgtccacaaagagtcaggtattattattggcgtcaccgtagcggccgttgtccttatcgtggccgtgtttgtctgcaagagtttactgtggaagaaagtgcttccctatcttaaaggcatctgctcaggggggggaggtgatccggagcgagtcgaccggtcaagccaacgacccggtgccgaggacaacgttttaaatgaaattgtcagtattctccagcccacgcaggtccctgagcaggagatggaggtgcaggaacctgctgagccaaccggcgtcaacatgctgtcgcctggcgaatcggagcatcttctggagcccgcagaggcggagagaagccagaggaggcgactgctggtgccagcaaacgagggtgatccgactgagacgctcaggcagtgttttgacgatttcgcagatctggttccttttgactcctgggagccgctcatgagaaaactaggcctaatggacaacgagattaaagtcgcgaaggctgaagccgctggccaccgggacactctctacactatgctcatcaagtgggtcaataaaacggggcgagatgctagtgttcacactctgctggacgcgcttgagacactgggagaaagactggccaaacagaagatcgaagatcatctcctgtctagtgggaaattcatgtacctggaaggcaatgccgattctgctatgtcatag

SEQ ID NO: 242156 - DNA, 1236 bp, Artificial Sequence
  derived and/or modified sequence
atggagcagagggggcagaatgcccctgcggcttcaggcgcacgcaagagacacggcccaggcccacgagaagccagaggggcacgccctggccctcgggtgcccaagacactagtgctagtcgtcgccgctgtactgctgttggtgtcagcggagagtgcactcattactcaacaagatctggcacctcagcagagggcagcccctcagcagaagaggtcatcaccaagcgagggactctgcccacccggacaccacatttccgaagacggtcgcgattgtataagctgtaagtacggccaggattattctactcattggaacgatctgttgttctgtctccgatgtacaagatgtgactccggcgaggtcgaactgtcgccttgtaccaccaccagaaacactgtatgtcagtgcgaggagggcactttcagggaagaagactcccctgaaatgtgtcggaagtgtagaaccggatgccctcggggaatggtgaaggtgggggactgcacgccatggtcagacatcgagtgtgtgcataaggagagcggaatcatcatcggagtgacagtcgcagccgttgtgctgatcgtcgcggtcttcgtctgcaaaagcctgttatggaaaaaggtattaccctatctaaaaggcatttgctccggagggggaggcgatccagaaagggtcgaccgaagcagccagcgcccaggcgctgaggacaatgtcttgaacgaaatcgtatcgatactccaacctacacaggtgcccgagcaagagatggaggtacaggaacccgcagaacctacaggggtgaatatgctttcccctggcgaaagcgaacatcttctggaaccggctgaagctgagcgtagccagcgacggcgacttctggtgcccgctaacgagggagatcccacagaaactctccgacagtgttttgacgatttcgctgatctggtgccgtttgatagctgggagcccctgatgcggaaactcgggctgatggataatgaaataaaggtggccaaggctgaggccgcaggacatagggatacgctatataccatgcttatcaagtgggtcaataaaacagggcgtgacgccagtgttcacacactcctggacgcactggagactttgggcgagcgcctggccaagcagaagatagaggatcacctcctctcatcagggaaatttatgtaccttgaaggtaatgccgatagcgctatgagttag

SEQ ID NO: 242157 - DNA, 783 bp, Artificial Sequence
  derived and/or modified sequence
atgtgcaggaaatgcagaactggatgccctagggggatggttaaggtgggcgactgcacgccatggagcgacattgaatgcgtgcacaaggaaagcggcatcattatcggtgtgaccgttgcagccgtggtgctcatcgtggccgttttcgtgtgtaaatctctgctttggaaaaaggtcctgccttatctgaagggaatttgcagcggcggtggcggagatccggagcgagttgatcggtcatcccagcgccctggcgctgaggacaacgtgttaaatgaaattgtctccatcctgcaaccgactcaggtgcccgaacaggagatggaggtccaggaacccgcagagcctaccggggtaaacatgctcagtcctggagaaagtgaacacttgttggagcctgccgaagccgaacgctcccagagaagacgcctattggtgccggcaaatgaaggcgaccccaccgagaccctccggcagtgctttgacgacttcgctgacctggtgccctttgactcatgggaaccactaatgaggaagttgggcctgatggataacgaaattaaggttgcaaaagccgaagcagctggtcacagggatacgttgtacaccatgctcataaagtgggtgaataaaaccggaagagacgcgtccgtccacacactcctggacgcgctggagaccctcggtgagagactggccaaacaaaagatcgaggaccatctgctatcaagcgggaaattcatgtatctggaaggcaatgcagatagtgctatgagctag

SEQ ID NO: 242158 - DNA, 1723 bp, Artificial Sequence
  derived and/or modified sequence
cataaatcagcacgcggccggagaaccccgcaatctctgcgcccacaaaatacaccgacgatgcccgatctactttaagggctgaaacccacgggcctgagagactataagagcgttccctaccgccatggaacaacggggacagaacgccccggccgcttcgggggcccggaaaaggcacggcccaggacccagggaggcgcggggagccaggcctgggccccgggtccccaagacccttgtgctcgttgtcgccgcggtcctgctgttggtctcagctgagtctgctctgatcacccaacaagacctagctccccagcagagagcggccccacaacaaaagaggtccagcccctcagagggattgtgtccacctggacaccatatctcagaagacggtagagattgcatctcctgcaaatatggacaggactatagcactcactggaatgacctccttttctgcttgcgctgcaccaggtgtgattcaggtgaagtggagctaagtccctgcaccacgaccagaaacacagtgtgtcagtgcgaagaaggcaccttccgggaagaagattctcctgagatgtgccggaagtgccgcacagggtgtcccagagggatggtcaaggtcggtgattgtacaccctggagtgacatcgaatgtgtccacaaagaatcaggcatcatcataggagtcacagttgcagccgtagtcttgattgtggctgtgtttgtttgcaagtctttactgtggaagaaagtccttccttacctgaaaggcatctgctcaggtggtggtggggaccctgagcgtgtggacagaagctcacaacgacctggggctgaggacaatgtcctcaatgagatcgtgagtatcttgcagcccacccaggtccctgagcaggaaatggaagtccaggagccagcagagccaacaggtgtcaacatgttgtcccccggggagtcagagcatctgctggaaccggcagaagctgaaaggtctcagaggaggaggctgctggttccagcaaatgaaggtgatcccactgagactctgagacagtgcttcgatgactttgcagacttggtgccctttgactcctgggagccgctcatgaggaagttgggcctcatggacaatgagataaaggtggctaaagctgaggcagcgggccacagggacaccttgtacacgatgctgataaagtgggtcaacaaaaccgggcgagatgcctctgtccacaccctgctggatgccttggagacgctgggagagagacttgccaagcagaagattgaggaccacttgttgagctctggaaagttcatgtatctagaaggtaatgcagactctgccatgtcctaagtgtgattctcttcaggaagtcagaccttccctggtttaccttttttctggaaaaagcccaactggactccagtcagtaggaaagtgccacaattgtcacatgaccggtactggaagaaactctcccatccaacatcacccagtggatggaacatcctgtaacttttcactgcacttggcattatttttataagctgaatgtgataataaggacactatggaaatgtctggatcattccgtttgtgcgtactttgagatttggtttgggatgtcattgttttcacagcacttttttatcctaatgtaaatgctttatttatttatttgggctacattgtaagatccatctacacagtcgt

SEQ ID NO: 242159 - DNA, 1464 bp, Artificial Sequence
  derived and/or modified sequence
agcctggacacataaatcagcacgcggccggagaaccccgcaatctctgcgcccacaaaatacaccgacgatgcccgatctactttaagggctgaaacccacgggcctgagagactataagagcgttccctaccgccatggaacaacggggacagaacgccccggccgcttcgggggcccggaaaaggcacggcccaggacccagggaggcgcggggagccaggcctgggccccgggtccccaagacccttgtgctcgttgtcgccgcggtcctgctgttggacaccatatctcagaagacggtagagattgcatctcctgcaaatatggacaggactatagcactcactggaatgacctccttttctgcttgcgctgcaccaggtgtgattcaggtgaagtggagctaagtccctgcaccacgaccagaaacacagtgtgtcagtgcgaagaaggcaccttccgggaagaagattctcctgagatgtgccggaagtgccgcacagggtgtcccagagggatggtcaaggtcggtgattgtacaccctggagtgacatcgaatgtgtccacaaagaatcaggcatcatcataggagtcacagttgcagccgtagtcttgattgtggctgtgtttgtttgcaagtctttactgtggaagaaagtccttccttacctgaaaggcatctgctcaggtggtggtggggaccctgagcgtgtggacagaagctcacaacgacctggggctgaggacaatgtcctcaatgagatcgtgagtatcttgcagcccacccaggtccctgagcaggaaatggaagtccaggagccagcagagccaacaggtgtcaacatgttgtcccccggggagtcagagcatctgctggaaccggcagaagctgaaaggtctcagaggaggaggctgctggttccagcaaatgaaggtgatcccactgagactctgagacagtgcttcgatgactttgcagacttggtgccctttgactcctgggagccgctcatgaggaagttgggcctcatggacaatgagataaaggtggctaaagctgaggcagcgggccacagggacaccttgtacacgatgctgataaagtgggtcaacaaaaccgggcgagatgcctctgtccacaccctgctggatgccttggagacgctgggagagagacttgccaagcagaagattgaggaccacttgttgagctctggaaagttcatgtatctagaaggtaatgcagactctgccatgtcctaagtgtgattctcttcaggaagtcagaccttccctggtttaccttttttctggaaaaagcccaactggactccagtcagtaggaaagtgccacaattgtcacatgaccggtactggaagaaactctcccatccaacatcacccagtggatggaacatcctgtaacttttcactgcacttggcattatttttataagctg

SEQ ID NO: 242160 - protein, 370 aa, Artificial Sequence
  derived and/or modified sequence
MPTETLQTGSMVKPVSPAGTFTSAVPLRILNKGPDYFRRQAEPNPKRLSAVERLEADKAKYVKSQEVINAKQEPVKPAVLAKPPVCPAAKRALGSPTLKVFGNHAKTESGVQRENLKLEILKNIINSSEGSSSGSGHKHSSRNWPPHRSEATDLHRHSFAESLKVYPTQGRRSPQEGGSHVGRRLLEQSAESFLHVSHSSSDIRKVTSVKPLKAIPCSSSAPPLPPKPKIAAIASMKSPEADPVEPACGVSRRPSLQRSKSDLSDRYFRVDADVERFFNYCGLDPEELENLGMENFARANSDIISLNFRSASMISSDCEQSQDSNSDLRNDDSANDRVPYGISAIERNARIIKWLYSIKQARESQKVSHV

SEQ ID NO: 242161 - DNA, 1113 bp, Artificial Sequence
  derived and/or modified sequence
atgcccaccgagaccctgcagaccggcagcatggtgaagcccgtgagccccgccggcaccttcaccagcgccgtgcccctgagaatcctgaacaagggccccgactacttcagaagacaggccgagcccaaccccaagagactgagcgccgtggagagactggaggccgacaaggccaagtacgtgaagagccaggaggtgatcaacgccaagcaggagcccgtgaagcccgccgtgctggccaagccccccgtgtgccccgccgccaagagagccctgggcagccccaccctgaaggtgttcggcaaccacgccaagaccgagagcggcgtgcagagagagaacctgaagctggagatcctgaagaacatcatcaacagcagcgagggcagcagcagcggcagcggccacaagcacagcagcagaaactggcccccccacagaagcgaggccaccgacctgcacagacacagcttcgccgagagcctgaaggtgtaccccacccagggcagaagaagcccccaggagggcggcagccacgtgggcagaagactgctggagcagagcgccgagagcttcctgcacgtgagccacagcagcagcgacatcagaaaggtgaccagcgtgaagcccctgaaggccatcccctgcagcagcagcgccccccccctgccccccaagcccaagatcgccgccatcgccagcatgaagagccccgaggccgaccccgtggagcccgcctgcggcgtgagcagaagacccagcctgcagagaagcaagagcgacctgagcgacagatacttcagagtggacgccgacgtggagagattcttcaactactgcggcctggaccccgaggagctggagaacctgggcatggagaacttcgccagagccaacagcgacatcatcagcctgaacttcagaagcgccagcatgatcagcagcgactgcgagcagagccaggacagcaacagcgacctgagaaacgacgacagcgccaacgacagagtgccctacggcatcagcgccatcgagagaaacgccagaatcatcaagtggctgtacagcatcaagcaggccagagagagccagaaggtgagccacgtgtag

SEQ ID NO: 242162 - DNA, 1113 bp, Artificial Sequence
  derived and/or modified sequence
atgcctacggagacactgcaaactggctctatggtgaagcctgtgagtccagctggaactttcactagtgccgtccctcttagaatcctcaataaggggccggactactttcgccggcaagccgaacctaatccaaagaggctatctgccgtagagaggctggaagcagacaaagcaaagtatgtgaaatcccaggaggtcattaacgccaaacaggaacctgtaaaaccagccgttttggcgaaacctccagtgtgccctgcagcaaagagggcacttggttcacccacactgaaggtgttcggtaaccacgcgaagacagaatccggggtgcaaagggaaaacctcaagttggaaatactaaagaacatcattaattcctcagaaggaagctcttctggatccggccataaacattcttcaagaaattggcctccacacagatctgaggccactgacctgcaccggcactcatttgcagagtccctcaaggtgtacccaacacaggggcgccgcagtccacaggaaggcggatctcatgtgggtagacggctcctcgaacagtccgccgaatcattcctgcatgtctctcactcttcctctgacatacgtaaagtaacctccgtgaaaccactcaaagctattccctgttcttccagtgcgcctcccctgcctcccaagccaaaaattgcagccatagcttccatgaaatcaccggaggctgatccggttgagcctgcttgtggcgttagtcggcgacccagcctccaaagaagcaaaagtgaccttagcgaccgatattttagagttgatgccgatgtggaacggtttttcaattactgcgggctcgatcctgaagaactggaaaatctcgggatggaaaacttcgcccgggcaaatagcgatatcatctctctgaattttagaagcgctagcatgatttccagcgactgcgagcagagccaggattccaattctgatttgcggaacgatgattcagccaatgaccgggtcccctacgggatcagtgccatcgagagaaatgcacgaatcatcaagtggctgtattccattaagcaagcacgggaaagccagaaggtatcccacgtgtag

SEQ ID NO: 242163 - DNA, 3438 bp, Artificial Sequence
  derived and/or modified sequence
actcggtgcagaccgaaccatcgcggccgccgccagccgggcccttcgcggccgcgcgtcctgggcccgttccgccagccccgtctgctctctacccgcggccccgcggcggcgaccgtgaacactcggcggcccctacagcccgctctcggcccttcgtccctcgcgggccccgactctccctccttgcagtcccccggagcctggctcccggctcgggccgcaccgccagggactggggtgagcggcccagaaatctccaaattggacatccagagcagcattcttgttctgtctacgtcttgaattagaaactatcaagctctgtaagtcctgaaaaggaaataaaaggtgcgtccctacccaagaggagaggtggccagtaaatgtcagctgaggcaccgaaggctgcgatgcaccagcccggtgccctgtgaggacggccacatcaatagtggtaacactcacaatttcctgctgcagagagcattttaagaaaggacagcattcctgtgacctctgcctaccatccataaaatactcattcccctctcagctctgcctgcagttgaacacaaagacctggaggagactcccacctccttcagggagaagaaaggaggcagcgaagcagattaaaggaacttgtggcttgtggcctttttgtgcaagggccgcctggaaggggagaaaagtgtatgaaagccaccgtggcggttaatgagctgtgagatgaggcgctgctgcggccgctgctgctgacactcgctcccaggctgcacccgccgcccttggcgcttcatgtacatgtgtctattcaggccttgcggaggcgcccagaagagcatccaacacggctgccggggaaagaccgcccaccatgcccacggagaccctacagacaggtagcatggtgaagccggtcagccccgcgggcaccttcacctctgctgtgcccctgcgcatcctgaacaaggggccagactacttccgcaggcaggccgagcccaaccccaagaggctcagcgccgtggagaggctggaggccgacaaggccaagtacgtcaagagccaggaggtgatcaacgccaagcaggagcccgtgaagcccgccgtgctggccaagcccccggtgtgcccggctgccaagcgcgcactgggcagccccacgctcaaagtgttcggcaaccacgccaagaccgagagcggcgtgcagagggagaacctgaagctggagatcctgaagaacatcatcaatagctccgagggctctagctcgggctcggggcacaagcacagctcccgcaactggccgccccaccggtcggaagccactgacctgcaccgtcactccttcgcggagtccctgaaggtctaccccacgcagggccgcaggagcccgcaggagggcggctcccacgtgggcaggagactgctggagcagtcagccgagtccttcctccacgtgtcccacagctcttcggacatccgcaaggtgaccagcgtgaagcccctcaaggccatcccctgcagtagctctgcccctcccctgcctcccaagcccaaaatcgcagccatcgcctccatgaagtcccccgaggccgaccctgtggaaccagcttgtggagtcagccgaagaccctccctccagcggtctaagtcagacttgagtgacagatatttccgagtggacgcggacgtggagaggttcttcaactactgtggactggacccggaagagctggaaaacctgggaatggaaaactttgcaagggctaattctgacataatatccctcaacttccgcagcgcaagcatgatcagctcagactgtgaacagtctcaggacagtaacagtgaccttagaaatgatgacagtgccaatgaccgcgtgccgtatggcatttctgccatcgaaagaaatgctagaatcatcaagtggttatatagcatcaaacaagctagagagtcacagaaggtctcccatgtgtaagacagtgcgtggaaaggagggagcgtgggtctctgtgcttacgcagttgtgaaggttgtgaggtctccttgaagtgttgtgagcttctccactctttgtgttgcttgttgtgcaatgttttcaagttgcatgcttgtcaacatggggactgacctggcttccacgtcaccatcgctacagagcctggctgaacacgcgtcatctgccaaaagtttcaggccagaatctaattagggctttgctcgtaagcaaaactgtttacatgaaaatggtatacaacttcttcgatatttatgtggttcttgtgtttttatatcccgcgctattgtgtcttaattaaaagttttatcaactggcttttaagttgagagcagaatctttttgaaataaaaagccactttgcctacatgtgagactattccagtgggacagtaaatgggatctgctaccaaacagataatgactgaccgaacatagaaccaggctgggttttctgtggaataaagtggtgagcctgacgttaatcgtttacatgttgaaattctcttgccacttagtgaagcagtcattggggtaacaatgctacgttttgtgtccgattcagtgtgtaaacgttggtggttctatgtaatactgaccccaaggaaagacgatcagatacaaagaaagatggttaaatctaggaggttgggtgtttgggggttttgttgatgttgttctgattgggataattcagaaattcctaatattatctttcgacagaatgaccaccctaaaacaaatactgaatgcctttaaaaaaaaaaaaagttgtggttttttgttttttttttttttttttttggtcgagaactactaatttcatgctatttctttctctctccctttgttgttatttgatttgggggaagggagtgaggcttgtgcagatttgagctatctgaagacatgaacagaagtcaaataccagccatatcagtagagccttccattcaaaagtgaacacacttggtagctgaaccatatctgagcagcgtgattctgttgtcttgcatatgttattctctcaggctgtggatctttgttacagctctaggaaactgtagaaatacaatgctatgtagcttttccaccccatggtctctagtgctgcctatcaacttgtccccttttttcccaataacctgtcttccaggtggtacagttagctgtcactcagctgacaccatgatgtggcagcagagagggaaacctacaagtggtttgcctcattgcctttgccacatctgaagttctcagcagcactaccttagacttcatgagctaataggaaactttttatggtgtaaatgctgtaagactttgtacatacttcagttgttatgaaatctttaaagaaaaaaagaaaaagttacgctaataaattgctgtggtgcaggcactaa

SEQ ID NO: 242164 - DNA, 1113 bp, Artificial Sequence
  derived and/or modified sequence
atgcccacagagaccctgcagacaggctccatggtgaagcctgtgtccccagctggcaccttcaccagcgctgtgcccctgcgcatcctgaacaagggccctgactacttccggcggcaggccgagcccaaccccaagaggctgtctgctgtggagcggctggaggccgacaaggccaagtatgtgaagagccaggaggtgatcaatgccaagcaggagcctgtgaagccagctgtgctggccaagccccctgtgtgcccagctgccaagagggccctgggcagccccaccctgaaggtgtttggaaaccacgccaagacagaaagtggagtgcagcgggagaacctgaagctggagatcctgaagaacatcatcaacagcagcgagggcagcagcagcggcagcggccacaagcacagcagcaggaactggccaccccacaggtctgaggccacagacctgcaccgccacagctttgctgagagcctgaaggtgtaccccacccagggcagaagaagcccccaggagggcggcagccacgtgggccgccgcctgctggagcagagcgctgagagcttcctgcacgtgagccacagcagcagtgacatcaggaaggtgacctctgtgaagcccctgaaggccatcccctgcagcagcagcgccccacccctgccccccaagcccaagattgctgccatcgcctccatgaagagccctgaggccgaccctgtggagcccgcctgtggggtgtcccggcggcccagcctgcagaggagcaagagtgacctgagtgaccgctacttccgggtggatgctgatgtggagcgcttcttcaactactgcggcctggaccctgaggagctggagaacctgggcatggagaactttgcccgggccaacagcgacatcatcagcctgaacttccgcagcgcctccatgatcagcagtgactgtgagcagagccaggacagcaacagcgacctgagaaatgatgattctgccaatgacagagtgccctacggcatcagcgccattgaaagaaatgcccgcatcatcaagtggctgtacagcatcaagcaggcccgggagagccagaaggtgagccacgtgtag

SEQ ID NO: 242165 - DNA, 1113 bp, Artificial Sequence
  derived and/or modified sequence
atgcccaccgagaccctgcagaccggcagcatggtgaagcccgtgtcacccgccggaacattcaccagtgccgtacctctccggattcttaacaaggggccagactatttcagaagacaagctgaacccaatcccaaacgtctgtccgccgtagaaagactcgaggctgacaaagcaaaatatgtgaaatcacaggaagtaatcaatgctaagcaggaaccagttaagcctgccgtgctggctaagccacccgtgtgtccagcggctaaaagagcactcgggtcaccgacacttaaggtgttcggtaatcatgccaagaccgaaagtggggtccaacgcgaaaatctgaagctggagattctcaagaatatcatcaactcctctgaaggtagcagctccggaagcggccataagcattcaagtcggaactggcctccgcataggtctgaagcgacagatctgcaccggcacagttttgccgaatcgctgaaggtatatccgacccaggggcgccgctctccccaggagggcggctcccacgtcgggcgccgtctactggagcagtccgccgagtcgttcctacatgtgtctcactcttcatccgatattaggaaagtaacctcggtcaagcccctgaaagccattccatgctcgagcagcgctccaccgttgccccctaagcctaaaattgctgccatcgccagtatgaagtctccagaggcagacccagtggaaccggcttgtggggtgtctcgtcgacccagcctacagagatctaagtccgatttgagtgaccgctatttccgcgtagatgccgacgtcgaaaggttttttaattattgtggactcgatccagaggaactggagaacttagggatggagaacttcgccagagccaactcagacatcatctctctaaattttagatctgcctcgatgatcagcagcgactgtgagcagtctcaagactctaacagtgacctacgaaatgatgatagtgccaacgacagggtgccctatgggatctccgctattgagcgtaatgcgcggatcatcaaatggctctattccattaagcaagcacgcgagtcccagaaggtgagtcacgtctag

SEQ ID NO: 242166 - DNA, 1113 bp, Artificial Sequence
  derived and/or modified sequence
atgcccacagaaaccttgcagaccggctccatggttaagcctgtgagtccggctggtacatttacctctgccgtgcctctgcggatcctgaataagggtccagattacttccgacgtcaggcagagccgaaccctaaaagactgtcagccgtggaaaggcttgaagccgacaaagccaaatacgtcaagtcacaggaggtcattaacgctaaacaggaacctgtgaagcccgctgtgctggcaaaaccaccagtctgtccagctgcaaaacgggcactggggtctcccaccctgaaggtctttggtaaccacgccaaaaccgaaagcggtgtccagagggaaaatctgaagctggagatcctgaaaaatatcatcaactcgtccgagggatccagttccggcagcggacataaacatagttctagaaattggccccctcaccgaagtgaggccacggacctgcacagacatagcttcgctgagagcttgaaagtctaccctactcagggcaggcggtccccgcaggagggcggaagccatgtcgggcgaaggctcctggagcagtccgccgagagcttcctgcacgtttcccactcatcaagcgacattaggaaagttacctccgtgaaaccactaaaagccattccatgctcttcctccgccccacctttaccgccaaagccaaaaatcgcggcaatcgcttccatgaaaagtcccgaggccgatccagtggaacctgcctgtggggtctccaggcgccctagtctccagcgttccaagtctgacctatctgaccggtatttccgcgtggacgccgacgtcgagcgtttttttaactactgcggtctggatccggaagaactggagaaccttggcatggaaaatttcgctagagccaactcggacatcattagtctgaacttcagatccgcatccatgataagctcagactgtgagcaatcccaggactcaaactcggatcttcgaaatgatgattcagcaaacgatagagtgccttacggcatctcagccatcgagaggaatgccaggattattaaatggctgtactcaataaaacaggcccgagagagtcagaaagtatcccatgtgtag

SEQ ID NO: 242167 - protein, 992 aa, Artificial Sequence
  derived and/or modified sequence
MRKLFSFGRRLGQALLSSMDQEYAGPGYDIRDWELRKIHRAAIKGDAAEVERCLTRRFRDLDARDRKDRTVLHLACAHGRVQVVTLLLHRRCQIDICDRLNRTPLMKAVHSQEEACAIVLLECGANPNIEDIYGNTALHYAVYNKGTSLAERLLSHHANIEALNKEGNTPLLFAINSRRQHMVEFLLKNQANIHAVDNFKRTALILAVQHNLSSIVTLLLQQNIRISSQDMFGQTAEDYALCSDLRSIRQQILEHKNKMLKNHLRNDNQETAAMKPANLKKRKERAKAEHNLKVASEEKQERLQRSENKQPQDSQSYGKKKDAMYGNFMLKKDIAMLKEELYAIKNDSLRKEKKYIQEIKSITEINANFEKSVRLNEKMITKTVARYSQQLNDLKAENARLNSELEKEKHNKERLEAEVESLHSSLATAINEYNEIVERKDLELVLWRADDVSRHEKMGSNISQLTDKNELLTEQVHKARVKFNTLKGKLRETRDALREKTLALGSVQLDLRQAQHRIKEMKQMHPNGEAKESQSIGKQNSLEERIRQQELENLLLERQLEDARKEGDNKEIVINIHRDCLENGKEDLLEERNKELMKEYNYLKEKLLQCEKEKAEREVIVREFQEELVDHLKTFSISESPLEGTSHCHINLNETWTSKKKLFQVEIQPEEKHEEFRKLFELISLLNYTADQIRKKNRELEEEATGYKKCLEMTINMLNAFANEDFSCHGDLNTDQLKMDILFKKLKQKFNDLVAEKEAVSSECVNLAKDNEVLHQELLSMRNVQEKCEKLEKDKKMLEEEVLNLKTHMEKDMVELGKLQEYKSELDERAVQEIEKLEEIHLQKQAEYEKQLEQLNKDNTASLKKKELTLKDVECKFSKMKTAYEEVTTELEEFKEAFAGAVKANNSMSKKLMKSDKKIAVISTKLFTEKQRMKYFLSTLPTRPEPELPCVENLNSIELNRKYIPKTAIRIPTSNPQTSNNCKNFLTEVLLC

SEQ ID NO: 242168 - DNA, 2979 bp, Artificial Sequence
  derived and/or modified sequence
atgagaaagctgttcagcttcggcagaagactgggccaggccctgctgagcagcatggaccaggagtacgccggccccggctacgacatcagagactgggagctgagaaagatccacagagccgccatcaagggcgacgccgccgaggtggagagatgcctgaccagaagattcagagacctggacgccagagacagaaaggacagaaccgtgctgcacctggcctgcgcccacggcagagtgcaggtggtgaccctgctgctgcacagaagatgccagatcgacatctgcgacagactgaacagaacccccctgatgaaggccgtgcacagccaggaggaggcctgcgccatcgtgctgctggagtgcggcgccaaccccaacatcgaggacatctacggcaacaccgccctgcactacgccgtgtacaacaagggcaccagcctggccgagagactgctgagccaccacgccaacatcgaggccctgaacaaggagggcaacacccccctgctgttcgccatcaacagcagaagacagcacatggtggagttcctgctgaagaaccaggccaacatccacgccgtggacaacttcaagagaaccgccctgatcctggccgtgcagcacaacctgagcagcatcgtgaccctgctgctgcagcagaacatcagaatcagcagccaggacatgttcggccagaccgccgaggactacgccctgtgcagcgacctgagaagcatcagacagcagatcctggagcacaagaacaagatgctgaagaaccacctgagaaacgacaaccaggagaccgccgccatgaagcccgccaacctgaagaagagaaaggagagagccaaggccgagcacaacctgaaggtggccagcgaggagaagcaggagagactgcagagaagcgagaacaagcagccccaggacagccagagctacggcaagaagaaggacgccatgtacggcaacttcatgctgaagaaggacatcgccatgctgaaggaggagctgtacgccatcaagaacgacagcctgagaaaggagaagaagtacatccaggagatcaagagcatcaccgagatcaacgccaacttcgagaagagcgtgagactgaacgagaagatgatcaccaagaccgtggccagatacagccagcagctgaacgacctgaaggccgagaacgccagactgaacagcgagctggagaaggagaagcacaacaaggagagactggaggccgaggtggagagcctgcacagcagcctggccaccgccatcaacgagtacaacgagatcgtggagagaaaggacctggagctggtgctgtggagagccgacgacgtgagcagacacgagaagatgggcagcaacatcagccagctgaccgacaagaacgagctgctgaccgagcaggtgcacaaggccagagtgaagttcaacaccctgaagggcaagctgagagagaccagagacgccctgagagagaagaccctggccctgggcagcgtgcagctggacctgagacaggcccagcacagaatcaaggagatgaagcagatgcaccccaacggcgaggccaaggagagccagagcatcggcaagcagaacagcctggaggagagaatcagacagcaggagctggagaacctgctgctggagagacagctggaggacgccagaaaggagggcgacaacaaggagatcgtgatcaacatccacagagactgcctggagaacggcaaggaggacctgctggaggagagaaacaaggagctgatgaaggagtacaactacctgaaggagaagctgctgcagtgcgagaaggagaaggccgagagagaggtgatcgtgagagagttccaggaggagctggtggaccacctgaagaccttcagcatcagcgagagccccctggagggcaccagccactgccacatcaacctgaacgagacctggaccagcaagaagaagctgttccaggtggagatccagcccgaggagaagcacgaggagttcagaaagctgttcgagctgatcagcctgctgaactacaccgccgaccagatcagaaagaagaacagagagctggaggaggaggccaccggctacaagaagtgcctggagatgaccatcaacatgctgaacgccttcgccaacgaggacttcagctgccacggcgacctgaacaccgaccagctgaagatggacatcctgttcaagaagctgaagcagaagttcaacgacctggtggccgagaaggaggccgtgagcagcgagtgcgtgaacctggccaaggacaacgaggtgctgcaccaggagctgctgagcatgagaaacgtgcaggagaagtgcgagaagctggagaaggacaagaagatgctggaggaggaggtgctgaacctgaagacccacatggagaaggacatggtggagctgggcaagctgcaggagtacaagagcgagctggacgagagagccgtgcaggagatcgagaagctggaggagatccacctgcagaagcaggccgagtacgagaagcagctggagcagctgaacaaggacaacaccgccagcctgaagaagaaggagctgaccctgaaggacgtggagtgcaagttcagcaagatgaagaccgcctacgaggaggtgaccaccgagctggaggagttcaaggaggccttcgccggcgccgtgaaggccaacaacagcatgagcaagaagctgatgaagagcgacaagaagatcgccgtgatcagcaccaagctgttcaccgagaagcagagaatgaagtacttcctgagcaccctgcccaccagacccgagcccgagctgccctgcgtggagaacctgaacagcatcgagctgaacagaaagtacatccccaagaccgccatcagaatccccaccagcaacccccagaccagcaacaactgcaagaacttcctgaccgaggtgctgctgtgctag

SEQ ID NO: 242169 - DNA, 2979 bp, Artificial Sequence
  derived and/or modified sequence
atgaggaagttgttttcatttggacgaagactgggacaggctctgctatccagcatggatcaagaatacgctggaccgggttatgatattcgggattgggagcttaggaagatccaccgtgccgccattaagggcgacgctgccgaagtggaacggtgcttgacacggcgtttccgcgaccttgacgcacgggatagaaaggatcggactgtgctccatttggcatgcgctcatggtagagttcaggtggttaccctgctcttgcaccggcggtgtcagatagacatttgtgacagacttaaccgaacaccgctgatgaaggctgtgcactcacaggaggaggcttgcgccattgtgcttctagagtgtggcgctaatccaaacatcgaggacatttatggcaatacggcactgcactacgcagtttacaataagggaacgtcattagctgaacggcttctttcccaccacgccaacatagaggccctcaacaaagaaggcaatactccgctgctgttcgccatcaactcccgccggcaacacatggtggaatttctactgaagaaccaggccaatattcacgccgtggataacttcaagcgcacagctctgattctggccgttcagcataatctcagctccatcgttactcttttgttgcagcagaatataaggatatcttctcaggacatgttcggccagacggctgaggattacgctctgtgcagcgatttgcggagcatccggcagcagatcctcgaacacaagaacaagatgttaaagaaccatctgcgcaatgataatcaagagaccgcggcaatgaagcccgctaatcttaaaaaaagaaaagaaagagctaaggccgagcacaaccttaaagtggccagcgaagagaaacaagaacgactgcaacggtcagaaaacaaacagccccaggatagtcaatcctacggaaaaaaaaaagatgctatgtatggcaattttatgctcaagaaagacatagccatgcttaaagaggaactgtacgccattaaaaatgacagcctcagaaaggagaagaagtatatccaagaaattaaatccattacagaaatcaatgctaattttgaaaagtcggttcggctgaatgagaaaatgattacaaaaaccgtggccagatattcacagcagctcaacgacctcaaggctgaaaacgcacgcctaaattccgagcttgaaaaggaaaagcacaataaagagaggttagaggccgaagttgaatcactccactcatcgcttgctacagccataaatgaatataacgagatcgtagaacgcaaagatctggaactggtcctgtggcgcgccgatgatgtttcaaggcacgagaagatggggtccaatatcagccagctgaccgataaaaatgagcttctaacagaacaggtccataaagcccgcgttaaattcaataccctaaagggtaagttacgcgaaacacgcgatgccctgcgggaaaagacacttgctttagggagcgttcaactcgatctgagacaggcacagcacaggatcaaggaaatgaagcagatgcacccgaacggtgaggccaaagaatcacagtccataggcaaacagaacagcttagaggagaggatccggcagcaggaactcgagaaccttctgctagaaagacagctcgaagacgctagaaaggaaggggataataaggagatagtgattaatatccaccgcgactgcctggaaaacggcaaggaggatcttcttgaagagcgtaacaaagaactcatgaaagaatacaattacctgaaggaaaaactattgcagtgtgagaaagaaaaagcggagcgggaagtgatcgttcgggaattccaagaggaattggttgatcatttgaagacgttttctattagcgaatcacctctagaaggaacgtctcactgtcacattaacctgaacgaaacctggacttctaaaaagaaattgttccaagtggaaatccagcccgaggaaaagcacgaggagttccggaagctcttcgaactcatatcactccttaactacaccgccgatcagattcgaaaaaagaaccgcgaactggaggaagaggctaccgggtacaaaaagtgtcttgagatgactatcaatatgctcaacgctttcgccaacgaagacttttcttgtcatggggatctgaacaccgaccagcttaagatggacattcttttcaagaagctcaaacagaagttcaacgacctggtagcggaaaaggaggctgttagcagcgaatgtgtgaacctggcaaaggataacgaagtcctgcatcaggaactgctgtctatgcggaatgttcaggaaaagtgtgaaaagctcgaaaaggataaaaagatgctggaggaggaagtgcttaatctgaaaacacacatggagaaggatatggtggagctgggcaagctgcaggaatacaagagcgaactcgacgagagagccgtacaagagatagaaaagctggaggagattcacctccagaagcaggccgaatacgagaaacaactggaacagttgaataaagataataccgcttctttgaagaagaaggagctgacactcaaggacgtagaatgtaaattcagcaagatgaaaactgcctatgaggaggtgactactgagttagaggagttcaaggaagctttcgcgggtgctgtgaaggccaataattcgatgagtaagaaactgatgaaaagcgataaaaagattgccgtgatttccacaaaattattcacagaaaagcagcggatgaaatatttcctttctaccctgcccacccggccagaaccagagctgccctgtgtggagaacctgaattcaatcgagctcaaccggaagtacatccccaagacggcaatacgaatccctacctcaaacccccagacatcaaataattgtaagaacttcctcacggaggtcttgttatgttag

SEQ ID NO: 242170 - DNA, 2979 bp, Artificial Sequence
  derived and/or modified sequence
atgaggaagctgttctcctttggaagaaggctgggccaggccctgctgagctccatggaccaggagtatgccggccctggctatgacatccgggactgggagctgaggaagatccacagagctgccatcaagggagatgctgctgaggtggagcgctgcctgacccggcgcttccgggacctggatgcccgggacaggaaggacagaacagtgctgcacctggcctgtgcccacggccgggtgcaggtggtgaccctgctgctgcaccggcgctgccagattgacatctgtgaccggctgaacagaacacccctgatgaaggctgtgcacagccaggaggaggcctgtgccatcgtgctgctggagtgtggggccaaccccaacatcgaggacatctacggcaacacagccctgcactatgctgtgtacaacaagggcaccagcctggccgagcggctgctgagccaccacgccaacatcgaggccctgaacaaggagggcaacacccccctgctgtttgccatcaacagccggcggcagcacatggtggagttcctgctgaagaaccaggccaacatccatgctgtggacaacttcaagaggacagccctgatcctggccgtgcagcacaacctgagcagcatcgtgaccctgctgctgcagcagaacatccgcatcagcagccaggacatgtttggccagacagcagaagattatgccctgtgcagcgacctgcggagcatccggcagcagatcctggagcacaagaacaagatgctgaagaaccacctgagaaatgacaaccaggagacagctgccatgaagccagccaacctgaagaagaggaaggagcgggccaaggccgagcacaacctgaaggtggccagcgaggagaagcaggagcggctgcagaggtctgagaacaagcagccccaggacagccagagctatggcaagaagaaggatgccatgtatggcaacttcatgctgaagaaggacatcgccatgctgaaggaggagctgtatgccatcaagaatgacagcctgaggaaggagaagaagtacatccaggagatcaagagcatcacagagatcaatgccaactttgagaagtctgtgcggctgaatgagaagatgatcaccaagacagtggcccgctacagccagcagctgaatgacctgaaggcagaaaatgcccggctgaacagcgagctggagaaggagaagcacaacaaggagcggctggaggccgaggtggagagcctgcacagcagcctggccacagccatcaatgagtacaatgagatcgtggagaggaaggacctggagctggtgctgtggagggcagatgatgtgtccagacatgagaagatgggcagcaacatcagccagctgacagacaagaatgagctgctgacagagcaggtgcacaaggcccgggtgaagttcaacaccctgaagggcaagctgcgggagaccagagatgccctgcgggagaagaccctggccctgggctctgtgcagctggacctgcggcaggcccagcaccgcatcaaggagatgaagcagatgcaccccaatggagaggccaaggagagccagagcatcggcaagcagaacagcctggaggagcgcatccggcagcaggagctggagaacctgctgctggagcggcagctggaggatgccaggaaggagggggacaacaaggagatcgtcatcaacatccaccgggactgcctggagaatggcaaggaggacctgctggaggagaggaacaaggagctgatgaaggagtacaactacctgaaggagaagctgctgcagtgtgagaaggagaaggccgagcgggaggtgattgtgcgggagttccaggaggagctggtggaccacctgaagaccttcagcatcagcgagagccccctggagggcaccagccactgccacatcaacctgaatgagacctggaccagcaagaagaagctgttccaggtggagatccagcctgaggagaagcatgaggagttcaggaagctgtttgagctgatcagcctgctgaactacacagctgaccagatcaggaagaagaaccgggagctggaggaggaggccaccggctacaagaagtgcctggagatgaccatcaacatgctgaatgcctttgccaatgaagacttcagctgccacggggacctgaacacagaccagctgaagatggacatcctcttcaagaagctgaagcagaagttcaatgacctggtggccgagaaggaggccgtgtccagtgaatgtgtgaacctggccaaggacaatgaggtgctgcaccaggagctgctgtccatgagaaatgtgcaggagaagtgtgagaagctggagaaggacaagaagatgctggaggaggaggtgctgaacctgaagacccacatggagaaggacatggtggagctgggcaagctgcaggagtacaagtctgagctggatgaaagagctgtgcaggagattgagaagctggaggagatccacctgcagaagcaggccgagtatgagaagcagctggagcagctgaacaaggacaacacagccagcctgaagaagaaggagctgaccctgaaggatgtggagtgcaagttcagcaagatgaagacagcctatgaggaggtgaccacagagctggaggagttcaaggaggcctttgctggagctgtgaaggccaacaacagcatgagcaagaagctgatgaagagtgacaagaagattgctgtgatcagcaccaagctgttcacagagaagcagaggatgaagtacttcctgagcaccctgcccaccaggcctgagcctgagctgccctgtgtggagaacctgaacagcattgagctgaacaggaagtacatccccaagacagccatccgcatccccaccagcaacccccagaccagcaacaactgcaagaacttcctgacagaggtgctgctgtgctag

SEQ ID NO: 242171 - DNA, 4033 bp, Artificial Sequence
  derived and/or modified sequence
ggcttccggagtcccggctggcgctgagttgtaggcgcgcgcctaactggcatcgcggggactcactcggtctgagagttcggagcgctgaggttcaggcgcgcgcctaacggcttagctgggctcactcggtctgagaggtcggagtctgcgagtgtcgctgctgaaggctgtggtggaccgggctggatcgcggattctgagctacattgcgggtttgggggtggatcttggatttgggggtggatcgcgggttgcgggggggatcgcgggttgcgggggagatcgcggatttggggcggagtgggggtggaaaggccacgaggagccgccgcggctcaggagcgggtggtgggcgtctgagaagtcgccaccatgaggaagctcttcagcttcgggagacgcctgggccaggcgctcctgagctccatggaccaagagtatgcgggtccgggttacgacattcgggactgggaactgcggaagatccacagggctgccatcaagggcgacgccgcggaggtggagcgctgcctgacgcgcaggttccgggacttggacgcccgcgacagaaaagacaggactgttctacatttggcctgtgcccatggccgtgtgcaagtggtcactctcttgctgcacagaagatgccagatcgacatctgtgacagactaaacaggacacctttaatgaaggctgtacacagccaggaagaggcttgtgccatcgttctcctggaatgtggcgccaatccaaacattgaggatatctacggcaacactgctctccattatgccgtgtataataaggggacttcactggcagaaagactgctttcccaccatgcaaatattgaagcactaaacaaggagggaaacactccacttttgtttgctataaattccaggagacagcatatggtggaatttttattgaagaaccaggcaaatatacatgccgttgacaatttcaaaagaacagccctcatacttgcagtacagcataacttgtcaagtatcgtcaccctcctgcttcaacaaaatatacgtatctcttctcaagacatgtttggccaaactgccgaggattatgctctttgttctgatttgagaagcatccgacaacaaattttggaacataaaaataaaatgcttaaaaatcatcttcgaaatgacaatcaagaaacagcagctatgaagcctgcaaatttgaaaaaaagaaaagaacgtgcaaaagcagaacacaacctaaaagtggcttcagaggaaaagcaagaaaggctccaaagaagtgaaaataaacagccacaggattctcaaagttacggaaaaaagaaggatgcgatgtatggaaattttatgttgaagaaagacattgccatgctcaaagaggaattatatgcaataaaaaatgacagtctcagaaaggaaaagaaatatattcaggaaattaaaagcattacagaaataaatgctaactttgaaaagagtgtaagactcaatgaaaaaatgataacaaaaacagtggcccggtattcgcaacagcttaatgatctgaaagctgagaatgcaaggctgaattcagaattggagaaggaaaaacacaacaaagaaagactagaagctgaagttgaatccctccattctagcctggccactgctataaatgagtacaatgaaattgtggaaagaaaagacctagaactagttttatggagagcagatgatgtttctagacatgaaaaaatgggttctaatatttctcaactaacagataagaatgagttgcttactgaacaggtccataaagctcgggtgaagttcaataccttaaaaggtaagctccgtgagacaagagatgctctcagggaaaagacattggctttaggaagtgtacagctggacctaaggcaagcacagcatcgaataaaggaaatgaagcagatgcatccaaatggagaagctaaagaaagtcaatccattggaaagcagaactctttagaggagagaatacgtcaacaagaacttgaaaatctcttgcttgaacgacaactagaggatgctcgtaaggaaggcgataataaagagatagtcattaatatccacagagactgtcttgagaatggaaaggaagatcttctagaagaaagaaataaggaattaatgaaagaatataattatttaaaagaaaaactgcttcagtgtgaaaaagaaaaagcagaaagagaagtgattgtgagagaatttcaagaagaactggtcgatcaccttaaaacattttcaatatcagagtctccactggaaggtacatcacattgtcatattaatttgaatgagacatggacttcaaagaagaaattatttcaagtagaaattcaacctgaagaaaaacatgaagaattcagaaaactttttgaattaatatcattactgaactatactgcggaccaaataagaaagaaaaatcgtgaattagaagaagaggcaactggatataagaaatgcctagaaatgacaataaatatgttaaatgcatttgcaaatgaggacttcagttgccatggagacttaaatacagaccaactgaaaatggatattctgtttaagaagctaaaacagaagtttaatgatcttgtggccgagaaggaagctgtgtcttcagaatgtgtcaatttggccaaagacaatgaagttcttcatcaggagttattatctatgagaaatgtacaagagaaatgtgaaaaacttgagaaggataaaaagatgttggaagaagaagtattaaatcttaagacacatatggaaaaagatatggtagaacttggtaaactacaagaatataaatcggagctggatgaaagggcagtgcaggaaatagaaaaattagaagaaatccatttacagaaacaagcagaatatgaaaaacaattagagcagttaaacaaggataatacggcttcactaaaaaagaaggaactcacacttaaagatgtggaatgtaaattctccaaaatgaaaactgcttatgaagaggttacaactgaattagaagaatttaaggaagcctttgcaggagcagtgaaagctaacaattccatgtcaaaaaaattaatgaaatcggataagaaaatagcagtgatcagcaccaagctctttacggagaaacagcggatgaaatattttctcagcactcttcctacaaggccagaaccagagttaccttgtgttgaaaatcttaatagtatagaactcaacagaaaatatattcccaaaacggccataagaattcctacttcaaacccacagacttcaaataactgcaagaacttcttgactgaggttttgctatgttgagcacttgctcccgtctactttcttttgtagaatccactggtaagccacatctaatgaagagattaaccataaaatcttaaggaaaagttgtatgatttaaaagatcataaaactttattactgggctatttacatgaaattttaattgtttctcatataatataaaacatcataatctttactaaagtagaatattttcatgtcacatatggtgtatatttatatgttattttaaatgatgttttttagcctccttaagttttaagtggatcttgcaaatgaacaccagcgttattgagtttggcctactcaaattgcctgaatgtcagctgtttaaacagccaaacaaccaagtcatcattgatactttagtaaaggtcatcgagggcttctttgcattttacagtttttattaccatatgtagtaggagacttaaagagtatctgccaggtttgtccatactagtgttacggttttcttcttgtagctcaatagtattttgtgtggagatactttgaagctctgtaaatatctggttactcctcaaaacccactagatttagcatttcatggatgacttgtgtttgaacaagtattactgtgatggttgccagatgattgtttttcttattttcttctttgttctacatggagaaataaaaccaataaataaaggag

SEQ ID NO: 242172 - DNA, 2979 bp, Artificial Sequence
  derived and/or modified sequence
atgcggaagctgttcagcttcggccggcggctgggccaggccctgttgagtagcatggatcaggagtacgccggacctgggtatgatattagagattgggaacttcgtaaaattcacagggcagcaattaaaggtgatgccgccgaagtcgagcgctgtcttacaaggcgttttcgcgatctggacgccagagatcggaaggatcggacagtcctacatttagcctgcgctcatggacgggttcaggtagtaactctgctgctccaccggcggtgtcagatcgacatttgtgaccgactgaatcgaactccattaatgaaggccgtccactcgcaggaggaagcttgtgccatcgtgctgctggaatgcggagctaaccccaacatcgaagacatatacggcaatacagctttgcactacgccgtatacaacaaggggaccagccttgccgagcgcctgttaagtcaccacgccaacatcgaagcccttaacaaagagggaaacacgcctctcctcttcgctatcaactctaggagacagcatatggtggagttcctgctaaagaaccaggcaaatatccacgccgtcgacaacttcaaacgcacagctctcatcttagctgttcagcacaatctgagcagtattgttacactgctgctccagcagaatatccggatatcatctcaggatatgtttggacagacggctgaggactatgcactgtgttcagaccttcgatcaattcgccaacaaatcttagagcacaagaataagatgttaaaaaatcacttgcggaatgataaccaggagaccgctgcaatgaaaccagccaacttgaaaaagaggaaagagcgggccaaagcagagcataacctgaaggtcgcttctgaggagaagcaggagcgccttcagagatctgaaaacaaacagccccaagactcccagtcatatgggaagaaaaaagatgccatgtacggcaattttatgctaaaaaaagatatcgcaatgctgaaggaagagctctacgccataaagaatgattcattgaggaaagaaaaaaagtacattcaggagattaaaagcatcaccgagattaatgctaatttcgagaaatccgtgaggttaaatgagaaaatgataactaagactgtggcacggtatagccaacaacttaacgatctgaaggcagagaatgcccgcctgaattcagaactcgagaaagagaagcacaacaaggaaaggttggaagccgaagtagagagtctgcactcaagtctggcgaccgctatcaacgagtataacgagatcgtggagaggaaagatttggagctagttttatggcgggccgatgatgtgagcaggcacgagaaaatggggagtaacatttcccagctgactgataaaaatgagctgctgacagaacaggtccacaaagcccgtgtcaaattcaatacactgaagggcaaactgagagagacccgggacgctttgagagagaagaccctagcactcggatcagttcaactggacttgcgccaggcccagcacagaatcaaggaaatgaaacagatgcaccccaatggtgaggccaaggaaagtcaatccatcggaaagcaaaactcgctggaggaaagaatacgccagcaggaactcgagaaccttctgctggaacggcaactcgaggacgccagaaaggagggcgataacaaggagattgttataaacatccatcgcgactgcttagaaaatggtaaagaggatctgctggaggaacgcaataaggaactgatgaaagagtataactacctgaaggagaagttactgcagtgcgaaaaggagaaagccgagcgtgaagtgattgtgcgggagtttcaggaagagctcgtcgatcatttaaaaaccttctccattagtgaaagcccgctggaaggaacctcccattgtcatattaacctcaatgaaacatggacctcgaaaaaaaagttgtttcaagtggagatccaacccgaggagaagcacgaagaattccggaagctgtttgagctcatctccctgcttaattacaccgcggaccaaattcggaaaaagaaccgggaactggaggaggaggccactggctataagaagtgtctggagatgaccattaatatgctgaacgcttttgccaacgaggatttttcctgccacggtgaccttaacactgaccagcttaagatggatatactgtttaagaagctgaagcaaaagttcaacgatctcgtggccgagaaggaagccgtgtcttccgaatgtgtaaacctggcaaaagacaatgaagtgttacatcaggagctactgtcaatgcgtaacgtccaagaaaagtgtgaaaagttggaaaaagacaaaaaaatgctagaagaagaagtgctgaacctcaagacacacatggaaaaagatatggtagagttagggaaattgcaggaatacaaaagtgagctggatgaaagggctgtccaggaaattgaaaaattggaagagatccacttgcagaagcaggctgagtatgagaaacagctcgagcagcttaacaaggataatactgcctctctgaaaaagaaggaactcaccctcaaggatgtcgagtgtaagttctccaagatgaagacggcctatgaagaggtgacaacagaactcgaggagttcaaggaggcattcgccggagctgtaaaagcgaacaattctatgtctaaaaaattgatgaagagcgataagaaaatcgccgtgattagcaccaaattgttcaccgaaaaacagagaatgaagtatttcctaagcacactgccaacccgccccgaacctgagcttccctgcgtggagaatttgaactccatcgagttgaatcgcaaatatatccctaaaacggctatcagaattccaacgtccaacccccagaccagcaacaattgcaagaacttcttgacagaagttctgctatgttag

SEQ ID NO: 242173 - DNA, 2979 bp, Artificial Sequence
  derived and/or modified sequence
atgagaaagcttttctccttcggccgacggcttgggcaggccctgctgtcgagcatggaccaagagtatgccggacccggttatgacatccgggactgggaactgcgcaaaatccacagggccgcaataaagggcgacgcggctgaggtcgagcggtgtctgactcgcaggtttcgggacctcgatgccagggatcgcaaggaccgcaccgtgctccatctggcgtgtgcgcatggcagggttcaggtggtcactttgctccttcaccggaggtgccaaatcgatatttgcgacaggctcaatcgtacaccccttatgaaagcagtccactctcaggaagaggcttgcgctatcgtacttctcgagtgcggagcaaacccgaacatagaggacatctatggcaacaccgcactgcattatgctgtgtataataagggcaccagcttagcggaacggctcctttcccaccatgctaatatcgaggcccttaataaggaagggaacactcccctcctgtttgccatcaattccagacggcagcacatggtggaattccttctgaaaaaccaggccaacatacatgctgtggacaatttcaagaggacagcactgatcctggcggttcagcacaaccttagcagtattgtgactttactgctgcagcagaacataaggataagcagtcaggatatgtttggccaaactgccgaagactacgcactgtgctccgatctgcgctcaatcagacagcagattctggagcacaaaaataagatgttgaagaaccacttaaggaatgacaatcaggagaccgcagccatgaagcccgcaaatcttaagaaacggaaagaacgcgctaaagctgagcataacctgaaggtcgcttccgaagagaagcaggagagattacagagatcagagaacaaacaaccccaagatagccaatcctatggtaagaagaaggatgccatgtatggtaactttatgctgaaaaaagacattgctatgcttaaggaggaactatacgccattaagaatgacagcttgaggaaagaaaaaaaatatatccaggagatcaagagcataacagagatcaatgctaatttcgagaaatcagtaagattaaatgagaagatgatcactaagaccgtcgcccgatattcccagcaactcaatgatctgaaagcggagaacgcacgcctgaatagtgaactcgagaaggagaagcacaataaggagagactggaagccgaagtggagtcactgcattcctcccttgccacagctattaacgagtataacgagatcgtggagcggaaggacctagagctggtgttatggcgggcagacgatgtgtctcggcacgaaaagatgggatcaaacatatctcagcttacagacaagaacgagctgttgacagaacaggtgcacaaagccagagtcaagtttaatacgctgaagggtaaactcagggaaacgagggacgctctgcgtgaaaaaaccctggccctgggaagtgtgcagcttgatttacgccaagcacagcacagaatcaaggaaatgaagcagatgcatccaaacggcgaagccaaagagagtcagagcatcgggaagcagaactcactggaggaaaggataagacaacaagaattggagaacttgctgcttgaaagacaacttgaagacgctaggaaggagggcgacaataaggagatcgtgattaacatacaccgagattgcctcgaaaacggtaaagaggatctgttggaagaacgaaacaaggagcttatgaaagaatataactatttaaaggagaagttgctgcagtgtgagaaggaaaaagcagagagagaagtgatcgtgcgggagtttcaggaggagctggtggaccacctcaagacgttctctatctccgaatcgcctctggaggggacctcacattgccacatcaacctgaatgaaacctggacatcaaagaaaaaactgttccaggtcgagatccaacccgaagaaaagcacgaggaattccgcaagttgttcgaactaatctccctccttaactacactgctgaccaaattcggaagaaaaaccgggaactcgaggaagaagccacaggttacaagaaatgcctggaaatgaccatcaacatgctgaacgcctttgccaacgaggacttttcctgccacggcgacctgaataccgatcagctgaagatggacatcctctttaagaagctcaagcagaagtttaacgatctcgtggcagaaaaggaggctgtctcatccgagtgcgtgaatctggccaaagataacgaagtactgcaccaggagctgctgtcaatgagaaacgtgcaagagaagtgtgagaagctagaaaaggacaaaaaaatgcttgaggaggaagtcctgaatttaaaaacccacatggagaaagatatggtggagctcggtaagttgcaggagtataagtcggagttggacgaaagagctgtgcaggagattgaaaagctggaagagatccatctgcaaaagcaggccgagtatgaaaaacaacttgaacagctcaacaaggataacaccgcctctttaaaaaagaaggagctgactttgaaagacgtggaatgtaaatttagcaagatgaaaacagcctatgaggaagttacaaccgagctagaggaatttaaggaagccttcgcaggagctgtgaaggccaataacagcatgagcaagaaactcatgaagtccgacaagaagatcgcggtgatatcgacgaagctctttacggagaagcagcggatgaaatattttttatctaccctcccaacaagaccagagccagagttaccgtgtgttgagaacctaaactctatcgaattgaatcgaaaatatatccccaaaaccgcaattaggatacctaccagcaacccccagacatcaaataattgtaaaaatttcctaactgaggtcctgctctgttag

SEQ ID NO: 242174 - protein, 156 aa, Artificial Sequence
  derived and/or modified sequence
MAGWPGAGPLCVLGGAALGVCLAGVAGQLVEPSTAPPKPKPPPLTKETVVFWDMRLWHVVGIFSLFVLSIIITLCCVFNCRVPRTRKEIEARYLQRKAAKMYTDKLETVPPLNELTEVPGEDKKKKKKKKKDSVDTVAIKVEEDEKNEAKKKKGEK

SEQ ID NO: 242175 - DNA, 471 bp, Artificial Sequence
  derived and/or modified sequence
atggccggctggcccggcgccggccccctgtgcgtgctgggcggcgccgccctgggcgtgtgcctggccggcgtggccggccagctggtggagcccagcaccgccccccccaagcccaagcccccccccctgaccaaggagaccgtggtgttctgggacatgagactgtggcacgtggtgggcatcttcagcctgttcgtgctgagcatcatcatcaccctgtgctgcgtgttcaactgcagagtgcccagaaccagaaaggagatcgaggccagatacctgcagagaaaggccgccaagatgtacaccgacaagctggagaccgtgccccccctgaacgagctgaccgaggtgcccggcgaggacaagaagaagaagaagaagaagaagaaggacagcgtggacaccgtggccatcaaggtggaggaggacgagaagaacgaggccaagaagaagaagggcgagaagtag

SEQ ID NO: 242176 - DNA, 471 bp, Artificial Sequence
  derived and/or modified sequence
atggctggctggcctggggcaggtcccctgtgtgttctcgggggagccgcgcttggtgtttgcctcgcgggagtcgcggggcagcttgtggagccaagcaccgcccctccaaaaccgaagccccccccactaactaaagagacagtagtcttttgggatatgagactctggcatgtggtaggcatcttctccctttttgtcctatctattatcatcactttgtgctgcgtgttcaattgcagagttcctcgcacccgcaaggagattgaagcccgctacctgcagaggaaggcagccaaaatgtacactgataagctggaaacagtaccacccctgaacgagttaactgaagttcctggagaagacaaaaagaaaaaaaagaagaagaagaaagactcggtagatacggtggccatcaaagtggaggaggatgaaaagaacgaagctaagaaaaagaaaggcgagaaatag

SEQ ID NO: 242177 - DNA, 471 bp, Artificial Sequence
  derived and/or modified sequence
atggccggctggccaggagctggccccctgtgtgtgctgggcggggccgccctgggcgtgtgcctggccggcgtggccggccagctggtggagcccagcacagccccacccaagcccaagcccccacccctgaccaaggagaccgtggtgttctgggacatgaggctgtggcacgtggtgggcatcttcagcctgtttgtgctgagcatcatcatcaccctgtgctgcgtgttcaactgccgggtgcccaggaccaggaaggagattgaggcccgctacctgcagaggaaggccgccaagatgtacacagacaagctggagaccgtgccccccctgaatgagctgacagaggtgcctggagaggacaagaagaagaagaagaagaagaagaaggacagcgtggacacagtggccatcaaggtggaggaggatgagaagaatgaggccaagaagaagaagggggagaagtag

SEQ ID NO: 242178 - DNA, 471 bp, Artificial Sequence
  derived and/or modified sequence
atggccggctggcccggcgccggccccctgtgcgtgctgggcggcgccgccctcggagtatgtttggcaggcgtagcaggacagcttgttgagccatcaacagcgccacccaagcccaaacctccccctctcaccaaggagacagttgtcttttgggacatgcgcctttggcacgtagtgggaatcttcagcctgttcgtcctctcaatcattattacgctgtgctgtgtctttaactgtcgcgtgccaagaacccggaaggagatcgaagccaggtatctgcagcggaaggcagctaagatgtataccgacaaactcgaaacagtgccacccctgaatgaactgacagaagtgcctggtgaggataaaaaaaagaaaaaaaaaaagaaaaaagactccgttgatactgtggctattaaggtggaagaggatgaaaaaaacgaggccaagaagaagaagggggagaagtag

SEQ ID NO: 242179 - DNA, 471 bp, Artificial Sequence
  derived and/or modified sequence
atggcgggttggccgggagccggaccactgtgcgtgctgggtggggctgctttaggcgtgtgccttgcaggggtcgctggccagttggttgagccttcaacagcgcctccgaagccaaaacccccacctttgaccaaggaaactgtggtgttttgggacatgagattgtggcatgtggtgggcatattctcactttttgtgctttccatcataatcacgctatgttgtgtattcaactgtagggtacctaggacacggaaggagatcgaagccagatatctccaaagaaaagctgccaaaatgtacactgacaagctcgagaccgttcccccactcaatgaactaacagaagtgccgggagaagataaaaagaaaaaaaaaaagaaaaagaaggactccgtcgataccgtcgctatcaaagtcgaggaggacgaaaaaaacgaagctaagaagaaaaagggggagaaatag

SEQ ID NO: 242180 - DNA, 1824 bp, Artificial Sequence
  derived and/or modified sequence
ggcggcgcgggaacctgacaccgaggatgaataaatgatgctcgctgactacccgtggccaaagcccgtggccaccgagcgccggctggcaggggcagtgaccggcggccggcccgttcgtccctgggctccgcaagcggcgcggtggcacgaagatggcggggtggccgggcgcgggtcccctctgcgtgctgggcggcgccgcactcggggtgtgcctcgcgggggttgccgggcagctggtggagcccagcacggccccacccaagcccaagccgcctccgctgaccaaggagacagtggtgttctgggacatgcgcctgtggcacgtggtgggcatcttttcgctcttcgtgttgtccatcatcatcacgctgtgctgtgtcttcaactgtcgtgtgccacggacccggaaggagatcgaagcccggtacctgcagcgaaaggcagccaagatgtacacagacaagctggagactgtgccacccctcaatgagctcacagaagtcccaggagaggataagaagaagaagaagaagaagaagaaggacagtgtggacacagtggccatcaaagtagaggaggatgagaagaatgaggccaagaagaagaaaggagagaaatgaagacatcctgggcagcttgggctggcgggccctggagctcaagccgtggccggggtccaggcatgttggactctgagctcatttggggaccacagaggctgtggtcagagagggaagctgaggcccatggccacatcctcatggcccatcaggggcaggaaccagacaatctcgtaggtgtcctgccccccagcctaggcttggctcctttcaccccatccacatgggtactgtctcggcagaggtggtctggtgccaccgtccctctgcagatacactgctctccccacccagacctgcctgtctcccaccctttctgccagggatggcagtggctgtgaaggagtaatgggatatggggttacttcagccaccctttctggcacgaaatggctgaagtgcatgggtcagggtgtgaggccacacccagagtagccatgaggaggcagagagggtcactgggggacactgtggcagcaggagggactctgtctggccagggaggagccccagtggtgagaagacttccccaagcctggcaggggatccagctcaagggagtaagtagaggtggcttcagaaatggaacccccagcccagcagacatcaagctcaaggcaatgggctaccctcatttcacacgttgtgatgaagctgaggctgctgccaggcccggcatgaggccccgaggctcgagctcggggctgggggctgcagggctgggtcaggggtacacagagctaaggccaatgggctagagggtgccggaaagagagctggagtctgggctcctcttgggaatcagagtatatttaagaagccaagggggacctcgggctgttctggtggccccttctatgcccagctgtgctgggaggtcccagggccctagaagatcacagcagggccttctgcctgctgaccataacagtgccagcttctttgcagcttcctcttctaccatttcccactacgggcacctaaaagaagcatctctgaccagaagacaaaggcccaaatagcacctgggggagggaagatgcacagaggcacttccagatggcatcgaacagactaaggctctgaaacctaggcctgaacactaaggtctcgagacaccagaggtttctgagccaggagagcctgctggaaaagcagcctgcagagatttgtgaataaagctgattgccttctcaga

SEQ ID NO: 242181 - protein, 322 aa, Artificial Sequence
  derived and/or modified sequence
MDPTISTLDTELTPINGTEETLCYKQTLSLTVLTCIVSLVGLTGNAVVLWLLGCRMRRNAFSIYILNLAAADFLFLSGRLIYSLLSFISIPHTISKILYPVMMFSYFAGLSFLSAVSTERCLSVLWPIWYRCHRPTHLSAVVCVLLWALSLLRSILEWMLCGFLFSGADSAWCQTSDFITVAWLIFLCVVLCGSSLVLLIRILCGSRKIPLTRLYVTILLTVLVFLLCGLPFGIQFFLFLWIHVDREVLFCHVHLVSIFLSALNSSANPIIYFFVGSFRQRQNRQNLKLVLQRALQDASEVDEGGGQLPEEILELSGSRLEQ

SEQ ID NO: 242182 - DNA, 969 bp, Artificial Sequence
  derived and/or modified sequence
atggatccgactatcagtacactggacacggagctgactcccattaatggcactgaggagaccctttgctataagcagactctatctctcaccgtgcttacttgtatcgtcagcctggtgggactcacaggaaatgccgtcgttctgtggctcctgggatgtcgcatgcgacgcaacgctttctccatctacatcttaaacctcgccgccgcggacttcctatttctcagcgggcgcctcatttattccttgctgagcttcatatcaattcctcacaccattagcaagatcctctaccccgtcatgatgtttagctactttgctggactctcatttctgtccgctgtgtccacagagagatgcctgagtgtactgtggcccatatggtacagatgtcacagacctacccatctgtctgctgttgtgtgcgtgctgctgtgggccctgagtctgcttagatctatcctggagtggatgctgtgcggttttctgtttagcggcgctgactccgcgtggtgccagacttcagactttattactgtggcttggctgatatttttatgcgtagtgctttgcgggagttccctggtccttttaatcagaatcctgtgcgggtctagaaaaatccctctgacacgactgtatgtgacgattcttctgaccgtgctggtgttcctgctgtgtggactgccctttggcatacagtttttcctgttcctgtggatccacgtcgatcgtgaagtgctgttctgccacgtgcaccttgtgagtatattcctgtctgccctgaattcatctgccaatcctattatctactttttcgtcggaagcttccgacagcggcagaataggcagaatctgaagctggtgctgcagcgagcactacaagatgcgtcagaggtcgatgaaggaggcgggcaactccccgaagaaatcttggagctgtccggctcacgactagagcagtag

SEQ ID NO: 242183 - DNA, 969 bp, Artificial Sequence
  derived and/or modified sequence
atggaccccaccatcagcaccctggacacagagctgacccccatcaatggaacagaggagaccctgtgctacaagcagaccctgagcctgactgtgctgacctgcatcgtgtccctggtgggcctgactggaaatgctgtggtgctgtggctgctgggctgcaggatgagaagaaatgccttcagcatctacatcctgaacctggccgctgctgacttcctgttcctgagcggccgcctcatctacagcctgctgtccttcatcagcatcccccacaccatcagcaagatcctgtaccctgtgatgatgttctcctactttgctggcctgtccttcctgtctgctgtgtccacagagcgctgcctgtctgtgctgtggcccatctggtaccgctgccaccggcccacccacctgtctgctgtggtgtgtgtgctgctgtgggccctgagcctgctgcggagcatcctggagtggatgctgtgtggcttcctgttcagcggggctgacagcgcctggtgccagaccagtgacttcatcaccgtggcctggctgatcttcctgtgtgtggtgctgtgtggcagcagcctggtgctgctgatccgcatcctgtgtggcagcaggaagatccccctgacccggctgtatgtgaccatcctgctgactgtgctggtgttcctgctgtgtggcctgcccttcggcatccagttcttcctgttcctgtggattcatgtggaccgggaggtgctcttctgccacgtgcacctggtgtccatcttcctgagcgccctgaacagcagcgccaaccccatcatctacttctttgtgggcagcttccggcagaggcagaaccggcagaacctgaagctggtgctgcagagggccctgcaggatgccagcgaggtggatgagggcggcggccagctgcctgaggagatcctggagctgagcggcagccggctggagcagtag

SEQ ID NO: 242184 - DNA, 1197 bp, Artificial Sequence
  derived and/or modified sequence
tagagagaggtcaggcttcagagtcagcaagaactggatttcaaactggatttgaggacccccaccttttgataggtgacttattctctgtgagtctctgatctgccctctttaaatgaggaagtaaatcccacatggcagggtggtggggagaatcagagatcatacagctggtgatcacaactggtttctgtttccagggtcaccagactagggtttctgagcatggatccaaccatctcaaccttggacacagaactgacaccaatcaacggaactgaggagactctttgctacaagcagaccttgagcctcacggtgctgacgtgcatcgtttcccttgtcgggctgacaggaaacgcagttgtgctctggctcctgggctgccgcatgcgcaggaacgccttctccatctacatcctcaacttggccgcagcagacttcctcttcctcagcggccgccttatatattccctgttaagcttcatcagtatcccccataccatctctaaaatcctctatcctgtgatgatgttttcctactttgcaggcctgagctttctgagtgccgtgagcaccgagcgctgcctgtccgtcctgtggcccatctggtaccgctgccaccgccccacacacctgtcagcggtggtgtgtgtcctgctctgggccctgtccctgctgcggagcatcctggagtggatgttatgtggcttcctgttcagtggtgctgattctgcttggtgtcaaacatcagatttcatcacagtcgcgtggctgatttttttatgtgtggttctctgtgggtccagcctggtcctgctgatcaggattctctgtggatcccggaagataccgctgaccaggctgtacgtgaccatcctgctcacagtactggtcttcctcctctgtggcctgccctttggcattcagtttttcctatttttatggatccacgtggacagggaagtcttattttgtcatgttcatctagtttctattttcctgtccgctcttaacagcagtgccaaccccatcatttacttcttcgtgggctcctttaggcagcgtcaaaataggcagaacctgaagctggttctccagagggctctgcaggacgcgtctgaggtggatgaaggtggagggcagcttcctgaggaaatcctggagctgtcgggaagcagattggagcagtgagga

SEQ ID NO: 242185 - DNA, 969 bp, Artificial Sequence
  derived and/or modified sequence
atggaccccaccatcagcaccctggacaccgagctgacccccatcaatggtactgaggaaacgctgtgctacaagcagaccttaagtctcaccgtcctaacttgtatagtgtccttggttgggctcacaggcaatgccgtggtactgtggctgctcgggtgccgtatgcggcgtaacgccttcagtatctacattctcaatctggccgccgcagactttctgttcctgtccgggagactgatatactcactgctgtcgttcatctcaatccctcacaccatttccaaaatcctctatccagtgatgatgttcagttattttgcgggattgtcctttctatctgctgtttccactgagcgctgcctctctgtcctctggcccatttggtacagatgccataggcctactcatctttctgcagtggtatgtgtgctgctgtgggccctctcactgttgcgatctatcctggagtggatgctgtgtggtttcctgttcagcggggctgactctgcatggtgccaaacgtcagattttatcactgtggcttggcttatattcctttgtgttgtgctctgtgggtcttcccttgtgcttcttatccgcatcttgtgcggcagtaggaagattcccttaacccgcctgtatgtgacgattttgctgactgtgctcgtattcctcctttgcggcttgcctttcggcattcaatttttcctctttctatggatacatgttgaccgggaagtcctcttctgccatgtgcatctcgtgtctatctttttgtcagccttaaacagtagtgccaaccccattatttacttttttgtgggaagttttcgtcagagacagaaccgacagaatctgaaattagtgttgcagagggctctgcaggatgcctcagaggtcgatgagggcggcgggcagctgcccgaagagattcttgaactatcagggagtaggctcgaacagtag

SEQ ID NO: 242186 - DNA, 969 bp, Artificial Sequence
  derived and/or modified sequence
atggacccaacaatctcaacccttgacactgagctgactcccatcaacgggaccgaagagacactgtgttataaacagactctcagccttacagtgctcacctgcatcgtcagtctggttggcctcactggaaatgccgttgtgctttggctgttgggttgtaggatgcggaggaacgcctttagcatctatatcctcaatctagcagctgccgactttctgttcctgtccggaaggttaatttattccctcttgagcttcatttcaatcccccacacaatttctaagatactgtaccccgttatgatgtttagctattttgccggactgtcctttctgagcgctgtttcgactgagcgctgtctgtctgttctgtggcctatctggtacagatgtcatcgacccacgcatctgtcagccgtggtctgtgtgctcctgtgggccctctcactgcttaggtcaattttggagtggatgctgtgtggctttcttttttccggagctgacagtgcatggtgccagacaagcgatttcatcacagtggcttggctgattttcctgtgtgtggtactttgtggcagttcactggtgctgctcatcaggatattgtgcggtagcaggaaaattcctttgacaagactctacgtaaccattctgttgacagtgctcgtttttcttctctgcgggctgcccttcggcatacaattctttctgtttctttggatccacgtggaccgggaagtgctcttttgtcacgttcacctggtgtctatctttctgtccgcgttaaactcatccgcaaatcccatcatatatttcttcgtcgggtcgttcagacagagacaaaaccggcagaacctcaaattagtcctgcagcgggctctgcaggatgccagcgaggtagacgaaggcggaggacagctaccggaggagatcctagagctcagtggctcaagacttgaacagtag

SEQ ID NO: 242187 - DNA, 969 bp, Artificial Sequence
  derived and/or modified sequence
atggaccccaccatcagcaccctggacaccgagctgacccccatcaacggcaccgaggagaccctgtgctacaagcagaccctgagcctgaccgtgctgacctgcatcgtgagcctggtgggcctgaccggcaacgccgtggtgctgtggctgctgggctgcagaatgagaagaaacgccttcagcatctacatcctgaacctggccgccgccgacttcctgttcctgagcggcagactgatctacagcctgctgagcttcatcagcatcccccacaccatcagcaagatcctgtaccccgtgatgatgttcagctacttcgccggcctgagcttcctgagcgccgtgagcaccgagagatgcctgagcgtgctgtggcccatctggtacagatgccacagacccacccacctgagcgccgtggtgtgcgtgctgctgtgggccctgagcctgctgagaagcatcctggagtggatgctgtgcggcttcctgttcagcggcgccgacagcgcctggtgccagaccagcgacttcatcaccgtggcctggctgatcttcctgtgcgtggtgctgtgcggcagcagcctggtgctgctgatcagaatcctgtgcggcagcagaaagatccccctgaccagactgtacgtgaccatcctgctgaccgtgctggtgttcctgctgtgcggcctgcccttcggcatccagttcttcctgttcctgtggatccacgtggacagagaggtgctgttctgccacgtgcacctggtgagcatcttcctgagcgccctgaacagcagcgccaaccccatcatctacttcttcgtgggcagcttcagacagagacagaacagacagaacctgaagctggtgctgcagagagccctgcaggacgccagcgaggtggacgagggcggcggccagctgcccgaggagatcctggagctgagcggcagcagactggagcagtag

SEQ ID NO: 242188 - protein, 153 aa, Artificial Sequence
  derived and/or modified sequence
MEVVKFVNFLLVNGFQTAIDIFEDRIRGIDIIKWMERYLRDKTVMIIVAISPKYKQDVEGAESQLDEDEHGLHTKYIHRMMQIEFIKQGSMNFRFIPVLFPNAKKEHVPTWLQNTHVYSWPKNKKNILLRLLREEEYVAPPRGPLPTLQVVPL

SEQ ID NO: 242189 - DNA, 462 bp, Artificial Sequence
  derived and/or modified sequence
atggaggtggtgaagttcgtgaacttcctgctggtgaacggcttccagaccgccatcgacatcttcgaggacagaatcagaggcatcgacatcatcaagtggatggagagatacctgagagacaagaccgtgatgatcatcgtggccatcagccccaagtacaagcaggacgtggagggcgccgagagccagctggacgaggacgagcacggcctgcacaccaagtacatccacagaatgatgcagatcgagttcatcaagcagggcagcatgaacttcagattcatccccgtgctgttccccaacgccaagaaggagcacgtgcccacctggctgcagaacacccacgtgtacagctggcccaagaacaagaagaacatcctgctgagactgctgagagaggaggagtacgtggccccccccagaggccccctgcccaccctgcaggtggtgcccctgtag

SEQ ID NO: 242190 - DNA, 462 bp, Artificial Sequence
  derived and/or modified sequence
atggaggtggttaagttcgtgaattttttactggtcaacggattccagacagccatagacatttttgaggaccgtataagaggtatcgatatcatcaagtggatggagcgctatctccgggacaaaactgtgatgatcattgtggccattagccccaagtacaagcaggatgtggagggcgccgaatcccagctcgacgaagatgagcacggattgcatacaaaatatatccatcggatgatgcaaatcgaattcatcaaacaaggcagtatgaattttcggttcatcccagtgttgttcccaaatgcaaaaaaagaacacgtccctacttggcttcagaacacacatgtgtactcctggcccaagaacaaaaagaacatcctgctccgactgcttagggaagaggagtatgtggccccgccacggggtccactgcctactctccaagtggtcccgctctag

SEQ ID NO: 242191 - DNA, 462 bp, Artificial Sequence
  derived and/or modified sequence
atggaggtggtgaagtttgtgaacttcctgctggtgaatggcttccagacagccatcgacatctttgaagatcgcatccggggcatcgacatcatcaagtggatggagcgctacctgcgggacaagacagtgatgatcatcgtggccatcagccccaagtacaagcaggatgtggagggcgctgagagccagctggatgaagatgagcacggcctgcacaccaagtacatccacaggatgatgcagatcgagttcatcaagcagggctccatgaacttccgcttcatccctgtgctcttccccaatgccaagaaggagcacgtgcccacctggctgcagaacacccacgtgtacagctggcccaagaacaagaagaacatcctgctgcggctgctgcgggaggaggagtatgtggccccaccccggggccccctgcccaccctgcaggtggtgcccctgtag

SEQ ID NO: 242192 - DNA, 462 bp, Artificial Sequence
  derived and/or modified sequence
atggaggtggtgaagttcgtgaacttcctgctggtgaacggcttccagactgccatagatatttttgaagatcggattcgggggatcgatatcatcaagtggatggagagatatttgcgagataaaaccgtcatgataattgttgccattagtccaaagtacaaacaggatgtggaaggagcagagagccagttggacgaggacgagcacgggctgcacactaagtacatccacagaatgatgcagatagagttcatcaagcagggctctatgaatttccggtttatccctgtcctctttcctaacgctaaaaaagaacatgtccccacctggcttcagaacacccatgtgtacagttggcccaagaacaagaagaacattctgcttcggctgctcagggaggaagagtatgtggctccccccagagggcccttaccaacactgcaagttgtgcccctctag

SEQ ID NO: 242193 - DNA, 462 bp, Artificial Sequence
  derived and/or modified sequence
atggaggtggttaaatttgtgaatttcctgctagttaacgggtttcagacagctatcgatatttttgaagacagaattagggggatcgacattattaagtggatggagcggtacctgcgagataaaacggtgatgataatagtagcaatcagtccaaagtataagcaggatgttgagggtgcggagtcccagctggatgaagacgaacatggactgcataccaaatacattcaccggatgatgcaaattgagttcatcaaacaggggtcgatgaacttcaggtttatccccgtgctgttccctaacgcaaagaaagagcatgtgcccacgtggctgcaaaatacccacgtttattcttggccgaagaacaagaagaacatcctgctgagactgctgagggaggaggagtatgtggcaccaccccgagggcctttacccaccttacaggtagtgcccctgtag

SEQ ID NO: 242194 - protein, 339 aa, Artificial Sequence
  derived and/or modified sequence
MWQLWASLCCLLVLANARSRPSFHPLSDELVNYVNKRNTTWQAGHNFYNVDMSYLKRLCGTFLGGPKPPQRVMFTEDLKLPASFDAREQWPQCPTIKEIRDQGSCGSCWAFGAVEAISDRICIHTNAHVSVEVSAEDLLTCCGSMCGDGCNGGYPAEAWNFWTRKGLVSGGLYESHVGCRPYSIPPCEHHVNGSRPPCTGEGDTPKCSKICEPGYSPTYKQDKHYGYNSYSVSNSEKDIMAEIYKNGPVEGAFSVYSDFLLYKSGVYQHVTGEMMGGHAIRILGWGVENGTPYWLVANSWNTDWGDNGFFKILRGQDHCGIESEVVAGIPRTDQYWEKI

SEQ ID NO: 242195 - protein, 110 aa, Artificial Sequence
  derived and/or modified sequence
MWQLWASLCCLLVLANARSRPSFHPLSDELVNYVNKRNTTWQAGHNFYNVDMSYLKRLCGTFLGGPKPPQRVMFTEDLKLPASFDAREQWPQCPTIKEIRDQGSCGSCWL

SEQ ID NO: 242196 - protein, 276 aa, Artificial Sequence [sequence omitted]

SEQ ID NO: 242197 - protein, 245 aa, Artificial Sequence
  derived and/or modified sequence
MPGAGPLSIPCRMSWAFGAVEAISDRICIHTNAHVSVEVSAEDLLTCCGSMCGDGCNGGYPAEAWNFWTRKGLVSGGLYESHVGCRPYSIPPCEHHVNGSRPPCTGEGDTPKCSKICEPGYSPTYKQDKHYGYNSYSVSNSEKDIMAEIYKNGPVEGAFSVYSDFLLYKSGVYQHVTGEMMGGHAIRILGWGVENGTPYWLVANSWNTDWGDNGFFKILRGQDHCGIESEVVAGIPRTDQYWEKI

SEQ ID NO: 242198 - DNA, 1020 bp, Artificial Sequence
  derived and/or modified sequence
atgtggcagctgtgggcctccctgtgctgtctgctcgtccttgccaatgctcgcagcagaccaagctttcaccccctctcggacgagctggtcaactacgtaaataagcggaatacaacttggcaggctggccacaacttttacaacgtggacatgagctaccttaagcgactgtgtggcacattccttggaggacctaagccaccccagcgggtgatgttcaccgaagatctcaagctgcccgcctcttttgacgctcgcgaacagtggccccagtgtccaactattaaggagatccgggatcaagggagctgtggcagctgttgggctttcggcgcagtcgaagccatctctgatcgcatctgtattcatactaatgcacatgtgagcgtggaagtgtcagcggaggatctcctgacctgctgcggcagcatgtgtggcgatggttgtaacgggggctacccagccgaggcttggaacttttggacacggaagggtcttgtgtccggaggactgtatgagtcacacgtggggtgccgcccttattcaatacccccatgtgaacaccatgtgaacggcagccgccctccatgtacaggagagggcgacacccctaaatgcagcaagatttgtgagcccggttattccccaacttacaagcaggacaagcactatggatataattcatactccgtgtccaattctgaaaaggacatcatggcagaaatctacaaaaatggtcccgtggagggggcattcagtgtctactccgatttcctgctgtacaagtctggtgtctaccagcatgtgaccggagaaatgatgggcggccacgcaatcaggatcctgggatggggagtggaaaacggcacgccgtattggctggtggcgaactcctggaacacagactggggtgacaatggcttttttaaaatcctgagaggtcaagatcattgcggcatcgaaagcgaagtagtggccggcatccctcgtaccgaccagtactgggagaaaatctag

SEQ ID NO: 242199 - DNA, 1020 bp, Artificial Sequence
  derived and/or modified sequence
atgtggcagctatgggcatctttgtgttgtcttctggtgctagccaatgcccgttcgcgacctagtttccatcccctgagcgacgagctggtaaactatgtgaataagagaaacaccacgtggcaggctgggcataatttctacaacgttgacatgtcttatttgaagcggctttgcggtacattcctggggggcccaaagcccccccagcgggtgatgttcactgaagatctgaaactgcccgcttcttttgacgcccgtgagcagtggccgcaatgccccacgatcaaagaaatcagggatcagggttcatgtgggagctgctgggcttttggcgctgtggaggctatttctgaccggatttgcatccatactaatgcccatgtctctgtggaagttagtgcagaggacctacttacgtgctgcggttcaatgtgcggcgatggttgcaatggaggctatcccgcagaagcttggaacttctggacccgcaaagggcttgtgagtggcggcctctacgaatcgcatgtaggatgccgcccatacagcatcccgccttgtgagcaccacgtaaacgggagtcggcccccttgcaccggcgagggtgatacccccaaatgcagtaaaatctgtgaacctggctacagtccaacctacaaacaggacaagcactatggatacaattcttactcagtgtctaactccgagaaggatatcatggccgaaatctataagaatggcccggtggagggggcttttagcgtgtattcggactttctgctctacaagagcggcgtgtaccaacacgtgactggggagatgatgggagggcacgcaattcggattttgggatggggagtggagaacgggaccccctactggcttgtcgccaattcatggaataccgactggggggataatggcttctttaaaatacttcgcggccaggaccactgcgggatcgagtctgaggttgtggcaggtatcccaagaacagaccaatactgggagaagatttag

SEQ ID NO: 242200 - DNA, 333 bp, Artificial Sequence
  derived and/or modified sequence
atgtggcagctgtgggcttcactgtgctgcctactcgttctagctaacgccagaagcaggcccagctttcaccctttaagcgacgagcttgtcaactacgtgaataaaaggaacaccacctggcaggccggccataacttctataatgtggatatgtcctaccttaaaaggctgtgtggtacttttctcggtggacccaaacccccccagcgcgtcatgttcacagaggacctgaaactaccggcaagttttgacgctagagagcagtggccacagtgtcctacaattaaagagatccgagatcagggatcctgcgggagctgttggctctag

SEQ ID NO: 242201 - DNA, 1020 bp, Artificial Sequence
  derived and/or modified sequence
atgtggcagctgtgggccagtctgtgctgccttctggtgcttgcgaatgctagatcccgcccatcatttcaccctctttctgatgagctcgtcaattacgtcaacaagagaaacacaacatggcaggcaggacacaacttctataatgtggatatgtcatatctcaagcgcctctgcggcacgtttttaggaggaccaaagcctccgcaacgcgtcatgtttactgaagacctcaagctcccggcttctttcgacgcacgcgagcagtggccacagtgtcctacaattaaagaaatccgcgatcaaggctcctgtgggagctgctgggccttcggcgcagtcgaagctattagcgacaggatctgcatccatacaaacgcacacgtgtcagtggaagtctctgccgaggatttgctgacatgctgtggctcaatgtgcggagatggctgtaatggagggtacccagctgaggcctggaacttttggacccgaaaaggcctagtaagtggcggactatatgaaagccatgtgggttgcagaccttattctatccctccctgtgagcatcatgttaatggaagtcggccgccttgcacgggagagggtgatactcccaagtgttccaaaatttgtgaacctggctactccccaacttataaacaggataagcattatggctacaacagttacagcgtttctaactctgaaaaagatattatggccgaaatttataagaatggacctgtggaaggcgctttttctgtgtactccgattttctgctctacaaaagcggagtgtaccagcacgtcaccggagagatgatgggcggacacgctatcagaattttgggctggggagtagaaaacggtacgccttactggctggtcgcgaacagttggaatacagactggggggataatggcttctttaagatcctgagaggtcaagatcattgcgggattgagtctgaagtcgtcgccggaataccgcgaaccgaccagtattgggagaagatctag

SEQ ID NO: 242202 - DNA, 1020 bp, Artificial Sequence
  derived and/or modified sequence
atgtggcagctttgggcctccttgtgctgcctcctggtcctggcaaatgctcgctcccgtccgagttttcacccgctgtccgatgagctggttaattatgttaacaagagaaatacaacttggcaggctggccataacttctacaatgtagacatgagctatttgaaacggctttgtgggacatttctgggaggccccaagcccccacaaagggtcatgttcactgaggatctcaaattaccagctagcttcgatgcaagagagcaatggcctcagtgccctactatcaaagagattagggatcaagggtcatgcggctcatgctgggccttcggcgctgtggaagctatctctgatagaatctgcattcacactaacgcccacgtctctgtcgaagtgagtgccgaggacctgctcacttgttgtggaagcatgtgtggagatggttgcaatggggggtaccctgctgaggcgtggaatttctggactcgcaagggtttggtatctgggggcctttatgagtctcacgtcggttgtcgaccctattccatccctccctgcgaacaccatgtgaacggatcacgtcctccctgcactggcgaaggcgatacacctaagtgcagcaagatttgcgaaccggggtattcacctacttataaacaagataaacattatggttataacagttatagcgtgtcaaattctgagaaggacatcatggcagagatctacaaaaatggacccgtggaaggcgcctttagtgtgtactctgatttcttactgtataaaagtggcgtgtaccagcatgtcaccggcgaaatgatgggagggcacgcaattagaatcctgggctggggcgttgaaaacggtaccccgtactggttagtcgcaaactcctggaatactgattggggcgacaatggtttctttaaaatccttcggggacaagaccattgtgggatcgagtccgaagtcgtcgcaggtattccccggactgatcaatactgggagaaaatctag

SEQ ID NO: 242203 - DNA, 1020 bp, Artificial Sequence
  derived and/or modified sequence
atgtggcaactctgggcctccctgtgttgcctgctggtcctcgccaacgccaggtctaggcccagctttcaccccctcagcgacgaactcgtaaactacgttaataaaaggaatactacctggcaggctgggcataacttctataatgtggatatgtcatatctgaaacggctctgtggtacctttctggggggcccaaaaccaccacaacgcgtgatgtttaccgaggacctgaaattaccggcctcttttgatgcccgggagcagtggccacagtgcccgactatcaaagaaatccgggatcaaggatcatgcggctcatgctgggccttcggggccgtcgaagctatctctgaccggatctgtatccacactaacgctcatgtgagcgtcgaagtgagcgccgaggatctactaacctgctgtgggagtatgtgcggggatgggtgcaatggaggttatccagcggaagcttggaatttctggacccgaaagggtctggtcagtggcggactgtacgagtctcatgtgggatgccgcccatacagcattcctccatgtgagcatcacgtaaacggtagccgcccaccctgcactggagagggagacactccaaaatgcagcaagatctgcgagcctggctacagccctacctataaacaggacaagcattatgggtataactcatattcagtcagtaactcagagaaagatataatggctgagatttacaagaacggaccggtggagggggccttctctgtgtactctgacttcctcctgtacaaatctggggtttatcaacatgtcacgggggaaatgatgggaggccatgcaatcaggattctcggatggggcgtggaaaacggcactccctactggctagtcgctaatagctggaatacagactggggagacaacgggttctttaaaatcctgagggggcaagatcactgcgggattgaatccgaagtagtcgccggaataccacggaccgatcagtattgggagaaaatctag

SEQ ID NO: 242204 - DNA, 1020 bp, Artificial Sequence
  derived and/or modified sequence
atgtggcaactctgggcatctctttgttgtctgcttgtactagctaatgctcggagtcggcccagctttcaccccttatcagacgagttagtcaattatgttaataagagaaatacaacctggcaggctggccacaatttctacaacgtcgatatgtcatatctaaagcgcttgtgcgggacattcctaggaggccctaaaccccctcagcgggtgatgtttacggaggatctcaagctgcccgccagtttcgatgcccgtgagcagtggccacagtgccctacgataaaggagataagagatcagggatcctgtggaagttgttgggcatttggggctgtggaagccatctcggatagaatatgcatccacaccaacgcccacgtttctgtggaggtctcggccgaagaccttctgacttgctgcggctcaatgtgtggcgacggatgtaacggtgggtaccccgccgaggcttggaacttttggactagaaagggacttgtctccggcggcttgtacgaaagccacgtgggctgccggccttactctattcctccttgcgagcatcatgtaaatggctcccgccccccctgtactggcgagggggacacaccaaagtgctctaaaatctgcgagcccggttacagccccacatacaaacaggataaacattatggatacaacagctactccgtctccaacagcgagaaggacatcatggccgagatctacaagaatgggccggtggaaggcgcattctccgtgtatagcgatttccttttgtataagtcaggtgtgtatcagcacgtaaccggagagatgatgggaggtcatgcaataaggatcctcggctggggcgtcgaaaacggcactccctattggcttgtcgccaatagctggaatactgattggggagacaatggatttttcaaaattctccgcgggcaggaccactgcggaatcgagagtgaggtggtggcgggaattcctcgaaccgatcagtactgggagaagatttag

SEQ ID NO: 242205 - DNA, 1020 bp, Artificial Sequence
  derived and/or modified sequence
atgtggcaactgtgggcatcactctgttgccttctggtactcgccaatgcacgctccagacctagctttcacccgctgtcagatgagctggtgaattatgtaaacaagagaaatacaacatggcaggctgggcataacttctataacgtggatatgtcctaccttaagcggttgtgtggaacctttttgggcgggcccaaaccacctcagcgtgttatgttcaccgaggatctaaagctgcccgcatcattcgatgctagggagcaatggcctcagtgcccgacaattaaggaaatcagagatcaaggctcgtgcggatcctgctgggcattcggcgccgtggaggctattagcgaccggatctgtattcacacaaatgctcacgtctccgttgaggttagcgccgaggacttgttaacttgttgcgggtcgatgtgcggagatggatgtaacgggggttaccccgcggaggcctggaacttctggacccggaagggccttgtgtcagggggattgtacgaaagccatgtgggatgccggccctattccatccctccctgcgagcaccatgtgaatggcagccggcccccatgcacaggcgaaggtgacaccccaaaatgttccaagatctgtgagcctgggtatagtcctacatacaagcaggacaagcactacggctataatagctacagtgttagcaacagcgaaaaggacattatggccgaaatctataagaacgggcctgtggaaggggcattttccgtttattccgattttttactctacaagagcggagtgtaccagcatgtgaccggcgaaatgatggggggccatgcaataaggatcttaggatggggcgtggagaacgggaccccctattggcttgttgctaacagctggaacacagactggggggacaatggcttctttaaaatcctcaggggacaggatcattgtggaatcgagtcagaggtcgtggcaggaattcctcgaactgatcagtactgggagaagatttag

SEQ ID NO: 242206 - DNA, 1020 bp, Artificial Sequence
  derived and/or modified sequence
atgtggcagctttgggctagtctttgctgtctgctcgttctggctaacgctagatccaggccttcctttcatcccctctctgatgagttggtgaattacgtaaataaaagaaacactacatggcaggcaggacataacttctataacgtggatatgagttacctgaaacgactgtgcggcacgttcctcggcgggccaaaacccccacaaagagtaatgttcactgaggatcttaaactgcccgcgtccttcgacgctagggagcaatggccccagtgcccaaccatcaaggaaatccgtgatcagggctcatgcggtagctgctgggccttcggcgccgtcgaggccatttccgacagaatttgtattcacacgaacgctcacgtgagcgtggaagtatccgctgaggatttgctgacttgttgtggttccatgtgcggagacggctgtaacggaggttacccagcagaggcttggaacttctggacaaggaagggcctagtctcaggaggattgtacgagagccatgtaggatgcaggccctacagcatacccccttgcgaacaccatgttaacgggtccagacctccctgtacgggggagggagatacaccgaagtgctcaaaaatttgcgagccggggtactcccccacctacaaacaggacaaacactacggctacaacagttactctgtgagcaattccgagaaagatatcatggctgaaatatataagaacggcccggtagagggtgccttcagtgtgtatagcgacttcctgctgtacaagagtggtgtttaccagcacgtcaccggagagatgatggggggtcatgccattagaatccttggttggggagtggaaaatgggacaccttattggctcgttgcaaactcgtggaacaccgattggggtgacaatggattcttcaaaattctaaggggccaggaccactgtggcatcgagtctgaagtcgtcgccggcatcccacggaccgaccaatattgggaaaagatttag

SEQ ID NO: 242207 - DNA, 738 bp, Artificial Sequence
  derived and/or modified sequence
atgcccggcgcaggccccttgtctatcccgtgtagaatgagctgggcatttggcgcagtggaagcaattagcgatcgcatctgtatccataccaatgcacatgtctcagtagaggtctctgccgaggatcttcttacatgttgtggcagcatgtgtggcgacgggtgcaacggagggtacccagcagaggcttggaatttctggacccgaaaggggttggtaagtggcggtctatatgaatcccacgttggctgtcgaccgtatagcattccaccgtgcgaacaccacgtgaacggttcccgcccaccctgcaccggagaaggagatacgcctaaatgtagtaagatatgcgagcccgggtactcccccacgtataagcaggataaacactatgggtacaattcatattcagtgtctaactccgagaaggacatcatggccgagatttacaagaacgggcccgtggagggagccttcagtgtgtactctgacttcctgctttataagtccggcgtgtaccaacatgtgaccggggagatgatgggcggtcatgcaattcggattctcggctggggcgtcgagaacggaacaccttactggctcgtcgccaattcctggaataccgattggggcgacaatggtttcttcaagatccttcgggggcaggaccactgcgggatcgagtcggaagtggtcgccgggattccacgaacagaccagtattgggagaagatctag

SEQ ID NO: 242208 - DNA, 1020 bp, Artificial Sequence
  derived and/or modified sequence
atgtggcagctgtgggccagcctgtgctgcctgctggtgctggccaatgcccggagccggcccagcttccaccccctgagtgatgagctggtgaactacgtgaacaagaggaacaccacctggcaggccggccacaacttctacaacgtggacatgagctacctgaagaggctgtgtggcaccttcctgggcggccccaagccaccccagagggtgatgttcacagaggacctgaagctgcctgccagctttgatgcccgggagcagtggccccagtgccccaccatcaaggagatccgggaccagggcagctgtggcagctgctgggcctttggagctgtggaggccatcagtgaccgcatctgcatccacaccaatgcccacgtgtctgtggaggtgtctgctgaggacctgctgacctgctgcggctccatgtgtggagatggctgcaatggaggctacccagctgaggcctggaacttctggaccaggaagggcctggtgtctgggggcctgtatgagagccacgtgggctgccggccctacagcatccccccctgtgagcaccacgtgaatggcagccggcccccctgcacaggagagggggacacccccaagtgcagcaagatctgtgagcccggctacagccccacctacaagcaggacaagcactacggctacaacagctacagcgtgagcaacagcgagaaggacatcatggccgagatctacaagaatggacctgtggagggcgccttctctgtgtacagcgacttcctgctgtacaagagcggcgtgtaccagcacgtgactggagagatgatgggcggccacgccatccgcatcctgggctggggcgtggagaatggcaccccctactggctggtggccaacagctggaacacagactggggagacaatggcttcttcaagatcctgcggggccaggaccactgcggcattgaaagtgaggtggtggccggcatccccaggacagaccagtactgggagaagatctag

SEQ ID NO: 242209 - DNA, 333 bp, Artificial Sequence
  derived and/or modified sequence
atgtggcagctgtgggccagcctgtgctgcctgctggtgctggccaatgcccggagccggcccagcttccaccccctgagtgatgagctggtgaactacgtgaacaagaggaacaccacctggcaggccggccacaacttctacaacgtggacatgagctacctgaagaggctgtgtggcaccttcctgggcggccccaagccaccccagagggtgatgttcacagaggacctgaagctgcctgccagctttgatgcccgggagcagtggccccagtgccccaccatcaaggagatccgggaccagggcagctgtggcagctgctggctgtag

SEQ ID NO: 242210 - DNA, 738 bp, Artificial Sequence
  derived and/or modified sequence
atgcctggggccggccccctgagcatcccctgcaggatgtcctgggcctttggagctgtggaggccatcagtgaccgcatctgcatccacaccaatgcccacgtgtctgtggaggtgtctgctgaggacctgctgacctgctgcggctccatgtgtggagatggctgcaatggaggctacccagctgaggcctggaacttctggaccaggaagggcctggtgtctgggggcctgtatgagagccacgtgggctgccggccctacagcatccccccctgtgagcaccacgtgaatggcagccggcccccctgcacaggagagggggacacccccaagtgcagcaagatctgtgagcccggctacagccccacctacaagcaggacaagcactacggctacaacagctacagcgtgagcaacagcgagaaggacatcatggccgagatctacaagaatggacctgtggagggcgccttctctgtgtacagcgacttcctgctgtacaagagcggcgtgtaccagcacgtgactggagagatgatgggcggccacgccatccgcatcctgggctggggcgtggagaatggcaccccctactggctggtggccaacagctggaacacagactggggagacaatggcttcttcaagatcctgcggggccaggaccactgcggcattgaaagtgaggtggtggccggcatccccaggacagaccagtactgggagaagatctag

SEQ ID NO: 242211 - DNA, 1020 bp, Artificial Sequence
  derived and/or modified sequence
atgtggcagctgtgggccagcctgtgctgcctgctggtgctggccaatgctcgatccagaccttctttccaccctctttccgacgaactggtgaattacgtgaacaaaagaaacacaacatggcaagctggtcacaatttttataacgtggatatgtcctatctgaagcgcctatgtgggacctttctgggtggcccaaaacctccacagagagtgatgtttacagaggatttgaagcttcccgccagtttcgacgctagggagcaatggccacagtgtcctactattaaggagattcgggatcagggcagctgtggcagttgctgggcctttggtgccgttgaagccatctcagaccgaatctgtatccataccaatgctcatgtgtccgtcgaggtgagtgcggaagatctcttgacatgttgcggcagtatgtgtggcgacggctgtaacggaggataccctgcagaggcctggaacttctggaccagaaaaggactcgtctctgggggattgtacgagagccacgtcggctgccggccttattccattcccccgtgcgagcatcacgttaacggtagcaggcctccttgtacaggtgaaggggatacgcccaagtgtagtaagatatgcgagcctggctattcacctacttataagcaagataaacactacggttataattcttactccgtgtcgaactcggagaaggacatcatggccgaaatctacaagaacggccccgtcgaaggggctttttccgtttattcagacttccttctttataaaagtggagtgtaccagcacgtgacaggggaaatgatgggcggccacgcaatacggatcttgggatggggcgtggaaaacgggaccccttactggctggtggcaaactcctggaacaccgactggggtgacaatggattttttaaaatactcagaggacaggatcactgcggtattgagtccgaagtggtagctggcatcccccgtaccgatcagtactgggagaaaatctag

SEQ ID NO: 242212 - DNA, 1020 bp, Artificial Sequence
  derived and/or modified sequence
atgtggcagctgtgggccagcctgtgctgcctgctggtgctggccaacgctcggtctcgaccttcctttcaccctttatcagacgagctcgtaaactacgtgaacaaacgtaacacgacctggcaagccggtcacaacttttacaatgttgatatgtcgtacctcaagcgcctgtgcggaacctttcttgggggtcccaagccccctcaacgagtgatgtttacagaggatctaaaattgcccgcatcgtttgacgcacgggaacaatggccacagtgccccactattaaggaaatccgggatcagggatcatgtggaagctgctgggccttcggggccgtggaggcaatatccgatcgaatctgtatacacacaaatgctcatgtgtctgttgaagtgtcagccgaagatctgctcacttgctgcggatcgatgtgtggtgatggctgcaacggaggctatccagctgaggcttggaatttctggacacggaaaggcctggtgagtggcggcttgtacgagagccacgtcggctgtagaccctactcgatccccccttgcgagcaccacgtaaatgggagtagacctccatgtaccggggagggagacactccgaagtgttcaaagatctgcgagccaggttattcaccaacatacaagcaggataagcattatggctacaattcctactcagtgtcaaattccgagaaggatataatggctgagatttataaaaatggaccggtggagggggctttttcagtgtactccgacttcctgctctacaagtcgggtgtgtaccaacacgtcaccggggagatgatgggcggtcacgcaattaggatcctgggctggggggtcgagaacgggactccatactggctagtggccaactcctggaacacagattggggcgataacgggttctttaaaatacttagaggccaagatcactgcggcatagaatctgaggtggtcgccgggatacccaggacggaccagtattgggaaaaaatatag

SEQ ID NO: 242213 - DNA, 333 bp, Artificial Sequence
  derived and/or modified sequence
atgtggcagctgtgggccagcctgtgctgcctgctggtgctggccaatgctcgctccagaccttcttttcacccactgtccgacgagctggttaattatgttaacaagagaaatactacatggcaggcaggacataatttctacaatgtcgatatgtcctatctgaagaggctgtgtggtacctttctaggggggcccaagccccctcagagagtaatgttcaccgaagatctaaagctgccagcctcctttgacgctcgggaacagtggccccagtgccctacgattaaagaaattcgagaccagggtagctgtggctcttgctggctgtag

SEQ ID NO: 242214 - DNA, 1020 bp, Artificial Sequence
  derived and/or modified sequence
atgtggcagctgtgggccagcctgtgctgcctgctggtgctggccaacgcccggtctagaccctcatttcatccattaagcgacgagttagtgaactacgtgaataagcgtaatacaacttggcaggccgggcataatttttacaatgtagatatgagctatctgaagcgcctttgcgggacatttctgggtggacctaagccacctcagcgagtgatgttcaccgaggacttaaaactccccgcctctttcgatgcacgcgagcagtggccccagtgccctacaatcaaagagatccgcgatcagggatcttgtgggtcatgctgggcatttggcgctgtggaagctatttcggatcgcatttgtatacacaccaatgcccatgtgtccgtcgaggtatcagcggaagacctgcttacctgttgcggctcaatgtgtggggacggctgtaacggcggctaccccgctgaagcgtggaacttttggacacgtaaaggactcgtgagcggggggctgtacgagtctcacgtgggctgtcggccttattctatccctccctgtgaacaccatgtaaacggctccaggcctccctgtaccggggagggagatacacccaagtgctctaagatttgcgagcctggatatagccctacttacaagcaggacaaacactacgggtataattcctacagcgtatcgaatagtgaaaaggacatcatggccgagatttataagaacggccctgttgagggcgccttcagtgtttacagcgattttcttctttacaaaagcggggtctaccagcatgtgactggtgagatgatggggggacatgcgatccggatcctgggctggggtgtggaaaacgggaccccctactggttagtggccaattcttggaacaccgactggggcgacaacgggttctttaaaatcctgagagggcaagatcactgtgggatcgaatctgaggtggtagcaggcatcccgaggacagaccagtactgggagaaaatctag

SEQ ID NO: 242215 - DNA, 1020 bp, Artificial Sequence
  derived and/or modified sequence
atgtggcagctgtgggccagcctgtgctgcctgctggtgctggccaacgccaggagtcgcccaagttttcatcccctctccgacgagcttgttaactacgttaacaagagaaacaccacctggcaggcaggccataacttctacaatgtggatatgtcctacttgaaaaggctctgtggcaccttcctcggcgggcctaagccaccgcagcgggtgatgttcacagaagatctgaagttgcctgcatcatttgacgcgcgcgagcagtggccccaatgtcctaccattaaggagattcgcgaccagggctcctgtggctcctgctgggccttcggcgccgtcgaagctattagtgatagaatctgtatccataccaatgctcatgtgagtgtggaagtgagcgcagaggatctcctgacctgttgtggatcgatgtgcggggacggatgcaacggcgggtaccctgccgaggcttggaatttctggacccgcaaggggctggtgagcggaggtttatacgagtcacacgttgggtgtcggccttacagcatccctccttgcgaacatcatgtgaatggatccagacctccatgcactggcgaaggcgatacccctaaatgcagcaagatatgcgaaccaggctattccccgacttataagcaggacaagcattacgggtataatagctactcagtgtctaattcggagaaggacatcatggccgaaatctataagaacggacccgtggagggcgcattttctgtgtactccgatttcttgttatacaaatctggcgtgtaccagcatgtgaccggcgaaatgatggggggacatgctattcgtattctgggatggggcgtggagaatggcaccccttattggctggttgcgaactcctggaataccgattggggggacaatggtttcttcaaaattctgagaggccaggatcactgcggtatcgagtccgaggttgttgctgggattccaagaaccgaccaatactgggagaaaatatag

SEQ ID NO: 242216 - DNA, 1020 bp, Artificial Sequence
  derived and/or modified sequence
atgtggcagctgtgggccagcctgtgctgcctgctggtgctggccaacgctagatctcgtccttcatttcatcccttgtcagatgaattagttaactatgtaaataagcgaaatacaacgtggcaagccggccacaacttctataatgtcgatatgtcctaccttaagcgcctgtgtgggacttttttaggaggccccaaacctccccagcgggtcatgtttaccgaagatttaaaactcccggcttcattcgacgcccgagaacaatggccacagtgcccgaccattaaggagatacgcgatcaaggcagctgcggtagctgttgggccttcggtgccgtggaagcaatttccgatcgaatttgcatacataccaatgcccacgtgagcgtcgaggtgagtgccgaggacttgctcacatgttgcggctcaatgtgcggcgacggctgcaatggcggatatcctgctgaagcctggaacttctggactaggaagggcctcgtcagcggaggactttacgagtcccatgtgggctgccggccgtatagcattccgccatgtgagcaccatgtaaacgggtcaaggcccccttgtacaggcgaaggagacacacctaaatgtagcaagatctgtgaaccagggtatagccctacctataaacaggataagcactacggatacaattcttatagtgtgagcaactctgagaaagacatcatggccgagatctacaagaacggccccgtcgagggcgcgttttccgtgtattcagatttcctgctgtacaaatcaggagtgtaccaacatgtgactggagaaatgatgggtggtcacgcaattagaattttgggttggggcgttgagaacgggacaccttattggctggttgcgaatagctggaacacggactggggcgacaatggcttcttcaaaatcttgaggggccaagaccactgcggtatcgagtctgaggtggtggctggaatacctaggaccgatcagtactgggagaagatctag

SEQ ID NO: 242217 - DNA, 1020 bp, Artificial Sequence
  derived and/or modified sequence
atgtggcagctgtgggccagcctgtgctgcctgctggtgctggccaacgcacgcagccggccatcattccaccctctgagcgacgagctggtcaattatgtaaacaaacgaaacactacatggcaggcaggacacaacttctacaatgtcgacatgagctacctcaaaagactttgtgggacttttctgggaggccccaaacccccccagcgtgtgatgttcactgaggatcttaagttgcccgcaagcttcgatgctagagagcagtggccacagtgccccaccatcaaagaaattcgggaccagggctcttgtgggagctgttgggcctttggcgctgtggaggcaatatctgaccgtatttgtattcacacgaatgcacatgtttccgttgaagtatctgctgaggacctcttgacttgttgtggctccatgtgcggtgacggatgtaacggcggatacccagctgaagcctggaatttctggacccgcaaggggcttgtttctggtggcctttacgaatcgcacgttggttgtcggccctactcaatcccgccgtgcgaacatcatgttaatggaagtaggccgccatgcacgggcgaaggcgacacacctaagtgttctaagatctgcgaaccgggatactcaccgacctataaacaggataagcattacggatataatagttattccgtgtcgaacagtgagaaggacatcatggccgagatctacaaaaacggacccgtcgagggcgctttttccgtttatagtgattttttactttacaagagcggcgtctaccagcatgtcacaggagagatgatgggcgggcacgcgatcaggatactcgggtggggtgtggaaaacggcactccttattggctcgtagctaactcatggaacacagactggggcgacaacggctttttcaaaatcctcagggggcaagatcactgcggcatcgaaagcgaagtggtcgcagggatcccccggacagaccagtattgggaaaaaatttag

SEQ ID NO: 242218 - DNA, 1020 bp, Artificial Sequence
  derived and/or modified sequence
atgtggcagctgtgggccagcctgtgctgcctgctggtgctggccaacgcccgctcaaggccctctttccatccactgagtgacgagctcgtcaactacgtcaacaagagaaataccacatggcaggctggccacaatttctacaacgtcgacatgagttatttgaaacgcctgtgtggcaccttccttggtggtcccaagcctccccagcgcgtgatgttcaccgaggacctgaagttacctgccagcttcgacgccagagaacaatggccacagtgccctacaattaaagagattcgagaccaaggaagttgcgggtcctgctgggcctttggggccgtcgaggcgataagtgaccggatatgcattcataccaacgcacatgtaagcgtggaggtgtccgctgaagatctcttgacctgctgtggctccatgtgcggcgacggctgtaacggggggtaccctgcagaagcttggaatttttggacgaggaagggcctagtctccggaggcctgtacgagtcacacgtgggctgccgtccctatagtattcctccttgcgagcatcacgtgaacggcagcagaccgccttgtactggagaaggtgacacaccaaagtgttccaagatctgcgagccgggctattctcctacatacaagcaagataaacactatggctacaattcctatagcgttagcaatagcgagaaagatataatggccgagatttataagaatggacccgtcgaaggcgcgtttagcgtgtactctgactttctgttgtataagagcggggtgtaccagcatgtgacaggcgaaatgatggggggccacgccatcagaatacttggatggggagtggaaaatgggactccatactggcttgtggctaattcttggaacaccgactggggcgataatggctttttcaaaatcctcagggggcaagaccattgtggcattgaaagtgaagtggtggcagggatcccacgcacagaccagtactgggaaaaaatctag

SEQ ID NO: 242219 - DNA, 1020 bp, Artificial Sequence
  derived and/or modified sequence
atgtggcagctgtgggccagcctgtgctgcctgctggtgctggccaacgcccgcagccggcccagctttcacccgttgagcgatgagctcgttaactacgttaacaagcgcaatacaacttggcaagccggacacaatttctataacgtagatatgtcgtacctgaagagactctgtggtacgtttttgggcggcccgaagcctccccaacgcgtaatgtttactgaggacctgaagttacctgccagtttcgacgccagagaacagtggcctcaatgccccacaatcaaggaaattagggatcaaggaagctgcgggtcatgctgggcctttggggctgttgaagccatttccgaccggatatgtattcacaccaatgcacatgtatccgtagaggtgtccgcagaagatctgctgacctgttgcggttcaatgtgtggtgatggatgtaatggcggctatccagccgaggcgtggaatttctggacccggaaggggcttgtgagcggagggctctacgaatctcacgtggggtgcaggccttactctattccgccttgcgaacatcatgtgaatggtagcagacccccctgcaccggggagggcgacaccccgaagtgttccaaaatctgcgaaccaggctattcccccacctataagcaggacaaacattacggatataacagttattctgtctccaacagcgaaaaggatattatggccgaaatctacaagaacggaccagtcgaaggagccttcagcgtttattcggattttctgttgtataagagcggggtttatcaacatgtgacaggcgagatgatgggagggcacgcaattcggatactgggctggggcgtggagaacggcaccccctattggctggtagcgaacagttggaacacggattggggcgacaacgggttcttcaaaatccttcgagggcaggatcactgcggcatcgaatctgaagtcgtcgcaggaatcccaagaacagaccagtactgggagaagatttag

SEQ ID NO: 242220 - DNA, 738 bp, Artificial Sequence
  derived and/or modified sequence
atgcccggcgccggccccctgagcatcccctgccggatgagctgggctttcggtgctgttgaagccatctctgatagaatttgtattcacactaatgctcacgttagtgtcgaggtgagcgctgaggacctgctgacctgctgcggctctatgtgcggcgacggatgtaatggtggctaccccgctgaggcctggaatttttggactcgtaagggcttggtgtcagggggactctacgaatcacacgtcgggtgtcgcccatattccatccctccttgcgagcaccacgtgaacgggagcagacccccatgtacaggcgagggcgacactccaaaatgtagcaaaatctgtgaaccaggctactcacccacttataagcaagacaaacattatggctacaactcctatagcgtgagcaattccgaaaaagatataatggcggaaatttacaaaaacggaccggtcgaaggcgctttttccgtgtactctgatttcctcctgtacaagtctggcgtatatcaacacgtgaccggagaaatgatgggaggtcacgccatcaggattctcggatggggcgtcgaaaatgggactccctactggctggtagctaacagttggaacaccgactggggcgacaatgggttcttcaagattttgcggggccaggatcactgtggaatcgagtcagaggttgtggctggtatacctaggaccgaccagtattgggaaaagatttag

SEQ ID NO: 242221 - DNA, 1020 bp, Artificial Sequence
  derived and/or modified sequence
atgtggcaattgtgggcctccctctgttgtctgctggtgttggccaacgccagaagtagacccagctttcaccccctgagtgatgaactcgtgaattacgtgaacaagaggaatacgacatggcaagcaggacacaatttctataatgtggatatgtcctatctgaagcgactctgtggcacctttctcgggggtccaaagccaccacaacgggttatgttcacagaggatctcaaactcccagcgagcttcgacgcccgagagcagtggcctcagtgccccaccatcaaggaaattagagaccagggatcttgtgggtcttgctgggctttcggggctgtggaagcaatctcggacaggatctgcatccataccaatgctcacgtcagcgttgaggttagtgctgaggatctgcttacttgctgcggatccatgtgcggggatggctgcaacggcggataccctgcagaggcatggaacttttggacacgaaagggcctggtcagcggtggcttatacgagagtcacgtcggctgtagaccatattctattccaccttgcgaacatcacgtaaacgggtctagacctccttgcacgggagagggagacacgccaaagtgttcaaagatttgtgaacctgggtattccccaacatataagcaggacaagcactatggctacaattcctattccgtgtcgaacagtgagaaggacattatggcagagatatacaagaatgggccagtggagggagcattcagcgtctactctgactttctgttgtacaagagtggtgtctaccagcacgtgacaggagagatgatggggggacacgcaatccggatcctgggatggggagtggaaaatggcacaccctactggttagtagcaaacagttggaacaccgattggggtgacaatgggttcttcaaaattctgcgcggacaagatcactgtggtattgagagtgaagtggtggctggcatcccacgtaccgatcagtattgggagaagatctag

SEQ ID NO: 242222 - DNA, 1020 bp, Artificial Sequence
  derived and/or modified sequence
atgtggcaactgtgggcatctctgtgttgtctcctcgtactggccaatgccagaagcagaccttctttccaccccctgtcggatgagctggttaactacgtgaataagcggaatactacatggcaggctggtcacaatttttataacgttgatatgagctacttaaagagactatgtggcacctttctgggtgggcctaagcctccccagcgggtgatgttcactgaggacctcaagctgcctgcgagctttgacgccagggaacagtggcctcagtgccccactatcaaggaaattcgcgaccaggggtcatgcgggagctgttgggccttcggcgctgtcgaagcgattagcgatcgtatatgtatccataccaacgcccatgtatcggtggaagtctccgctgaggatctgctgacatgctgtggcagcatgtgtggggacggctgcaatgggggttacccagccgaagcctggaacttctggaccagaaaggggctcgtgagcggcggtctgtacgagtcccatgtggggtgtcgcccttacagtatcccaccatgtgagcaccatgtgaacggaagtcgtccaccctgcacgggcgaaggtgatacacccaagtgcagcaaaatttgtgaacccggatatagcccaacctataagcaggataagcactacggatataactcttattctgtgtccaactctgagaaagatatcatggcagaaatttataagaacgggcctgtcgaaggagcatttagtgtctactcggacttcctgctttacaagtccggtgtctaccagcacgttacaggagagatgatgggcggacacgccatcaggatcctgggatggggtgttgagaacgggaccccgtattggttggtagccaacagttggaatacagactggggcgataatggctttttcaagatccttaggggccaggatcattgtggcattgagtctgaggtcgtggctggtataccacggacagaccaatactgggaaaagatatag

SEQ ID NO: 242223 - DNA, 333 bp, Artificial Sequence
  derived and/or modified sequence
atgtggcagctatgggcttcattgtgctgtctgctcgtccttgccaacgctaggagtagaccttcattccaccctctgagcgacgaactagtaaactatgttaataaacgaaacactacctggcaggctggccataatttctacaacgtggacatgtcttatttgaagcggctctgtggcacttttctcgggggtccaaagcctccccaaagggtaatgtttaccgaggatctcaaactaccggctagcttcgatgcccgagaacaatggccccagtgtccaacgataaaggaaattagagatcagggctcatgcgggagctgctggctgtag

SEQ ID NO: 242224 - DNA, 1020 bp, Artificial Sequence
  derived and/or modified sequence
atgtggcagctgtgggcctctttatgttgtctgctggttcttgcaaatgcgcgttctaggccctcctttcaccccctttctgacgaactagttaattatgtcaacaagcgcaacacgacttggcaagccggacacaacttttataacgttgacatgagctaccttaagcggctttgcgggacatttctgggcggtcctaaaccaccccagcgagtcatgtttacagaggatctgaaactgccagcctccttcgatgccagagaacagtggccacagtgccccacaattaaggagatcagagaccaaggttcttgtggctcttgctgggctttcggagccgttgaagctatctccgaccgaatctgtatccacaccaacgctcacgtgagtgttgaagtgtccgccgaggaccttctcacatgttgcgggtcaatgtgtggggacggctgtaatggcggatacccggctgaagcatggaacttctggacgcgcaagggtttggtcagcggcggattatatgaatctcatgttgggtgccgtccctactccatccccccatgtgagcaccacgtgaacggctctagaccaccttgcacaggcgaaggtgacacccccaaatgttccaagatctgtgaacccggatatagcccgacttacaagcaggataaacactacgggtacaatagctatagcgtcagcaattccgagaaggacatcatggctgaaatctataagaacgggccagtggaaggagccttttcagtctattcagatttcctgctctataaatccggggtctaccaacatgtaactggagagatgatggggggacacgccatcaggatccttggctggggagtggaaaatgggacaccatattggctggtggcgaattcctggaacacagactggggggacaacgggttttttaagatattacgtgggcaggatcactgtgggattgagtcagaggtcgtcgccggaatccccaggacagaccagtactgggaaaaaatttag

SEQ ID NO: 242225 - DNA, 1020 bp, Artificial Sequence
  derived and/or modified sequence
atgtggcaactttgggctagcctgtgttgtcttctcgtattggccaacgccaggagtcggcctagtttccaccctctgtctgatgagctggtcaactatgtcaacaagcggaacacgacctggcaggcaggacataacttttacaacgtggacatgagttacctgaaaaggctgtgcggcacatttctaggaggtcctaagcccccacagagggttatgtttactgaagatctgaaattacctgcctcctttgatgccagggagcagtggccccagtgtccaactatcaaggaaattagagaccaaggatcatgtggctcttgttgggccttcggggcagtggaggcgatcagcgacaggatctgcatccatacaaatgctcatgtgagcgttgaggtgtccgcagaggatctactgacctgctgcggcagcatgtgcggcgatgggtgtaacggcggataccccgctgaggcctggaacttttggaccagaaagggattagtgtcaggcggtctctacgaaagccatgtggggtgtcgtccctattctattcctccctgtgaacaccatgtcaatgggagcaggcccccttgcaccggcgagggagacacgccgaaatgttctaagatttgcgaacccggatattcaccaacttataaacaggacaaacactatgggtataatagctactccgtgtcaaattccgaaaaggatattatggccgaaatctataagaatggccctgtcgaaggcgcattttcggtctactccgacttcctgctttacaagtctggcgtctatcaacatgtgaccggagaaatgatgggtggacacgccattcgaattctgggatggggtgtagaaaatggtacgccttactggctggtcgctaacagttggaacactgactggggcgacaatggatttttcaaaattcttaggggacaggaccattgtggcattgagtctgaggtagtcgctggcatacctcgcacagaccagtactgggagaaaatttag

SEQ ID NO: 242226 - DNA, 1020 bp, Artificial Sequence
  derived and/or modified sequence
atgtggcagctgtgggcctccctctgctgcctcctggtacttgccaatgccaggtctcgaccatcgtttcatccactcagcgatgagctggtgaactatgtgaacaagagaaatacgacatggcaagccggtcataacttttacaatgtagatatgtcgtatctaaaaaggctctgcggcacttttctcgggggtcccaagccaccacagcgcgtgatgtttacagaggacctaaagttgcccgcaagctttgacgcaagggagcaatggcctcagtgtcctactataaaggaaatccgcgatcaggggtcctgtggatcttgctgggccttcggcgcagttgaggcaataagcgatcgcatctgtatccatactaatgcgcacgtgtctgtagaagtttctgctgaggacctgctgacctgttgcggctcaatgtgcggagacggatgtaacgggggatatcccgctgaagcctggaacttctggacaaggaagggactggtgtctggcggtctctacgaaagtcacgtcgggtgtcggccttactcaataccgccttgcgaacaccacgtgaacgggagtcgccctccctgcaccggcgaaggagatacacccaagtgctcaaagatctgcgagccgggatattccccgacctataagcaggacaagcactatggttacaactcctatagcgtgtcgaatagtgagaaggatatcatggcggaaatctataaaaacgggccagtagagggagccttcagcgtctacagcgactttttgctgtacaaaagtggcgtgtaccaacacgttacgggtgagatgatggggggtcatgccattagaatcctaggctggggggtcgaaaacggcacaccttactggctggtggctaattcatggaacacagactggggcgacaacgggttttttaagattctaagagggcaggaccattgtggaatcgagtccgaggtcgttgctggaatcccacgcacagaccaatattgggaaaagatctag

SEQ ID NO: 242227 - DNA, 1020 bp, Artificial Sequence
  derived and/or modified sequence
atgtggcagctttgggccagcctttgctgtctgctggttctggccaacgcccgttcccggccttcttttcaccctctgtctgacgaactcgtgaattacgtgaataagcgaaatactacatggcaggccggacacaatttctacaacgtcgatatgtcttatttgaaaaggctgtgcggcacctttctgggtggaccgaagcctcctcagagagtcatgttcaccgaggatcttaaacttcctgccagttttgacgcaagagaacagtggccacaatgccctacaatcaaggagattagagatcagggatcctgtggcagctgttgggccttcggcgctgtggaagccatctctgaccgaatttgtattcacactaacgcacacgtatctgtcgaggtgtccgcagaggacctcctgacctgctgcggtagcatgtgtggcgatgggtgtaacggtgggtatcccgctgaggcctggaacttctggactaggaaggggctggtcagcggaggattgtatgaatcccacgtcggatgtcgaccttacagcataccaccctgcgagcatcacgttaatgggagtagacctccctgtacaggcgagggggacacaccaaaatgttccaagatctgtgaaccaggctatagtcccacctataagcaggacaaacactatggatataattcttactccgtctctaactccgaaaaggatattatggccgaaatttataaaaatggtcctgtcgagggagccttcagtgtgtactctgacttcttactctacaaaagcggagtctatcagcacgttaccggagaaatgatgggaggacatgctatcaggatactaggttggggtgttgagaatggtactccttactggttagtggcaaacagctggaacactgactggggtgacaatgggttcttcaagattctgagaggacaggaccactgcgggattgaaagtgaggtggtcgcgggaatacctcggactgatcagtactgggagaagatttag

SEQ ID NO: 242228 - DNA, 1020 bp, Artificial Sequence
  derived and/or modified sequence
atgtggcaactctgggccagtttatgttgcttgcttgtgctcgctaatgccaggtccagaccttccttccatccactctccgacgaactggtgaattatgtaaacaagcggaacacaacgtggcaagccggtcataatttctacaatgtcgatatgagctatctaaaacgactttgtggcaccttcctaggtggccctaaacctcctcagagagtgatgtttacagaagacttgaaattgccggcatctttcgacgcacgtgagcagtggccacagtgccccaccattaaagaaatcagagaccaaggctcctgcgggtcttgttgggcttttggagctgttgaggcaattagtgacaggatttgtatccatacaaacgcccacgtaagtgtcgaggtatctgccgaggatttgttaacgtgctgtggaagcatgtgcggcgatggatgtaatgggggatacccagcagaagcttggaatttttggactcggaaaggattagtgagcggagggctatacgaatcccacgtgggctgccgaccatattcaatccctccctgtgagcaccacgtgaatggcagcaggcccccttgcaccggagagggagatactcctaaatgtagcaaaatctgtgaaccaggctattccccaacttataagcaggacaaacactacgggtacaactcctactctgtgtctaacagcgaaaaggatatcatggctgagatttataagaatgggcctgtggaaggtgcttttagtgtctacagcgacttcctcctgtataaatccggggtgtatcagcatgtgaccggcgagatgatgggaggacacgccatccgcattctaggttggggtgtggagaatggcacgccctattggttagtagctaactcttggaatacggattggggtgacaatggattctttaagattcttcgcggacaggatcactgtgggatcgagagcgaggtggtagccggaatcccaaggaccgatcagtattgggagaaaatatag

SEQ ID NO: 242229 - DNA, 1020 bp, Artificial Sequence
  derived and/or modified sequence
atgtggcagttgtgggcctccctctgttgcctgctagtgctcgctaatgcacggagcaggccctctttccatccacttagcgatgaactggtcaattatgtcaacaaacggaatacaacctggcaggcagggcacaacttttataatgtggacatgtcctatctcaagagactgtgtggtaccttcctggggggtcccaagcctcctcagcgggttatgtttaccgaggacctgaaactcccggcatcattcgacgccagggaacagtggccacagtgccccaccataaaagaaatacgggatcagggctcttgcgggagttgttgggcatttggcgcagtggaagctatttccgataggatctgtatccatacaaacgcacacgtgtctgtggaagtctccgccgaagacctgttaacctgttgcgggtcaatgtgcggcgacgggtgtaacggaggttatcctgccgaagcatggaacttttggacacgcaagggcctggtgagcggtggcctgtatgagtcccatgtgggctgcaggccttattccatcccaccctgtgagcaccacgtgaatggttcacggccaccttgtacaggagagggagacactcccaagtgcagcaaaatatgcgagcccggttacagccctacttacaagcaggataagcattacggctacaattcatattccgtcagcaattccgaaaaggacattatggccgaaatctataagaatggcccagtggagggcgcattctctgtgtattcagactttttattatataaaagcggggtgtaccagcacgtgaccggggaaatgatgggaggtcatgcaattcgcattctgggatggggcgtggaaaatgggacgccctactggcttgtggctaactcctggaacacggactggggggacaatggcttcttcaaaatcctgagagggcaggatcactgcggtattgagtcagaagtcgtggcagggattccccgtacagatcagtattgggaaaagatctag

SEQ ID NO: 242230 - DNA, 738 bp, Artificial Sequence
  derived and/or modified sequence
atgcccggagcagggccactcagcatcccttgcaggatgtcctgggctttcggcgcagttgaggctataagcgaccgaatctgcatccacaccaacgctcacgtgtctgtggaggtatcagccgaggatctactgacctgctgcgggtctatgtgtggagacgggtgtaacgggggataccctgccgaagcctggaacttttggacacgcaaaggacttgtgtccggcggtctgtacgagtcccacgtcgggtgccgcccatactccatccctccctgtgagcatcatgtgaacggtagccggcctccctgcaccggagagggcgatacacctaaatgttctaaaatttgtgagcctgggtatagccccacatacaagcaggacaagcattacggctacaactcatatagtgtcagtaacagcgagaaggatatcatggccgaaatttacaagaacgggccagtggagggggcattttctgtttactcggactttctgctgtacaaaagcggagtgtaccaacacgtcaccggcgagatgatgggtggccacgccatcaggatattgggttggggggtcgagaatgggaccccatactggctggttgcaaattcctggaatactgattggggggacaatgggttctttaagatccttaggggccaggaccactgcggtattgaaagcgaggtagtggctggaatccctagaacagaccaatactgggagaaaatttag

SEQ ID NO: 242231 - DNA, 1020 bp, Artificial Sequence
  derived and/or modified sequence
atgtggcagctgtgggcaagcctctgttgcctgctggtgcttgcaaacgcccggagcagaccatcgtttcaccctctttccgacgagctcgttaactacgtgaacaaaagaaacacaacttggcaggccggacataatttttacaacgtcgatatgtcatacctcaaaaggctgtgcggtacttttttagggggaccaaagccccctcagcgtgtcatgtttacagaggaccttaagctgccagcttcttttgatgctagagaacaatggccccaatgtccaacaattaaagagattagagaccagggcagctgtggcagttgttgggcatttggagctgtggaggcaatcagtgatagaatctgcatccacaccaatgcacacgtttcagtagaagtgagtgctgaagaccttctgacatgctgtggaagtatgtgtggcgacggctgtaacggcggttacccagcagaagcatggaacttttggaccaggaagggtttggttagcggcggcttgtatgagagccatgttggttgccgcccttactccatacctccttgcgagcaccacgtcaatggctcaagacccccctgcacaggcgagggggataccccaaaatgtagcaaaatctgcgaaccgggctactcccctacatataaacaagacaaacattatggttataacagctattcagtctctaattccgagaaagacatcatggccgagatctacaagaacggacctgttgagggagcattttctgtgtacagtgacttccttctgtataaatctggtgtgtaccaacacgtcacaggagagatgatgggcggccatgccatcaggatcctgggatggggagtggagaatgggaccccatactggctggtagctaatagctggaatacagattggggggacaacggatttttcaagattcttcggggccaagatcactgcggcatcgagtccgaagtcgtggccggaatacctaggaccgaccagtactgggagaagatatag

SEQ ID NO: 242232 - DNA, 1020 bp, Artificial Sequence
  derived and/or modified sequence
atgtggcagctctgggcctctctgtgctgccttctggtgctggccaatgccagaagtcgcccatcttttcaccccctctctgatgagctggtaaattacgttaacaagcgaaacacaacatggcaggccggccacaacttttataatgttgacatgagctatttaaagaggctttgcggcactttccttggcggacccaaacctccccagcgcgttatgttcaccgaagatctaaaacttccggcttcttttgacgcccgggaacagtggccccagtgtccaaccattaaggagatccgggaccagggatcctgtggatcatgctgggccttcggcgccgtagaagctatatccgatcgtatttgcatccacaccaatgctcatgtatcagtggaagtctctgccgaagacctgctcacctgctgtgggtctatgtgcggcgacgggtgtaatggtgggtacccagctgaagcgtggaacttttggacccggaagggtcttgtgtctggaggcctgtacgagtctcacgtcggctgtagaccttactcaatccctccatgtgagcaccatgtgaatggtagccgccccccgtgtacaggagaaggggacacacccaaatgctcaaagatttgtgaacctggatactcacccacatataaacaagacaagcactacggctacaacagttattctgtgtctaactcagaaaaagatatcatggctgagatctataagaatggaccggtggaaggcgccttttcagtgtacagtgacttcctcttatacaagtccggagtgtatcagcacgtgactggcgaaatgatgggtgggcatgctattcgaatcctcggctggggcgtagaaaacggcacaccctattggctggtcgccaattcttggaacaccgattggggcgataatggtttttttaaaatcctgcgcggacaggaccattgcggtatcgaatccgaagtggtagccggaatccctagaaccgaccagtactgggagaagatctag

SEQ ID NO: 242233 - DNA, 333 bp, Artificial Sequence
  derived and/or modified sequence
atgtggcaactttgggcttcattatgctgtcttctagttctggctaatgcgcgctcccgcccttccttccatcctctgtccgacgagctggtgaactacgtcaataagcgcaacactacatggcaggccggacacaacttctataatgtagatatgagttacctaaagagactctgcggaacctttttgggcggaccaaagcctccacaacgcgtaatgtttactgaggatctgaagttacctgcctccttcgacgcacgcgaacagtggccacagtgccctaccatcaaagaaatcagagatcaagggtcctgcggttcttgctggctctag

SEQ ID NO: 242234 - DNA, 1020 bp, Artificial Sequence
  derived and/or modified sequence
atgtggcagctttgggcctccctctgctgcttactggttttggctaatgcccgatctcgcccatccttccaccccctgtccgacgagctggttaactacgtcaataaaagaaacaccacttggcaggccgggcataatttttacaacgttgacatgagttatcttaaacgcctctgtggtacgtttctgggcggacctaaaccacctcagcgcgtgatgtttaccgaagacctgaagctccccgcctcattcgatgctcgtgaacaatggcctcagtgccccacaattaaggaaatcagagaccaaggctcctgcggaagttgttgggccttcggagccgtggaagccatttctgatcgcatctgcatacacaccaacgctcacgtctccgttgaggtttcggccgaggacttgttgacgtgttgcgggtccatgtgcggcgacggttgtaatgggggatacccagcagaagcgtggaatttttggacaaggaaaggactggtgagtggagggctgtatgagtcacatgttggctgtaggccttattctatccctccatgtgaacaccatgtgaatggatctcgacctccctgtactggagagggtgatacccctaagtgtagtaagatctgcgagcccgggtattctcccacatataaacaggacaagcactatggttacaactcctacagtgtgtcaaattctgagaaggatattatggccgagatctataaaaacggccctgtagaaggcgccttttccgtctactctgacttcctgctgtataagtctggagtgtaccaacacgtgacaggcgaaatgatgggcggccacgctataaggattctgggctggggagtcgaaaacggaaccccatactggctcgtggctaacagctggaatacagattggggagataacggattcttcaagatcctgcgagggcaagaccattgtggaattgagtcagaagtggtcgctggtatccctaggacagatcaatactgggagaagatctag

SEQ ID NO: 242235 - DNA, 1020 bp, Artificial Sequence
  derived and/or modified sequence
atgtggcaactttgggcttccttgtgttgcctgttagtgctagccaacgcgcggtcaaggccatcttttcaccctctgtctgacgaactggtcaactacgtaaacaaaaggaataccacctggcaagctggccataacttctataacgtcgatatgtcttacttaaaacgactttgcgggacattcttgggaggacctaaacctccccagagagtaatgttcaccgaagacctgaaactcccagctagctttgatgcacgggagcagtggcctcagtgccctacaataaaagagataagggatcagggttcttgcggcagctgctgggcgttcggggccgtggaggccattagcgatcgaatttgcattcataccaacgctcacgtgtctgttgaagtgtcagcggaagacttgctcacttgttgcggtagcatgtgcggcgatggatgcaacggaggttatccagctgaggcctggaacttttggaccaggaaaggtctggtttctggtggtctgtacgaatcccacgtaggttgccggccttactccattccaccctgcgagcatcatgtcaacgggagcagaccaccttgtacaggagagggcgataccccgaaatgtagcaaaatttgtgagcccggctactcccccacatacaagcaagataagcactacgggtacaactcatatagcgtatctaactctgagaaggacatcatggctgagatctataaaaacgggcccgtcgaaggagctttctcagtgtactccgacttcctattatacaaatctggggtgtatcagcatgtcactggtgagatgatggggggtcatgccattcggattctgggttggggggtcgagaacggcacgccatactggttagtggctaactcctggaacaccgactggggggataacggtttctttaaaatcctgcgcggtcaggatcactgcggcattgaaagcgaagttgttgcaggcatccctagaactgaccaatactgggagaagatttag

SEQ ID NO: 242236 - DNA, 1020 bp, Artificial Sequence
  derived and/or modified sequence
atgtggcaactttgggcatccctttgttgcctccttgttttagctaacgccaggtcccgcccgtcgttccatcccttatccgatgaactcgtgaattacgtaaataagagaaacactacgtggcaggcaggtcataatttttacaacgtagacatgtcttacttgaagcgactgtgtggtacctttttgggaggaccaaaaccgccccagcgagtcatgttcactgaggaccttaaactccctgcaagctttgatgcgcgcgagcaatggcctcagtgccccactataaaggagataagagatcaggggtcgtgcggctcatgttgggcattcggcgctgtggaggccatctcggacaggatctgcatccataccaacgcacacgttagtgtcgaggttagcgcggaagatctgctaacatgctgcggcagtatgtgcggagacggctgcaacggtggttatccagcggaagcatggaacttctggacaaggaaaggccttgtgagtggtggactttacgagtctcacgtcggctgtcgcccctacagtatcccgccgtgtgagcatcacgtgaatggttccagacctccttgcaccggcgaaggcgacaccccaaagtgttcaaagatctgtgagcccggctactccccaacatacaaacaggataagcattatgggtataactcttacagtgtcagtaacagcgagaaagatataatggcagaaatatacaaaaatggaccagtcgaaggagccttttcagtgtacagcgattttctcctgtacaagtccggcgtgtatcagcatgtaaccggtgagatgatgggggggcacgcaattaggatccttggttggggcgtggagaacgggactccttactggctcgtggctaacagctggaacactgattggggggataacggtttctttaaaattttgagggggcaggaccactgcggcatagaaagcgaagtcgtcgcaggcataccaagaacagaccagtactgggagaaaatttag

SEQ ID NO: 242237 - DNA, 1020 bp, Artificial Sequence
  derived and/or modified sequence
atgtggcaactgtgggctagcctctgttgcttattagtcctcgctaatgcacgatcgcgcccaagcttccatccattgtcagacgaattagtaaattacgttaataaaaggaatacgacctggcaagctgggcacaacttctacaatgttgacatgagctatctcaagagactctgcgggacattccttggcgggcctaagccaccacagagagtgatgttcacggaggacctgaaactaccagcatcattcgatgctcgggaacagtggcctcagtgccctaccataaaggagatacgagaccaaggcagttgcggatcttgctgggcgttcggggcagtagaagcgatttccgatagaatctgtatacacactaatgcacacgtttccgtggaagtctctgccgaggacctgcttacctgctgtggaagcatgtgtggtgatggctgcaacggcgggtacccggcagaagcatggaacttctggactcggaaaggtctcgtgagcggcggcctctacgaaagtcatgtaggatgtcgaccatacagcatcccaccctgcgaacatcatgtcaacggcagccgacctccttgcacaggtgaaggggatacccctaaatgtagcaaaatctgtgagcccggatattctcccacctacaaacaggacaaacactacggctataattcttacagcgtgtccaactctgaaaaagatatcatggccgaaatatacaaaaacggtcccgtggagggagccttctctgtctacagcgattttctcctgtataagagcggcgtgtatcaacatgttaccggcgaaatgatgggggggcacgcaatacgcatcctgggttggggcgtggagaatgggaccccctactggctggtcgctaattcttggaacactgattggggggataatggtttcttcaaaatcctgcgggggcaggatcactgtgggatcgaatcggaagtagtggccggaatccctagaacagaccagtattgggagaaaatttag

SEQ ID NO: 242238 - DNA, 1020 bp, Artificial Sequence
  derived and/or modified sequence
atgtggcagctctgggcctctctctgctgcctgctggtgctcgccaatgccaggagtagaccctccttccatcctctgtccgacgaactggtgaactacgtgaacaaacggaacacaacatggcaagcagggcataatttctacaatgtcgatatgtcatatctgaaacggctctgtgggacatttcttggaggacccaaaccaccacagcgggtcatgttcaccgaagacctcaaactgccagcttcctttgacgcacgagaacagtggccccaatgtccgactattaaagaaataagagaccagggatcatgcgggagctgttgggcctttggagccgtggaggctataagtgacagaatctgtatccacacaaacgcccacgtaagcgtcgaagtctctgctgaagacctgctcacatgctgcggatcaatgtgcggagacgggtgcaacggcgggtaccctgccgaggcatggaacttctggactcggaagggcctggtgtcgggcggactgtatgagtctcacgtgggatgtcgaccctattcaatccctccttgcgaacaccatgtcaatggtagccgccctccttgcactggcgagggggatactccaaaatgctccaagatctgcgagccaggatactcccctacatacaaacaggataagcattacggatataacagctattccgtgtccaattctgagaaagatattatggctgagatttacaagaatggcccggttgagggtgcatttagcgtgtattctgacttcctgctatacaaatccggagtataccaacatgttaccggcgaaatgatgggtggacatgccatacgcatcctgggatggggcgtggagaatggaactccttattggctggttgctaacagctggaataccgactggggcgataacggttttttcaaaatcctgaggggacaggaccactgtggtattgagtctgaagttgtggcaggcatcccccggaccgatcaatattgggagaagatatag

SEQ ID NO: 242239 - DNA, 1020 bp, Artificial Sequence
  derived and/or modified sequence
atgtggcagctgtgggcatccctttgttgcctcctggtgttggccaatgcccgctcccgaccttctttccatccgttaagtgacgaactggttaattacgtgaacaagcggaacactacttggcaggccggtcacaatttctataatgtagacatgtcatacctgaagaggctgtgtggtaccttcctaggcggcccaaagcccccgcaacgcgtgatgtttactgaggacctcaagctccctgccagttttgacgcccgtgagcagtggccccaatgccccaccattaaagaaatccgagatcaaggtagctgcggctcgtgctgggcatttggcgccgtggaggctatatcagacagaatttgcatacacactaacgcacatgtctccgtcgaggtttccgctgaagatctgctgacatgttgtgggtctatgtgtggcgatggttgcaatggaggctatcccgcggaggcctggaatttttggacacggaagggcttggtgagcggggggttgtacgaatcccacgtcgggtgtcgtccgtattccattccgccgtgtgagcaccacgtcaatggctcaagaccaccctgcactggcgaaggcgatacccccaaatgctctaaaatctgcgagcccggttactcaccaacctacaagcaggataagcattacgggtataatagttactccgtgtctaattcggaaaaggacatcatggccgaaatatataaaaatggacccgtggagggtgctttctccgtatactctgacttccttctctataagtctggagtatatcagcacgtaactggagaaatgatgggcggccacgccattaggattctgggatggggagtggagaatggcacaccctactggctggtggcaaatagttggaatacagattggggagataatgggttctttaaaattctgaggggtcaagatcattgcggcattgaatctgaggtcgtcgccggcattcctcgaaccgaccagtactgggagaaaatttag

SEQ ID NO: 242240 - DNA, 738 bp, Artificial Sequence
  derived and/or modified sequence
atgcctggggccggccccctctccatcccatgtcgcatgtcgtgggccttcggggcagtggaggcaatcagtgacagaatttgcatccatacaaacgctcacgtatcagtcgaggtgtctgcggaagacctgttaacttgttgcggaagtatgtgcggggatggttgtaatggtgggtatcccgcagaagcctggaatttctggaccagaaagggcctggtcagcggaggcttgtatgagtcacatgttggttgtaggccttatagcattccgccttgtgaacaccacgttaacggcagtagacctccatgcaccggcgagggcgacacccctaagtgttccaagatttgtgagcctggctattcacctacttataaacaggataagcactacggatataacagctacagcgttagtaacagtgagaaggacatcatggcagaaatttataagaatgggcccgtcgaaggagctttcagtgtgtattcggacttcctgttgtacaagtctggagtgtatcagcacgtgaccggagaaatgatgggcggccacgcaatccgaatcctcggctggggagtggaaaacggcacaccatattggctcgtcgcaaattcctggaataccgattggggcgataacggttttttcaagattctcagaggacaggatcactgcggtatcgagagcgaagtggtcgctggcataccacgtacagaccaatattgggaaaaaatatag

SEQ ID NO: 242241 - DNA, 1020 bp, Artificial Sequence
  derived and/or modified sequence
atgtggcaattgtgggccagtctgtgctgcttgctggtgttggcaaacgctcgatccaggccatccttccaccctctttcagacgagctcgtgaattacgtcaataagagaaacacaacttggcaggccggacacaatttttataacgtagacatgtcctatctgaagagactatgcggaacattcctcggaggacctaaacccccccagcgtgtgatgttcacagaagaccttaaattgcccgcgtcattcgatgcccgcgagcagtggcctcagtgtccaaccataaaggaaatcagagatcaggggagctgcggcagttgctgggcattcggagccgtagaggctatttcggaccgcatctgcattcataccaacgcacacgtatccgtggaagtaagcgccgaagatctcctcacgtgttgcgggtccatgtgtggagacggatgtaacggagggtaccctgccgaagcctggaacttttggactcgaaaggggctggtaagcggtggtctgtacgagagccatgtcgggtgtcggccctattcaatcccaccttgcgagcaccatgtcaacggttcccgtccaccatgtaccggagagggcgacactccaaagtgtagtaagatctgtgaacccgggtactctccaacttataagcaggataagcattatggttacaatagctacagcgtaagtaattcggagaaggacatcatggccgagatctacaaaaatggcccggtggaaggcgcgtttagtgtgtactcagattttttactctataaatccggcgtatatcagcacgttaccggcgaaatgatgggggggcatgcaatccggatcctgggatggggcgtagaaaacggaactccgtactggttggtggcgaatagctggaatacagactggggtgataatggtttttttaaaatccttcgggggcaggaccactgtggtattgaatcagaagtggtggccggaattccaagaacggatcaatattgggagaagatttag

SEQ ID NO: 242242 - DNA, 1020 bp, Artificial Sequence
  derived and/or modified sequence
atgtggcaactctgggcctctctttgctgtctgctggtcctcgccaacgctaggtctagaccttcatttcatcctctgtcagatgaattagtaaactacgtgaataagcgaaacaccacttggcaagctggacacaacttctacaatgttgacatgagctaccttaaacggctctgtggcacatttctaggcggtccgaagccaccacagcgcgttatgttcaccgaagacctcaagttgcccgcctccttcgatgcccgcgaacagtggccgcagtgtccaaccattaaggaaatccgcgatcagggatcctgtggatcctgttgggcattcggcgctgtggaggcaatctcagatagaatttgtattcatactaatgcccacgtatcagtcgaggtatctgctgaggatctcttaacctgttgtggaagcatgtgtggagacgggtgcaacggcggttacccagcagaagcctggaatttctggaccagaaagggactcgtctcaggcggactctatgagagccacgtcggatgtagaccatattccattcctccttgcgaacatcacgtgaacggcagccggccgccatgcactggcgaaggggacacacccaaatgctcaaagatttgtgaacctggatactcacccacatataaacaagacaagcactacggctacaacagttattctgtgtctaactcagaaaaagatatcatggctgagatctataagaatggaccggtggaaggcgccttttcagtgtacagtgacttcctcttatacaagtccggagtgtatcagcacgtgactggcgaaatgatgggtgggcatgctattcgaatcctcggctggggcgtagaaaacggcacaccctattggctggtcgccaattcttggaacacagattggggcgataatggcttctttaaaatactccgtggacaagaccattgtggcatagaatcagaggtcgtcgctggaatccctagaacagatcagtattgggagaagatttag

SEQ ID NO: 242243 - DNA, 333 bp, Artificial Sequence
  derived and/or modified sequence
atgtggcaactttgggcttcattatgctgtcttctagttctggctaatgcgcgctcccgcccttccttccatcctctgtccgacgagctggtgaactacgtcaataagcgcaacactacatggcaggccggacacaacttctataatgtagatatgagttacctaaagagactctgcggaacctttttgggcggaccaaagcctccacaacgcgtaatgtttactgaggatctgaagttacctgcctccttcgacgcacgcgaacagtggccacagtgccctaccatcaaagaaatcagagatcagggttcttgtggtagctgttggctttag

SEQ ID NO: 242244 - DNA, 1020 bp, Artificial Sequence
  derived and/or modified sequence
atgtggcagttatgggccagtctttgttgcctgctggttctggcaaatgctcgatctcgaccaagctttcaccccttgtcagatgaactcgtgaattacgtaaataagaggaatacaacatggcaggccggtcataatttttacaatgtggatatgagctatctgaagcgattgtgtggtacgttcctcggcggacccaagccaccacaaagagtgatgtttactgaggatttaaaactgcccgcctcattcgatgcaagggagcagtggccccagtgcccaaccattaaggagatacgcgatcaaggttcatgtggcagctgctgggcctttggcgctgttgaagcgatctcagatagaatttgcatccatactaatgcccacgtcagcgtagaggtaagtgctgaagatctgcttacctgttgcggcagcatgtgcggagacggttgcaatggaggctatcccgccgaagcttggaatttctggactcggaaaggactggtttctggcggtttatacgagtctcatgtcggttgccgtccatattcaatccccccctgtgagcaccacgtcaacggaagcaggccaccctgcactggagagggagatacgcctaaatgttcgaagatttgcgaacccggctactcgcctacatacaaacaagacaagcattacgggtataatagttatagtgtgtctaatagcgagaaagatattatggccgaaatctacaagaatgggccagtcgaaggcgcctttagcgtgtactctgactttctcctatataaaagcggcgtgtaccaacacgtgactggcgagatgatgggaggacatgcaatccgaatacttggttggggagttgagaacggaacaccatactggttagtggcaaacagttggaatacagattggggagacaatggattctttaaaattcttagggggcaggatcattgtggcatcgagtccgaagtggtagcaggcatcccaagaacagatcaatactgggagaagatctag

SEQ ID NO: 242245 - DNA, 1020 bp, Artificial Sequence
  derived and/or modified sequence
atgtggcagttatgggcctcactgtgctgtctcctggtgcttgcaaacgctagaagcagaccatcctttcacccattgtcagacgaacttgttaactatgtgaacaagagaaatacaacttggcaggccggccacaacttctataatgtcgacatgagttaccttaaaagactatgtggaacattcttaggcggccctaagcctccacaacgtgtaatgttcaccgaggacctcaagctaccagcttccttcgatgccagagaacagtggccccagtgccccacgattaaggagattagagaccaaggtagttgtggaagttgctgggcctttggggcagtggaagcaattagcgatcgcatttgcatacacactaatgcccacgtaagcgttgaagtctcagctgaagacctacttacttgctgtggcagcatgtgtggcgatggctgcaatggaggctaccccgctgaggcttggaacttttggaccagaaagggcctggtgagcggcgggttgtacgaatcgcatgtaggctgcaggccctatagtatcccgccttgtgaacaccatgtgaacgggagtaggccaccctgtacaggggaaggggacacacctaaatgctccaagatctgtgaacctgggtacagccccacctacaaacaagacaagcactacggctacaattcatacagtgtgagcaactccgagaaagacattatggccgagatctataagaatggaccagtagagggtgctttcagcgtgtattcggatttcttgctgtataaatcaggagtatatcaacacgttaccggcgaaatgatggggggtcatgccataagaatactcggatggggcgtggagaacggaacaccttactggttggttgctaactcttggaatacggattggggtgacaatggattttttaagatacttagagggcaggatcattgcggcattgaaagtgaggttgtagcgggtattcccagaaccgatcagtattgggagaagatatag

SEQ ID NO: 242246 - DNA, 1020 bp, Artificial Sequence
  derived and/or modified sequence
atgtggcagctctgggcaagtctgtgttgccttcttgtcctagccaacgcccgctcccgaccttcctttcatccgctcagcgacgaattggtaaactacgttaacaagcggaacacaacctggcaggccgggcacaatttttacaatgtggatatgtcttaccttaagaggctatgcggaaccttccttggcggccccaaaccccctcagagagtcatgtttaccgaggatcttaagctccccgcctcttttgatgcccgcgaacagtggcctcaatgtcctacaatcaaggagatccgcgatcagggatcctgcggttcctgttgggccttcggagctgtggaggccatctctgaccgtatttgtattcacaccaacgcccacgtcagtgtggaggtatcagcagaggacctgctaacatgttgcggtagcatgtgcggggacggatgtaatggaggttacccagctgaggcatggaatttttggacacgtaaagggctggttagtggcggcttgtacgaatcgcacgttggatgccggccgtatagtatacccccctgtgagcaccacgtaaatggaagtagacctccctgtacgggtgagggagatacccctaaatgttccaaaatttgcgaaccaggctacagtccaacttataaacaagacaagcattacggctacaatagctacagcgtttcgaactccgagaaagacattatggcggaaatatataagaacggaccagttgagggcgctttctcagtatactccgacttccttctctacaaatccggagtatatcagcatgtgaccggtgaaatgatgggcgggcacgcaatcagaattcttgggtggggggtggagaacgggacaccatattggctagttgcaaattcttggaacacagactggggggataatggattctttaagatactaagaggtcaggatcattgcggtatagagagcgaggtggtggctggtattccacggactgaccaatactgggagaagatttag

SEQ ID NO: 242247 - DNA, 1020 bp, Artificial Sequence
  derived and/or modified sequence
atgtggcagttatgggctagtctctgttgtctgctggtcctggcgaacgctcgctcccggccttcgttccaccctttaagcgacgagcttgttaactacgtgaataaacggaataccacctggcaggccggccacaatttttataacgtcgacatgagctacctgaaaagattgtgcggtacatttcttggcggcccgaagccccctcagagggttatgttcacggaagatctgaaactgcccgccagctttgacgcccgcgaacaatggcctcagtgtcctactatcaaagagattcgggatcagggctcttgtggtagttgttgggctttcggtgcggtggaagctatctctgatagaatttgtatccataccaatgctcatgtctccgtggaagtatcagccgaagacctgcttacttgctgcgggagcatgtgcggagacggttgtaacggtggctacccagccgaggcatggaatttttggacaagaaaggggttagtcagtggtggactatacgagagtcatgtgggctgtagaccctactccatacccccctgcgaacaccacgtgaatggaagccgccctccatgtacgggagaaggagacactcccaaatgtagtaaaatctgcgagcccggctacagtcccacatacaagcaggataaacactacggctataactcatattctgtctccaactctgagaaagatatcatggcggagatctacaaaaatggacctgtggagggagcattcagcgtgtatagcgacttccttctttataagagtggcgtataccagcacgtgaccggggaaatgatggggggacatgccattcggatactgggttggggtgtggagaacggaacaccatactggctagttgcaaactcgtggaacaccgattggggcgataatggttttttcaaaattctgcgaggccaggatcactgcgggatcgaatcagaagttgtggcggggattccaaggacagatcagtactgggaaaaaatctag

SEQ ID NO: 242248 - DNA, 1020 bp, Artificial Sequence
  derived and/or modified sequence
atgtggcagctctgggcctctctctgctgcctgctggtgctcgccaatgccaggagtagaccctccttccatcctctgtccgacgaactggtgaactacgtgaacaaacggaacacaacatggcaagcagggcataatttctacaatgtcgatatgtcatatctgaaacggctctgtgggacatttcttggaggacccaaaccaccacagcgggtcatgttcaccgaagacctcaaactgccagcttcctttgacgcacgagaacagtggccccaatgtccgactattaaagaaataagagaccaggggtcctgcgggagttgttgggcattcggcgccgtcgaagctattagtgataggatttgtattcatacgaatgcacacgtgagcgtggaagtcagcgctgaagatcttctgacatgttgcggttcaatgtgcggtgatgggtgtaatggaggctacccagccgaagcttggaatttttggactcgtaaaggactggtttctggcggattatacgaatctcatgtcggctgccgaccttatagtatccctccttgtgagcaccatgtaaacgggagccgtcctccctgtacgggagagggcgatacccctaagtgttcgaaaatctgtgagcctgggtactcccccacatacaaacaggacaagcattatggttataactcatacagcgtcagcaatagcgagaaagatattatggctgaaatttataagaacggccccgtggagggcgcattttcagtatatagcgactttctgttatacaaatctggtgtgtatcagcatgtgacaggcgagatgatgggcggtcatgcgatcagaattctgggttggggcgtggagaatggcactccatactggctagtagccaactcgtggaacactgattggggggacaacgggttttttaaaatccttagaggacaggaccattgtggcatagagtccgaggtagttgcaggaatacccaggacagaccaatattgggaaaagatatag

SEQ ID NO: 242249 - DNA, 1020 bp, Artificial Sequence
  derived and/or modified sequence
atgtggcagctttgggcctctctctgctgcctcttggtactcgctaacgcccgctctcgcccctcttttcaccccctgtctgacgaattagttaattatgtcaataaaaggaataccacctggcaggcagggcacaacttttacaatgtcgacatgtcctacttgaagagattgtgcggaaccttcctgggaggtcctaaaccaccacagcgcgtgatgtttactgaagatttgaaattaccagcatccttcgacgcccgagagcaatggccacagtgcccgacgattaaggaaattcgcgatcagggttcttgcggtagctgctgggcgttcggtgccgtagaagctatttcggacagaatttgcattcatacaaatgcccacgtttctgtggaggtcagtgcggaggatttactaacctgttgcggctcgatgtgtggagacggttgcaatggcggttacccagcagaggcatggaatttttggactagaaagggcttggtcagtggtgggctgtacgagtcccacgtgggttgtagaccttacagcataccaccctgtgaacaccacgttaatgggagcagacctccttgcaccggagagggagacaccccaaaatgttcgaaaatttgtgaacccggttattcacctacctacaaacaggataaacattacggctacaattcttactctgtctccaattctgaaaaggacattatggccgaaatctacaaaaacggacccgtggagggagccttcagcgtctacagtgattttctcctttacaagtccggcgtctatcaacacgtcaccggagaaatgatgggtggacacgctatccgcatactcggttggggagtagaaaatggtacaccgtattggttggtcgccaactcatggaacacggattggggcgacaatggtttttttaagatattaagagggcaggatcattgcggtatagaatcagaggtggttgccggcataccgagaacggatcagtattgggaaaagatttag

SEQ ID NO: 242250 - DNA, 738 bp, Artificial Sequence
  derived and/or modified sequence
atgccaggtgcaggaccattatctattccatgcagaatgagttgggccttcggggcagtagaagccatttccgacagaatttgtattcacactaacgcccatgtgagcgtagaggtttctgcagaggacttgctgacttgttgtggatcgatgtgtggtgacggatgtaacggcggctaccctgctgaggcatggaacttctggacccgaaaaggattggtatctggaggcctgtacgaaagtcacgtcggttgtcggccgtactcgataccaccttgtgagcatcacgtaaacggatctcgtcccccttgtactggagaaggcgacacccccaagtgttccaaaatatgtgagccaggctatagtcctacatataagcaggataaacactatggatacaattcctatagcgtcagtaactcagagaaagatattatggcagaaatctataagaacggccccgtggaaggcgctttttcagtatactccgattttttgctgtacaaaagcggcgtttaccagcatgtcactggcgagatgatgggaggccatgcaatacgaatactgggatggggcgtagaaaatggaaccccatactggcttgtggctaacagctggaacacagactggggggataacggattctttaaaattctgagaggtcaggatcactgcggaatagagagtgaagtggttgctggcattccaaggacggatcagtactgggagaagatttag

SEQ ID NO: 242251 - DNA, 2028 bp, Artificial Sequence
  derived and/or modified sequence
ggctccggcaaccgctccggcaacgccaaccgctccgctgcgcgcaggctgggctgcaggctctcggctgcagcgctgggtgtcttcaggcctatggagagcagcttgcgtgggctgggcctgcagtacctggtttgcatagatgattggcaggtgggcagcacggggaaggacctgtgagtggccaacctggttcaggtggatctaggatccggcttccaacatgtggcagctctgggcctccctctgctgcctgctggtgttggccaatgcccggagcaggccctctttccatcccctgtcggatgagctggtcaactatgtcaacaaacggaataccacgtggcaggccgggcacaacttctacaacgtggacatgagctacttgaagaggctatgtggtaccttcctgggtgggcccaagccaccccagagagttatgtttaccgaggacctgaagctgcctgcaagcttcgatgcacgggaacaatggccacagtgtcccaccatcaaagagatcagagaccagggctcctgtggctcctgctgggccttcggggctgtggaagccatctctgaccggatctgcatccacaccaatgcgcacgtcagcgtggaggtgtcggcggaggacctgctcacatgctgtggcagcatgtgtggggacggctgtaatggtggctatcctgctgaagcttggaacttctggacaagaaaaggcctggtttctggtggcctctatgaatcccatgtagggtgcagaccgtactccatccctccctgtgagcaccacgtcaacggctcccggcccccatgcacgggggagggagatacccccaagtgtagcaagatctgtgagcctggctacagcccgacctacaaacaggacaagcactacggatacaattcctacagcgtctccaatagcgagaaggacatcatggccgagatctacaaaaacggccccgtggagggagctttctctgtgtattcggacttcctgctctacaagtcaggagtgtaccaacacgtcaccggagagatgatgggtggccatgccatccgcatcctgggctggggagtggagaatggcacaccctactggctggttgccaactcctggaacactgactggggtgacaatggcttctttaaaatactcagaggacaggatcactgtggaatcgaatcagaagtggtggctggaattccacgcaccgatcagtactgggaaaagatctaatctgccgtgggcctgtcgtgccagtcctgggggcgagatcggggtagaaatgcattttattctttaagttcacgtaagatacaagtttcagacagggtctgaaggactggattggccaaacatcagacctgtcttccaaggagaccaagtcctggctacatcccagcctgtggttacagtgcagacaggccatgtgagccaccgctgccagcacagagcgtccttccccctgtagactagtgccgtagggagtacctgctgccccagctgactgtggccccctccgtgatccatccatctccagggagcaagacagagacgcaggaatggaaagcggagttcctaacaggatgaaagttcccccatcagttcccccagtacctccaagcaagtagctttccacatttgtcacagaaatcagaggagagacggtgttgggagccctttggagaacgccagtctcccaggccccctgcatctatcgagtttgcaatgtcacaacctctctgatcttgtgctcagcatgattctttaatagaagttttattttttcgtgcactctgctaatcatgtgggtgagccagtggaacagcgggagacctgtgctagttttacagattgcctccttatgacgcggctcaaaaggaaaccaagtggtcaggagttgtttctgacccactgatctctactaccacaaggaaaatagtttaggagaaaccagcttttactgtttttgaaaaattacagcttcaccctgtcaagttaacaaggaatgcctgtgccaa

SEQ ID NO: 242252 - DNA, 3591 bp, Artificial Sequence
  derived and/or modified sequence
gggcggcggaaggtggcgggagggggtgggggctgggaagcaccgtgcgcgggcggcgggagggcccgggcggggctgcgcggtggtcacgtggggcggggccgggagggtacttagggccggggctggcccaggctacggcggctgcagggctccggcaaccgctccggcaacgccaaccgctccgctgcgcgcaggctgggctgcaggctctcggctgcagcgctgggtggatctaggatccggcttccaacatgtggcagctctgggcctccctctgctgcctgctggtgttggccaatgcccggagcaggccctctttccatcccctgtcggatgagctggtcaactatgtcaacaaacggaataccacgtggcaggccgggcacaacttctacaacgtggacatgagctacttgaagaggctatgtggtaccttcctgggtgggcccaagccaccccagagagttatgtttaccgaggacctgaagctgcctgcaagcttcgatgcacgggaacaatggccacagtgtcccaccatcaaagagatcagagaccagggctcctgtggctcctgctgggccttcggggctgtggaagccatctctgaccggatctgcatccacaccaatgcgcacgtcagcgtggaggtgtcggcggaggacctgctcacatgctgtggcagcatgtgtggggacggctgtaatggtggctatcctgctgaagcttggaacttctggacaagaaaaggcctggtttctggtggcctctatgaatcccatgtagggtgcagaccgtactccatccctccctgtgagcaccacgtcaacggctcccggcccccatgcacgggggagggagatacccccaagtgtagcaagatctgtgagcctggctacagcccgacctacaaacaggacaagcactacggatacaattcctacagcgtctccaatagcgagaaggacatcatggccgagatctacaaaaacggccccgtggagggagctttctctgtgtattcggacttcctgctctacaagtcaggagtgtaccaacacgtcaccggagagatgatgggtggccatgccatccgcatcctgggctggggagtggagaatggcacaccctactggctggttgccaactcctggaacactgactggggtgacaatggcttctttaaaatactcagaggacaggatcactgtggaatcgaatcagaagtggtggctggaattccacgcaccgatcagtactgggaaaagatctaatctgccgtgggcctgtcgtgccagtcctgggggcgagatcggggtagaaatgcattttattctttaagttcacgtaagatacaagtttcagacagggtctgaaggactggattggccaaacatcagacctgtcttccaaggagaccaagtcctggctacatcccagcctgtggttacagtgcagacaggccatgtgagccaccgctgccagcacagagcgtccttccccctgtagactagtgccgtagggagtacctgctgccccagctgactgtggccccctccgtgatccatccatctccagggagcaagacagagacgcaggaatggaaagcggagttcctaacaggatgaaagttcccccatcagttcccccagtacctccaagcaagtagctttccacatttgtcacagaaatcagaggagagacggtgttgggagccctttggagaacgccagtctcccaggccccctgcatctatcgagtttgcaatgtcacaacctctctgatcttgtgctcagcatgattctttaatagaagttttattttttcgtgcactctgctaatcatgtgggtgagccagtggaacagcgggagacctgtgctagttttacagattgcctccttatgacgcggctcaaaaggaaaccaagtggtcaggagttgtttctgacccactgatctctactaccacaaggaaaatagtttaggagaaaccagcttttactgtttttgaaaaattacagcttcaccctgtcaagttaacaaggaatgcctgtgccaataaaagttttctccaacttgaagtctactctgatgggatctcagatcctttgtcactgcctatagacttgtagctgctgtctctctttgtccctgcagagaatcacgtcctggaactgcatgttcttgcgactcttgggacttcatcttaacttctcgctgccccagccatgttttcaaccatggcatccctcccccaattagttccctgtcatcctcgtcaaccttctctgtaagtgcctggtaagcttgcccttgcttaagaactcaaaacatagctgtgctctatttttttgttgttgttgtgactgacagagtgagattccgtctcccaggctggagtgcagtggcgccttctcagctcactgcaacctgcagcctcctagattcaagcgattctcctgcttcagccttccgagtagctgggatgacaggcactcaccaatatgcctgggtaatttttgtatttttaagtacatacaggatttcaccatgttggccaggctagtttcaaactcccggcctcaggtggtctgcctgcctcagcctcccaaagtgttgggattacaggcgtgagccactgggccctgcctgtattttttatcagccacaaatccagcaacaagctgaggattcagctcataaaacaggcttggtgtcttggtgatctcacataaccaagatgctaccccgtggggaaccacatccccctggatgccctccagccttggtttgggctggagtcagggcctgtatacagtattttgaatttgtatgccactggtttgcattgctggtcaggaactctagtgctttgcatagccctggtttagaaacatgttatagcagttcttggtatagagcaaactagaagaaccagcaatcattccactgtcctgccaaggtacacctcagtactccccttcccaactgaagtggtatgaggctagctctttccaaaagcattcaagtttggcttctgatgtgactcagaatttaggaaccagatgctagatcaaataagctctgaaaatctgaggaacattgtaggaaaggtttgttaagcatctcttaagtgccatgatgagcataacagccggccgtcgtggctcacgcctgtaatcccagcactttgggaggccaaggtgggaggatgacaaggtcaggagttcaagaccagcctggccaacatgctgaaacctcacctctactaaaaatacaaaaattagctgggcatggtggcacatgcctgtaatcccagctacttgggaggctgaggcaggagaatcgcttgaacccgggaggcggaggttgcagtgagccaagacagtgccagtgcactccagcctcggtgacagcgcaaggctccgtctcaataattaaaaaaaaaaaaaaaaaaaaaaaggccgggcgcagtggctcaagcctgtaatcccagcactttgggaggctgaggcgggcagatcacctgaggtcaggagttttgagatcagccttggcaacacggtgaaaccccatctctactaaaaatac

SEQ ID NO: 242253 - DNA, 3859 bp, Artificial Sequence
  derived and/or modified sequence
ggggcggggccgggagggtacttagggccggggctggcccaggctacggcggctgcagggctccggcaaccgctccggcaacgccaaccgctccgctgcgcgcaggctgggctgcaggctctcggctgcagcgctgggtgagtgctggggacccggggccaccgcagcgtaagtgacccagagaggtgtcctgatgccctctgtcctctccaggtggatctaggatccggcttccaacatgtggcagctctgggcctccctctgctgcctgctggtgttggccaatgcccggagcaggccctctttccatcccctgtcggatgagctggtcaactatgtcaacaaacggaataccacgtggcaggccgggcacaacttctacaacgtggacatgagctacttgaagaggctatgtggtaccttcctgggtgggcccaagccaccccagagagttatgtttaccgaggacctgaagctgcctgcaagcttcgatgcacgggaacaatggccacagtgtcccaccatcaaagagatcagagaccagggctcctgtggctcctgctgggccttcggggctgtggaagccatctctgaccggatctgcatccacaccaatgcgcacgtcagcgtggaggtgtcggcggaggacctgctcacatgctgtggcagcatgtgtggggacggctgtaatggtggctatcctgctgaagcttggaacttctggacaagaaaaggcctggtttctggtggcctctatgaatcccatgtagggtgcagaccgtactccatccctccctgtgagcaccacgtcaacggctcccggcccccatgcacgggggagggagatacccccaagtgtagcaagatctgtgagcctggctacagcccgacctacaaacaggacaagcactacggatacaattcctacagcgtctccaatagcgagaaggacatcatggccgagatctacaaaaacggccccgtggagggagctttctctgtgtattcggacttcctgctctacaagtcaggagtgtaccaacacgtcaccggagagatgatgggtggccatgccatccgcatcctgggctggggagtggagaatggcacaccctactggctggttgccaactcctggaacactgactggggtgacaatggcttctttaaaatactcagaggacaggatcactgtggaatcgaatcagaagtggtggctggaattccacgcaccgatcagtactgggaaaagatctaatctgccgtgggcctgtcgtgccagtcctgggggcgagatcggggtagaaatgcattttattctttaagttcacgtaagatacaagtttcagacagggtctgaaggactggattggccaaacatcagacctgtcttccaaggagaccaagtcctggctacatcccagcctgtggttacagtgcagacaggccatgtgagccaccgctgccagcacagagcgtccttccccctgtagactagtgccgtagggagtacctgctgccccagctgactgtggccccctccgtgatccatccatctccagggagcaagacagagacgcaggaatggaaagcggagttcctaacaggatgaaagttcccccatcagttcccccagtacctccaagcaagtagctttccacatttgtcacagaaatcagaggagagacggtgttgggagccctttggagaacgccagtctcccaggccccctgcatctatcgagtttgcaatgtcacaacctctctgatcttgtgctcagcatgattctttaatagaagttttattttttcgtgcactctgctaatcatgtgggtgagccagtggaacagcgggagacctgtgctagttttacagattgcctccttatgacgcggctcaaaaggaaaccaagtggtcaggagttgtttctgacccactgatctctactaccacaaggaaaatagtttaggagaaaccagcttttactgtttttgaaaaattacagcttcaccctgtcaagttaacaaggaatgcctgtgccaataaaagttttctccaacttgaagtctactctgatgggatctcagatcctttgtcactgcctatagacttgtagctgctgtctctctttgtccctgcagagaatcacgtcctggaactgcatgttcttgcgactcttgggacttcatcttaacttctcgctgccccagccatgttttcaaccatggcatccctcccccaattagttccctgtcatcctcgtcaaccttctctgtaagtgcctggtaagcttgcccttgcttaagaactcaaaacatagctgtgctctatttttttgttgttgttgtgactgacagagtgagattccgtctcccaggctggagtgcagtggcgccttctcagctcactgcaacctgcagcctcctagattcaagcgattctcctgcttcagccttccgagtagctgggatgacaggcactcaccaatatgcctgggtaatttttgtatttttaagtacatacaggatttcaccatgttggccaggctagtttcaaactcccggcctcaggtggtctgcctgcctcagcctcccaaagtgttgggattacaggcgtgagccactgggccctgcctgtattttttatcagccacaaatccagcaacaagctgaggattcagctcataaaacaggcttggtgtcttggtgatctcacataaccaagatgctaccccgtggggaaccacatccccctggatgccctccagccttggtttgggctggagtcagggcctgtatacagtattttgaatttgtatgccactggtttgcattgctggtcaggaactctagtgctttgcatagccctggtttagaaacatgttatagcagttcttggtatagagcaaactagaagaaccagcaatcattccactgtcctgccaaggtacacctcagtactccccttcccaactgaagtggtatgaggctagctctttccaaaagcattcaagtttggcttctgatgtgactcagaatttaggaaccagatgctagatcaaataagctctgaaaatctgaggaacattgtaggaaaggtttgttaagcatctcttaagtgccatgatgagcataacagccggccgtcgtggctcacgcctgtaatcccagcactttgggaggccaaggtgggaggatgacaaggtcaggagttcaagaccagcctggccaacatgctgaaacctcacctctactaaaaatacaaaaattagctgggcatggtggcacatgcctgtaatcccagctacttgggaggctgaggcaggagaatcgcttgaacccgggaggcggaggttgcagtgagccaagacagtgccagtgcactccagcctcggtgacagcgcaaggctccgtctcaataattaaaaaaaaaaaaaaaaaaaaaaaggccgggcgcagtggctcaagcctgtaatcccagcactttgggaggctgaggcgggcagatcacctgaggtcaggagttttgagatcagccttggcaacacggtgaaaccccatctctactaaaaatacaaaattagccaagcatgctggcacatgcctgtaatcccagctactcgggaggctgaggtacgagaatcgcttgaacctgggaggcagaggatgcagtgagccgagatcacgccattgcactccagcctgggggacaagagtgaatctgtgtctcaccaaaaaaaaaaagaaaaagaaagatgcttaacaaaggttaccataagccacaaattcataaccacttatccttccagtttcaagtagaatatattcataacctcaataaagttctccctgctcccaaa

SEQ ID NO: 242254 - DNA, 2011 bp, Artificial Sequence
  derived and/or modified sequence
ggctgcagggctccggcaaccgctccggcaacgccaaccgctccgctgcgcgcaggctgggctgcaggctctcggctgcagcgctgggtgtcttcaggcctatggagagcagcttgcgtgggctgggcctgcagtacctggtttgcatagatgattggcaggtggatctaggatccggcttccaacatgtggcagctctgggcctccctctgctgcctgctggtgttggccaatgcccggagcaggccctctttccatcccctgtcggatgagctggtcaactatgtcaacaaacggaataccacgtggcaggccgggcacaacttctacaacgtggacatgagctacttgaagaggctatgtggtaccttcctgggtgggcccaagccaccccagagagttatgtttaccgaggacctgaagctgcctgcaagcttcgatgcacgggaacaatggccacagtgtcccaccatcaaagagatcagagaccagggctcctgtggctcctgctgggccttcggggctgtggaagccatctctgaccggatctgcatccacaccaatgcgcacgtcagcgtggaggtgtcggcggaggacctgctcacatgctgtggcagcatgtgtggggacggctgtaatggtggctatcctgctgaagcttggaacttctggacaagaaaaggcctggtttctggtggcctctatgaatcccatgtagggtgcagaccgtactccatccctccctgtgagcaccacgtcaacggctcccggcccccatgcacgggggagggagatacccccaagtgtagcaagatctgtgagcctggctacagcccgacctacaaacaggacaagcactacggatacaattcctacagcgtctccaatagcgagaaggacatcatggccgagatctacaaaaacggccccgtggagggagctttctctgtgtattcggacttcctgctctacaagtcaggagtgtaccaacacgtcaccggagagatgatgggtggccatgccatccgcatcctgggctggggagtggagaatggcacaccctactggctggttgccaactcctggaacactgactggggtgacaatggcttctttaaaatactcagaggacaggatcactgtggaatcgaatcagaagtggtggctggaattccacgcaccgatcagtactgggaaaagatctaatctgccgtgggcctgtcgtgccagtcctgggggcgagatcggggtagaaatgcattttattctttaagttcacgtaagatacaagtttcagacagggtctgaaggactggattggccaaacatcagacctgtcttccaaggagaccaagtcctggctacatcccagcctgtggttacagtgcagacaggccatgtgagccaccgctgccagcacagagcgtccttccccctgtagactagtgccgtagggagtacctgctgccccagctgactgtggccccctccgtgatccatccatctccagggagcaagacagagacgcaggaatggaaagcggagttcctaacaggatgaaagttcccccatcagttcccccagtacctccaagcaagtagctttccacatttgtcacagaaatcagaggagagacggtgttgggagccctttggagaacgccagtctcccaggccccctgcatctatcgagtttgcaatgtcacaacctctctgatcttgtgctcagcatgattctttaatagaagttttattttttcgtgcactctgctaatcatgtgggtgagccagtggaacagcgggagacctgtgctagttttacagattgcctccttatgacgcggctcaaaaggaaaccaagtggtcaggagttgtttctgacccactgatctctactaccacaaggaaaatagtttaggagaaaccagcttttactgtttttgaaaaattacagcttcaccctgtcaagttaacaaggaatgcctgtgccaataaaagttttctccaacttg

SEQ ID NO: 242255 - DNA, 1387 bp, Artificial Sequence
  derived and/or modified sequence
ggccggggctggcccaggctacggcggctgcagggctccggcaaccgctccggcaacgccaaccgctccgctgcgcgcaggctgggctgcaggctctcggctgcagcgctgggtggatctaggatccggcttccaacatgtggcagctctgggcctccctctgctgcctgctggtgttggccaatgcccggagcaggccctctttccatcccctgtcggatgagctggtcaactatgtcaacaaacggaataccacgtggcaggccgggcacaacttctacaacgtggacatgagctacttgaagaggctatgtggtaccttcctgggtgggcccaagccaccccagagagttatgtttaccgaggacctgaagctgcctgcaagcttcgatgcacgggaacaatggccacagtgtcccaccatcaaagagatcagagaccagggctcctgtggctcctgctgggccttcggggctgtggaagccatctctgaccggatctgcatccacaccaatgcgcacgtcagcgtggaggtgtcggcggaggacctgctcacatgctgtggcagcatgtgtggggacggctgtaatggtggctatcctgctgaagcttggaacttctggacaagaaaaggcctggtttctggtggcctctatgaatcccatgtagggtgcagaccgtactccatccctccctgtgagcaccacgtcaacggctcccggcccccatgcacgggggagggagatacccccaagtgtagcaagatctgtgagcctggctacagcccgacctacaaacaggacaagcactacggatacaattcctacagcgtctccaatagcgagaaggacatcatggccgagatctacaaaaacggccccgtggagggagctttctctgtgtattcggacttcctgctctacaagtcaggagtgtaccaacacgtcaccggagagatgatgggtggccatgccatccgcatcctgggctggggagtggagaatggcacaccctactggctggttgccaactcctggaacactgactggggtgacaatggcttctttaaaatactcagaggacaggatcactgtggaatcgaatcagaagtggtggctggaattccacgcaccgatcagtactgggaaaagatctaatctgccgtgggcctgtcgtgccagtcctgggggcgagatcgggagaatcacgtcctggaactgcatgttcttgcgactcttgggacttcatcttaacttctcgctgccccagccatgttttcaaccatggcatccctcccccaattagttccctgtcatcctcgtcaaccttctctgtaagtgcctggtaagcttgcccttgcttaagaactcaaaacatagctgtgctc

SEQ ID NO: 242256 - DNA, 1436 bp, Artificial Sequence
  derived and/or modified sequence
ggccggggctggcccaggctacggcggctgcagggctccggcaaccgctccggcaacgccaaccgctccgctgcgcgcaggctgggctgcaggctctcggctgcagcgctgggctggtgtgcagtggtgcgaccacggctcacggcagcctcagccacccagatgtaagcgatctggttcccacctcagcctcccgagtagtggatctaggatccggcttccaacatgtggcagctctgggcctccctctgctgcctgctggtgttggccaatgcccggagcaggccctctttccatcccctgtcggatgagctggtcaactatgtcaacaaacggaataccacgtggcaggccgggcacaacttctacaacgtggacatgagctacttgaagaggctatgtggtaccttcctgggtgggcccaagccaccccagagagttatgtttaccgaggacctgaagctgcctgcaagcttcgatgcacgggaacaatggccacagtgtcccaccatcaaagagatcagagaccagggctcctgtggctcctgctgggccttcggggctgtggaagccatctctgaccggatctgcatccacaccaatgcgcacgtcagcgtggaggtgtcggcggaggacctgctcacatgctgtggcagcatgtgtggggacggctgtaatggtggctatcctgctgaagcttggaacttctggacaagaaaaggcctggtttctggtggcctctatgaatcccatgtagggtgcagaccgtactccatccctccctgtgagcaccacgtcaacggctcccggcccccatgcacgggggagggagatacccccaagtgtagcaagatctgtgagcctggctacagcccgacctacaaacaggacaagcactacggatacaattcctacagcgtctccaatagcgagaaggacatcatggccgagatctacaaaaacggccccgtggagggagctttctctgtgtattcggacttcctgctctacaagtcaggagtgtaccaacacgtcaccggagagatgatgggtggccatgccatccgcatcctgggctggggagtggagaatggcacaccctactggctggttgccaactcctggaacactgactggggtgacaatggcttctttaaaatactcagaggacaggatcactgtggaatcgaatcagaagtggtggctggaattccacgcaccgatcagtactgggaaaagatctaatctgccgtgggcctgtcgtgccagtcctgggggcgagatcgggagaatcacgtcctggaactgcatgttcttgcgactcttgggacttcatcttaacttctcgctgccccagccatgttttcaaccatggcatccctcccccaattagttccctgtcatcctcgtcaaccttctctgtaagtgcctggtaa

SEQ ID NO: 242257 - DNA, 2009 bp, Artificial Sequence
  derived and/or modified sequence
ggctggcccaggctacggcggctgcagggctccggcaaccgctccggcaacgccaaccgctccgctgcgcgcaggctgggctgcaggctctcggctgcagcgctgggctggtgtgcagtggtgcgaccacggctcacggcagcctcagccacccagatgtaagcgatctggttcccacctcagcctcccgagtagtggatctaggatccggcttccaacatgtggcagctctgggcctccctctgctgcctgctggtgttggccaatgcccggagcaggccctctttccatcccctgtcggatgagctggtcaactatgtcaacaaacggaataccacgtggcaggccgggcacaacttctacaacgtggacatgagctacttgaagaggctatgtggtaccttcctgggtgggcccaagccaccccagagagttatgtttaccgaggacctgaagctgcctgcaagcttcgatgcacgggaacaatggccacagtgtcccaccatcaaagagatcagagaccagggctcctgtggctcctgctgggccttcggggctgtggaagccatctctgaccggatctgcatccacaccaatgcgcacgtcagcgtggaggtgtcggcggaggacctgctcacatgctgtggcagcatgtgtggggacggctgtaatggtggctatcctgctgaagcttggaacttctggacaagaaaaggcctggtttctggtggcctctatgaatcccatgtagggtgcagaccgtactccatccctccctgtgagcaccacgtcaacggctcccggcccccatgcacgggggagggagatacccccaagtgtagcaagatctgtgagcctggctacagcccgacctacaaacaggacaagcactacggatacaattcctacagcgtctccaatagcgagaaggacatcatggccgagatctacaaaaacggccccgtggagggagctttctctgtgtattcggacttcctgctctacaagtcaggagtgtaccaacacgtcaccggagagatgatgggtggccatgccatccgcatcctgggctggggagtggagaatggcacaccctactggctggttgccaactcctggaacactgactggggtgacaatggcttctttaaaatactcagaggacaggatcactgtggaatcgaatcagaagtggtggctggaattccacgcaccgatcagtactgggaaaagatctaatctgccgtgggcctgtcgtgccagtcctgggggcgagatcggggtagaaatgcattttattctttaagttcacgtaagatacaagtttcagacagggtctgaaggactggattggccaaacatcagacctgtcttccaaggagaccaagtcctggctacatcccagcctgtggttacagtgcagacaggccatgtgagccaccgctgccagcacagagcgtccttccccctgtagactagtgccgtagggagtacctgctgccccagctgactgtggccccctccgtgatccatccatctccagggagcaagacagagacgcaggaatggaaagcggagttcctaacaggatgaaagttcccccatcagttcccccagtacctccaagcaagtagctttccacatttgtcacagaaatcagaggagagacggtgttgggagccctttggagaacgccagtctcccaggccccctgcatctatcgagtttgcaatgtcacaacctctctgatcttgtgctcagcatgattctttaatagaagttttattttttcgtgcactctgctaatcatgtgggtgagccagtggaacagcgggagacctgtgctagttttacagattgcctccttatgacgcggctcaaaaggaaaccaagtggtcaggagttgtttctgacccactgatctctactaccacaaggaaaatagtttaggagaaaccagcttttactgtttttgaaaaattacagcttcaccctgtcaagttaacaag

SEQ ID NO: 242258 - DNA, 1989 bp, Artificial Sequence
  derived and/or modified sequence
ggctggcccaggctacggcggctgcagggctccggcaaccgctccggcaacgccaaccgctccgctgcgcgcaggctgggctgcaggctctcggctgcagcgctggcacgctggcggccccttgagccccaacctggataccataggggaggagcagagaagccaggaacaccacagccctgggccaaggtggatctaggatccggcttccaacatgtggcagctctgggcctccctctgctgcctgctggtgttggccaatgcccggagcaggccctctttccatcccctgtcggatgagctggtcaactatgtcaacaaacggaataccacgtggcaggccgggcacaacttctacaacgtggacatgagctacttgaagaggctatgtggtaccttcctgggtgggcccaagccaccccagagagttatgtttaccgaggacctgaagctgcctgcaagcttcgatgcacgggaacaatggccacagtgtcccaccatcaaagagatcagagaccagggctcctgtggctcctgctgggccttcggggctgtggaagccatctctgaccggatctgcatccacaccaatgcgcacgtcagcgtggaggtgtcggcggaggacctgctcacatgctgtggcagcatgtgtggggacggctgtaatggtggctatcctgctgaagcttggaacttctggacaagaaaaggcctggtttctggtggcctctatgaatcccatgtagggtgcagaccgtactccatccctccctgtgagcaccacgtcaacggctcccggcccccatgcacgggggagggagatacccccaagtgtagcaagatctgtgagcctggctacagcccgacctacaaacaggacaagcactacggatacaattcctacagcgtctccaatagcgagaaggacatcatggccgagatctacaaaaacggccccgtggagggagctttctctgtgtattcggacttcctgctctacaagtcaggagtgtaccaacacgtcaccggagagatgatgggtggccatgccatccgcatcctgggctggggagtggagaatggcacaccctactggctggttgccaactcctggaacactgactggggtgacaatggcttctttaaaatactcagaggacaggatcactgtggaatcgaatcagaagtggtggctggaattccacgcaccgatcagtactgggaaaagatctaatctgccgtgggcctgtcgtgccagtcctgggggcgagatcggggtagaaatgcattttattctttaagttcacgtaagatacaagtttcagacagggtctgaaggactggattggccaaacatcagacctgtcttccaaggagaccaagtcctggctacatcccagcctgtggttacagtgcagacaggccatgtgagccaccgctgccagcacagagcgtccttccccctgtagactagtgccgtagggagtacctgctgccccagctgactgtggccccctccgtgatccatccatctccagggagcaagacagagacgcaggaatggaaagcggagttcctaacaggatgaaagttcccccatcagttcccccagtacctccaagcaagtagctttccacatttgtcacagaaatcagaggagagacggtgttgggagccctttggagaacgccagtctcccaggccccctgcatctatcgagtttgcaatgtcacaacctctctgatcttgtgctcagcatgattctttaatagaagttttattttttcgtgcactctgctaatcatgtgggtgagccagtggaacagcgggagacctgtgctagttttacagattgcctccttatgacgcggctcaaaaggaaaccaagtggtcaggagttgtttctgacccactgatctctactaccacaaggaaaatagtttaggagaaaccagcttttactgtttttgaaaaattacagcttcaccc

SEQ ID NO: 242259 - DNA, 958 bp, Artificial Sequence
  derived and/or modified sequence
ggctgcagggctccggcaaccgctccggcaacgccaaccgctccgctgcgcgcaggctgggctgcaggctctcggctgcagcgctgggtggatctaggatccggcttccaacatgtggcagctctgggcctccctctgctgcctgctggtgttggccaatgcccggagcaggccctctttccatcccctgtcggatgagctgggccttcggggctgtggaagccatctctgaccggatctgcatccacaccaatgcgcacgtcagcgtggaggtgtcggcggaggacctgctcacatgctgtggcagcatgtgtggggacggctgtaatggtggctatcctgctgaagcttggaacttctggacaagaaaaggcctggtttctggtggcctctatgaatcccatgtagggtgcagaccgtactccatccctccctgtgagcaccacgtcaacggctcccggcccccatgcacgggggagggagatacccccaagtgtagcaagatctgtgagcctggctacagcccgacctacaaacaggacaagcactacggatacaattcctacagcgtctccaatagcgagaaggacatcatggccgagatctacaaaaacggccccgtggagggagctttctctgtgtattcggacttcctgctctacaagtcaggagtgtaccaacacgtcaccggagagatgatgggtggccatgccatccgcatcctgggctggggagtggagaatggcacaccctactggctggttgccaactcctggaacactgactggggtgacaatggcttctttaaaatactcagaggacaggatcactgtggaatcgaatcagaagtggtggctggaattccacgcaccgatcagtactgggaaaagatctaatctgccgtgggcctgtcgtgccagtcctgggggcgagatcggggtagaaatgcattttattc

SEQ ID NO: 242260 - DNA, 1020 bp, Artificial Sequence
  derived and/or modified sequence
atgtggcagctgtgggccagcctgtgctgcctgctggtgctggccaacgccagaagcagacccagcttccaccccctgagcgacgagctggtgaactacgtgaacaagagaaacaccacctggcaggccggccacaacttctacaacgtggacatgagctacctgaagagactgtgcggcaccttcctgggcggccccaagcccccccagagagtgatgttcaccgaggacctgaagctgcccgccagcttcgacgccagagagcagtggccccagtgccccaccatcaaggagatcagagaccagggcagctgcggcagctgctgggccttcggcgccgtggaggccatcagcgacagaatctgcatccacaccaacgcccacgtgagcgtggaggtgagcgccgaggacctgctgacctgctgcggcagcatgtgcggcgacggctgcaacggcggctaccccgccgaggcctggaacttctggaccagaaagggcctggtgagcggcggcctgtacgagagccacgtgggctgcagaccctacagcatccccccctgcgagcaccacgtgaacggcagcagacccccctgcaccggcgagggcgacacccccaagtgcagcaagatctgcgagcccggctacagccccacctacaagcaggacaagcactacggctacaacagctacagcgtgagcaacagcgagaaggacatcatggccgagatctacaagaacggccccgtggagggcgccttcagcgtgtacagcgacttcctgctgtacaagagcggcgtgtaccagcacgtgaccggcgagatgatgggcggccacgccatcagaatcctgggctggggcgtggagaacggcaccccctactggctggtggccaacagctggaacaccgactggggcgacaacggcttcttcaagatcctgagaggccaggaccactgcggcatcgagagcgaggtggtggccggcatccccagaaccgaccagtactgggagaagatctag

SEQ ID NO: 242261 - DNA, 333 bp, Artificial Sequence
  derived and/or modified sequence
atgtggcagctgtgggccagcctgtgctgcctgctggtgctggccaacgccagaagcagacccagcttccaccccctgagcgacgagctggtgaactacgtgaacaagagaaacaccacctggcaggccggccacaacttctacaacgtggacatgagctacctgaagagactgtgcggcaccttcctgggcggccccaagcccccccagagagtgatgttcaccgaggacctgaagctgcccgccagcttcgacgccagagagcagtggccccagtgccccaccatcaaggagatcagagaccagggcagctgcggcagctgctggctgtag

SEQ ID NO: 242262 - DNA, 738 bp, Artificial Sequence
  derived and/or modified sequence
atgcccggcgccggccccctgagcatcccctgcagaatgagctgggccttcggcgccgtggaggccatcagcgacagaatctgcatccacaccaacgcccacgtgagcgtggaggtgagcgccgaggacctgctgacctgctgcggcagcatgtgcggcgacggctgcaacggcggctaccccgccgaggcctggaacttctggaccagaaagggcctggtgagcggcggcctgtacgagagccacgtgggctgcagaccctacagcatccccccctgcgagcaccacgtgaacggcagcagacccccctgcaccggcgagggcgacacccccaagtgcagcaagatctgcgagcccggctacagccccacctacaagcaggacaagcactacggctacaacagctacagcgtgagcaacagcgagaaggacatcatggccgagatctacaagaacggccccgtggagggcgccttcagcgtgtacagcgacttcctgctgtacaagagcggcgtgtaccagcacgtgaccggcgagatgatgggcggccacgccatcagaatcctgggctggggcgtggagaacggcaccccctactggctggtggccaacagctggaacaccgactggggcgacaacggcttcttcaagatcctgagaggccaggaccactgcggcatcgagagcgaggtggtggccggcatccccagaaccgaccagtactgggagaagatctag

SEQ ID NO: 242263 - RNA, 1020 nt, Artificial Sequence
  derived and/or modified sequence
auguggcagcugugggcaagccucuguugccugcuggugcuugcaaacgcccggagcagaccaucguuucacccucuuuccgacgagcucguuaacuacgugaacaaaagaaacacaacuuggcaggccggacauaauuuuuacaacgucgauaugucauaccucaaaaggcugugcgguacuuuuuuagggggaccaaagcccccucagcgugucauguuuacagaggaccuuaagcugccagcuucuuuugaugcuagagaacaauggccccaauguccaacaauuaaagagauuagagaccagggcagcuguggcaguuguugggcauuuggagcuguggaggcaaucagugauagaaucugcauccacaccaaugcacacguuucaguagaagugagugcugaagaccuucugacaugcuguggaaguauguguggcgacggcuguaacggcgguuacccagcagaagcauggaacuuuuggaccaggaaggguuugguuagcggcggcuuguaugagagccauguugguugccgcccuuacuccauaccuccuugcgagcaccacgucaauggcucaagaccccccugcacaggcgagggggauaccccaaaauguagcaaaaucugcgaaccgggcuacuccccuacauauaaacaagacaaacauuaugguuauaacagcuauucagucucuaauuccgagaaagacaucauggccgagaucuacaagaacggaccuguugagggagcauuuucuguguacagugacuuccuucuguauaaaucugguguguaccaacacgucacaggagagaugaugggcggccaugccaucaggauccugggauggggaguggagaaugggaccccauacuggcugguagcuaauagcuggaauacagauuggggggacaacggauuuuucaagauucuucggggccaagaucacugcggcaucgaguccgaagucguggccggaauaccuaggaccgaccaguacugggagaagauauag

SEQ ID NO: 242264 - RNA, 1020 nt, Artificial Sequence
  derived and/or modified sequence
auguggcagcucugggccucucugugcugccuucuggugcuggccaaugccagaagucgcccaucuuuucacccccucucugaugagcugguaaauuacguuaacaagcgaaacacaacauggcaggccggccacaacuuuuauaauguugacaugagcuauuuaaagaggcuuugcggcacuuuccuuggcggacccaaaccuccccagcgcguuauguucaccgaagaucuaaaacuuccggcuucuuuugacgcccgggaacaguggccccaguguccaaccauuaaggagauccgggaccagggauccuguggaucaugcugggccuucggcgccguagaagcuauauccgaucguauuugcauccacaccaaugcucauguaucaguggaagucucugccgaagaccugcucaccugcugugggucuaugugcggcgacggguguaaugguggguacccagcugaagcguggaacuuuuggacccggaagggucuugugucuggaggccuguacgagucucacgucggcuguagaccuuacucaaucccuccaugugagcaccaugugaaugguagccgccccccguguacaggagaaggggacacacccaaaugcucaaagauuugugaaccuggauacucacccacauauaaacaagacaagcacuacggcuacaacaguuauucugugucuaacucagaaaaagauaucauggcugagaucuauaagaauggaccgguggaaggcgccuuuucaguguacagugacuuccucuuauacaaguccggaguguaucagcacgugacuggcgaaaugaugggugggcaugcuauucgaauccucggcuggggcguagaaaacggcacacccuauuggcuggucgccaauucuuggaacaccgauuggggcgauaaugguuuuuuuaaaauccugcgcggacaggaccauugcgguaucgaauccgaagugguagccggaaucccuagaaccgaccaguacugggagaagaucuag

SEQ ID NO: 242265 - RNA, 333 nt, Artificial Sequence
  derived and/or modified sequence
auguggcaacuuugggcuucauuaugcugucuucuaguucuggcuaaugcgcgcucccgcccuuccuuccauccucuguccgacgagcuggugaacuacgucaauaagcgcaacacuacauggcaggccggacacaacuucuauaauguagauaugaguuaccuaaagagacucugcggaaccuuuuugggcggaccaaagccuccacaacgcguaauguuuacugaggaucugaaguuaccugccuccuucgacgcacgcgaacaguggccacagugcccuaccaucaaagaaaucagagaucaaggguccugcgguucuugcuggcucuag

SEQ ID NO: 242266 - RNA, 1020 nt, Artificial Sequence
  derived and/or modified sequence
auguggcagcuuugggccucccucugcugcuuacugguuuuggcuaaugcccgaucucgcccauccuuccacccccuguccgacgagcugguuaacuacgucaauaaaagaaacaccacuuggcaggccgggcauaauuuuuacaacguugacaugaguuaucuuaaacgccucugugguacguuucugggcggaccuaaaccaccucagcgcgugauguuuaccgaagaccugaagcuccccgccucauucgaugcucgugaacaauggccucagugccccacaauuaaggaaaucagagaccaaggcuccugcggaaguuguugggccuucggagccguggaagccauuucugaucgcaucugcauacacaccaacgcucacgucuccguugagguuucggccgaggacuuguugacguguugcggguccaugugcggcgacgguuguaaugggggauacccagcagaagcguggaauuuuuggacaaggaaaggacuggugaguggagggcuguaugagucacauguuggcuguaggccuuauucuaucccuccaugugaacaccaugugaauggaucucgaccucccuguacuggagagggugauaccccuaaguguaguaagaucugcgagcccggguauucucccacauauaaacaggacaagcacuaugguuacaacuccuacagugugucaaauucugagaaggauauuauggccgagaucuauaaaaacggcccuguagaaggcgccuuuuccgucuacucugacuuccugcuguauaagucuggaguguaccaacacgugacaggcgaaaugaugggcggccacgcuauaaggauucugggcuggggagucgaaaacggaaccccauacuggcucguggcuaacagcuggaauacagauuggggagauaacggauucuucaagauccugcgagggcaagaccauuguggaauugagucagaaguggucgcugguaucccuaggacagaucaauacugggagaagaucuag

SEQ ID NO: 242267 - RNA, 1020 nt, Artificial Sequence
  derived and/or modified sequence
auguggcaacuuugggcuuccuuguguugccuguuagugcuagccaacgcgcggucaaggccaucuuuucacccucugucugacgaacuggucaacuacguaaacaaaaggaauaccaccuggcaagcuggccauaacuucuauaacgucgauaugucuuacuuaaaacgacuuugcgggacauucuugggaggaccuaaaccuccccagagaguaauguucaccgaagaccugaaacucccagcuagcuuugaugcacgggagcaguggccucagugcccuacaauaaaagagauaagggaucaggguucuugcggcagcugcugggcguucggggccguggaggccauuagcgaucgaauuugcauucauaccaacgcucacgugucuguugaagugucagcggaagacuugcucacuuguugcgguagcaugugcggcgauggaugcaacggagguuauccagcugaggccuggaacuuuuggaccaggaaaggucugguuucugguggucuguacgaaucccacguagguugccggccuuacuccauuccacccugcgagcaucaugucaacgggagcagaccaccuuguacaggagagggcgauaccccgaaauguagcaaaauuugugagcccggcuacucccccacauacaagcaagauaagcacuacggguacaacucauauagcguaucuaacucugagaaggacaucauggcugagaucuauaaaaacgggcccgucgaaggagcuuucucaguguacuccgacuuccuauuauacaaaucugggguguaucagcaugucacuggugagaugauggggggucaugccauucggauucuggguuggggggucgagaacggcacgccauacugguuaguggcuaacuccuggaacaccgacuggggggauaacgguuucuuuaaaauccugcgcggucaggaucacugcggcauugaaagcgaaguuguugcaggcaucccuagaacugaccaauacugggagaagauuuag

SEQ ID NO: 242268 - RNA, 1020 nt, Artificial Sequence
  derived and/or modified sequence
auguggcaacuuugggcaucccuuuguugccuccuuguuuuagcuaacgccaggucccgcccgucguuccaucccuuauccgaugaacucgugaauuacguaaauaagagaaacacuacguggcaggcaggucauaauuuuuacaacguagacaugucuuacuugaagcgacugugugguaccuuuuugggaggaccaaaaccgccccagcgagucauguucacugaggaccuuaaacucccugcaagcuuugaugcgcgcgagcaauggccucagugccccacuauaaaggagauaagagaucaggggucgugcggcucauguugggcauucggcgcuguggaggccaucucggacaggaucugcauccauaccaacgcacacguuagugucgagguuagcgcggaagaucugcuaacaugcugcggcaguaugugcggagacggcugcaacggugguuauccagcggaagcauggaacuucuggacaaggaaaggccuugugagugguggacuuuacgagucucacgucggcugucgccccuacaguaucccgccgugugagcaucacgugaaugguuccagaccuccuugcaccggcgaaggcgacaccccaaaguguucaaagaucugugagcccggcuacuccccaacauacaaacaggauaagcauuauggguauaacucuuacagugucaguaacagcgagaaagauauaauggcagaaauauacaaaaauggaccagucgaaggagccuuuucaguguacagcgauuuucuccuguacaaguccggcguguaucagcauguaaccggugagaugaugggggggcacgcaauuaggauccuugguuggggcguggagaacgggacuccuuacuggcucguggcuaacagcuggaacacugauuggggggauaacgguuucuuuaaaauuuugagggggcaggaccacugcggcauagaaagcgaagucgucgcaggcauaccaagaacagaccaguacugggagaaaauuuag

SEQ ID NO: 242269 - RNA, 1020 nt, Artificial Sequence
  derived and/or modified sequence
auguggcaacugugggcuagccucuguugcuuauuaguccucgcuaaugcacgaucgcgcccaagcuuccauccauugucagacgaauuaguaaauuacguuaauaaaaggaauacgaccuggcaagcugggcacaacuucuacaauguugacaugagcuaucucaagagacucugcgggacauuccuuggcgggccuaagccaccacagagagugauguucacggaggaccugaaacuaccagcaucauucgaugcucgggaacaguggccucagugcccuaccauaaaggagauacgagaccaaggcaguugcggaucuugcugggcguucggggcaguagaagcgauuuccgauagaaucuguauacacacuaaugcacacguuuccguggaagucucugccgaggaccugcuuaccugcuguggaagcauguguggugauggcugcaacggcggguacccggcagaagcauggaacuucuggacucggaaaggucucgugagcggcggccucuacgaaagucauguaggaugucgaccauacagcaucccacccugcgaacaucaugucaacggcagccgaccuccuugcacaggugaaggggauaccccuaaauguagcaaaaucugugagcccggauauucucccaccuacaaacaggacaaacacuacggcuauaauucuuacagcguguccaacucugaaaaagauaucauggccgaaauauacaaaaacggucccguggagggagccuucucugucuacagcgauuuucuccuguauaagagcggcguguaucaacauguuaccggcgaaaugaugggggggcacgcaauacgcauccuggguuggggcguggagaaugggacccccuacuggcuggucgcuaauucuuggaacacugauuggggggauaaugguuucuucaaaauccugcgggggcaggaucacugugggaucgaaucggaaguaguggccggaaucccuagaacagaccaguauugggagaaaauuuag

SEQ ID NO: 242270 - RNA, 1020 nt, Artificial Sequence
  derived and/or modified sequence
auguggcagcucugggccucucucugcugccugcuggugcucgccaaugccaggaguagacccuccuuccauccucuguccgacgaacuggugaacuacgugaacaaacggaacacaacauggcaagcagggcauaauuucuacaaugucgauaugucauaucugaaacggcucugugggacauuucuuggaggacccaaaccaccacagcgggucauguucaccgaagaccucaaacugccagcuuccuuugacgcacgagaacaguggccccaauguccgacuauuaaagaaauaagagaccagggaucaugcgggagcuguugggccuuuggagccguggaggcuauaagugacagaaucuguauccacacaaacgcccacguaagcgucgaagucucugcugaagaccugcucacaugcugcggaucaaugugcggagacgggugcaacggcggguacccugccgaggcauggaacuucuggacucggaagggccuggugucgggcggacuguaugagucucacgugggaugucgacccuauucaaucccuccuugcgaacaccaugucaaugguagccgcccuccuugcacuggcgagggggauacuccaaaaugcuccaagaucugcgagccaggauacuccccuacauacaaacaggauaagcauuacggauauaacagcuauuccguguccaauucugagaaagauauuauggcugagauuuacaagaauggcccgguugagggugcauuuagcguguauucugacuuccugcuauacaaauccggaguauaccaacauguuaccggcgaaaugauggguggacaugccauacgcauccugggauggggcguggagaauggaacuccuuauuggcugguugcuaacagcuggaauaccgacuggggcgauaacgguuuuuucaaaauccugaggggacaggaccacugugguauugagucugaaguuguggcaggcaucccccggaccgaucaauauugggagaagauauag

SEQ ID NO: 242271 - RNA, 1020 nt, Artificial Sequence
  derived and/or modified sequence
auguggcagcugugggcaucccuuuguugccuccugguguuggccaaugcccgcucccgaccuucuuuccauccguuaagugacgaacugguuaauuacgugaacaagcggaacacuacuuggcaggccggucacaauuucuauaauguagacaugucauaccugaagaggcugugugguaccuuccuaggcggcccaaagcccccgcaacgcgugauguuuacugaggaccucaagcucccugccaguuuugacgcccgugagcaguggccccaaugccccaccauuaaagaaauccgagaucaagguagcugcggcucgugcugggcauuuggcgccguggaggcuauaucagacagaauuugcauacacacuaacgcacaugucuccgucgagguuuccgcugaagaucugcugacauguugugggucuauguguggcgaugguugcaauggaggcuaucccgcggaggccuggaauuuuuggacacggaagggcuuggugagcgggggguuguacgaaucccacgucgggugucguccguauuccauuccgccgugugagcaccacgucaauggcucaagaccacccugcacuggcgaaggcgauacccccaaaugcucuaaaaucugcgagcccgguuacucaccaaccuacaagcaggauaagcauuacggguauaauaguuacuccgugucuaauucggaaaaggacaucauggccgaaauauauaaaaauggacccguggagggugcuuucuccguauacucugacuuccuucucuauaagucuggaguauaucagcacguaacuggagaaaugaugggcggccacgccauuaggauucugggauggggaguggagaauggcacacccuacuggcugguggcaaauaguuggaauacagauuggggagauaauggguucuuuaaaauucugaggggucaagaucauugcggcauugaaucugaggucgucgccggcauuccucgaaccgaccaguacugggagaaaauuuag

SEQ ID NO: 242272 - RNA, 738 nt, Artificial Sequence
  derived and/or modified sequence
augccuggggccggcccccucuccaucccaugucgcaugucgugggccuucggggcaguggaggcaaucagugacagaauuugcauccauacaaacgcucacguaucagucgaggugucugcggaagaccuguuaacuuguugcggaaguaugugcggggaugguuguaaugguggguaucccgcagaagccuggaauuucuggaccagaaagggccuggucagcggaggcuuguaugagucacauguugguuguaggccuuauagcauuccgccuugugaacaccacguuaacggcaguagaccuccaugcaccggcgagggcgacaccccuaaguguuccaagauuugugagccuggcuauucaccuacuuauaaacaggauaagcacuacggauauaacagcuacagcguuaguaacagugagaaggacaucauggcagaaauuuauaagaaugggcccgucgaaggagcuuucaguguguauucggacuuccuguuguacaagucuggaguguaucagcacgugaccggagaaaugaugggcggccacgcaauccgaauccucggcuggggaguggaaaacggcacaccauauuggcucgucgcaaauuccuggaauaccgauuggggcgauaacgguuuuuucaagauucucagaggacaggaucacugcgguaucgagagcgaaguggucgcuggcauaccacguacagaccaauauugggaaaaaauauag

SEQ ID NO: 242273 - RNA, 1020 nt, Artificial Sequence
  derived and/or modified sequence
auguggcaauugugggccagucugugcugcuugcugguguuggcaaacgcucgauccaggccauccuuccacccucuuucagacgagcucgugaauuacgucaauaagagaaacacaacuuggcaggccggacacaauuuuuauaacguagacauguccuaucugaagagacuaugcggaacauuccucggaggaccuaaacccccccagcgugugauguucacagaagaccuuaaauugcccgcgucauucgaugcccgcgagcaguggccucaguguccaaccauaaaggaaaucagagaucaggggagcugcggcaguugcugggcauucggagccguagaggcuauuucggaccgcaucugcauucauaccaacgcacacguauccguggaaguaagcgccgaagaucuccucacguguugcggguccauguguggagacggauguaacggaggguacccugccgaagccuggaacuuuuggacucgaaaggggcugguaagcgguggucuguacgagagccaugucgggugucggcccuauucaaucccaccuugcgagcaccaugucaacgguucccguccaccauguaccggagagggcgacacuccaaaguguaguaagaucugugaacccggguacucuccaacuuauaagcaggauaagcauuaugguuacaauagcuacagcguaaguaauucggagaaggacaucauggccgagaucuacaaaaauggcccgguggaaggcgcguuuaguguguacucagauuuuuuacucuauaaauccggcguauaucagcacguuaccggcgaaaugaugggggggcaugcaauccggauccugggauggggcguagaaaacggaacuccguacugguugguggcgaauagcuggaauacagacuggggugauaaugguuuuuuuaaaauccuucgggggcaggaccacugugguauugaaucagaagugguggccggaauuccaagaacggaucaauauugggagaagauuuag

SEQ ID NO: 242274 - RNA, 1020 nt, Artificial Sequence
  derived and/or modified sequence
auguggcaacucugggccucucuuugcugucugcugguccucgccaacgcuaggucuagaccuucauuucauccucugucagaugaauuaguaaacuacgugaauaagcgaaacaccacuuggcaagcuggacacaacuucuacaauguugacaugagcuaccuuaaacggcucuguggcacauuucuaggcgguccgaagccaccacagcgcguuauguucaccgaagaccucaaguugcccgccuccuucgaugcccgcgaacaguggccgcaguguccaaccauuaaggaaauccgcgaucagggauccuguggauccuguugggcauucggcgcuguggaggcaaucucagauagaauuuguauucauacuaaugcccacguaucagucgagguaucugcugaggaucucuuaaccuguuguggaagcauguguggagacgggugcaacggcgguuacccagcagaagccuggaauuucuggaccagaaagggacucgucucaggcggacucuaugagagccacgucggauguagaccauauuccauuccuccuugcgaacaucacgugaacggcagccggccgccaugcacuggcgaaggggacacacccaaaugcucaaagauuugugaaccuggauacucacccacauauaaacaagacaagcacuacggcuacaacaguuauucugugucuaacucagaaaaagauaucauggcugagaucuauaagaauggaccgguggaaggcgccuuuucaguguacagugacuuccucuuauacaaguccggaguguaucagcacgugacuggcgaaaugaugggugggcaugcuauucgaauccucggcuggggcguagaaaacggcacacccuauuggcuggucgccaauucuuggaacacagauuggggcgauaauggcuucuuuaaaauacuccguggacaagaccauuguggcauagaaucagaggucgucgcuggaaucccuagaacagaucaguauugggagaagauuuag

SEQ ID NO: 242275 - RNA, 333 nt, Artificial Sequence
  derived and/or modified sequence
auguggcaacuuugggcuucauuaugcugucuucuaguucuggcuaaugcgcgcucccgcccuuccuuccauccucuguccgacgagcuggugaacuacgucaauaagcgcaacacuacauggcaggccggacacaacuucuauaauguagauaugaguuaccuaaagagacucugcggaaccuuuuugggcggaccaaagccuccacaacgcguaauguuuacugaggaucugaaguuaccugccuccuucgacgcacgcgaacaguggccacagugcccuaccaucaaagaaaucagagaucaggguucuugugguagcuguuggcuuuag

SEQ ID NO: 242276 - RNA, 1020 nt, Artificial Sequence
  derived and/or modified sequence
auguggcaguuaugggccagucuuuguugccugcugguucuggcaaaugcucgaucucgaccaagcuuucaccccuugucagaugaacucgugaauuacguaaauaagaggaauacaacauggcaggccggucauaauuuuuacaauguggauaugagcuaucugaagcgauugugugguacguuccucggcggacccaagccaccacaaagagugauguuuacugaggauuuaaaacugcccgccucauucgaugcaagggagcaguggccccagugcccaaccauuaaggagauacgcgaucaagguucauguggcagcugcugggccuuuggcgcuguugaagcgaucucagauagaauuugcauccauacuaaugcccacgucagcguagagguaagugcugaagaucugcuuaccuguugcggcagcaugugcggagacgguugcaauggaggcuaucccgccgaagcuuggaauuucuggacucggaaaggacugguuucuggcgguuuauacgagucucaugucgguugccguccauauucaaucccccccugugagcaccacgucaacggaagcaggccacccugcacuggagagggagauacgccuaaauguucgaagauuugcgaacccggcuacucgccuacauacaaacaagacaagcauuacggguauaauaguuauagugugucuaauagcgagaaagauauuauggccgaaaucuacaagaaugggccagucgaaggcgccuuuagcguguacucugacuuucuccuauauaaaagcggcguguaccaacacgugacuggcgagaugaugggaggacaugcaauccgaauacuugguuggggaguugagaacggaacaccauacugguuaguggcaaacaguuggaauacagauuggggagacaauggauucuuuaaaauucuuagggggcaggaucauuguggcaucgaguccgaagugguagcaggcaucccaagaacagaucaauacugggagaagaucuag

SEQ ID NO: 242277 - RNA, 1020 nt, Artificial Sequence
  derived and/or modified sequence
auguggcaguuaugggccucacugugcugucuccuggugcuugcaaacgcuagaagcagaccauccuuucacccauugucagacgaacuuguuaacuaugugaacaagagaaauacaacuuggcaggccggccacaacuucuauaaugucgacaugaguuaccuuaaaagacuauguggaacauucuuaggcggcccuaagccuccacaacguguaauguucaccgaggaccucaagcuaccagcuuccuucgaugccagagaacaguggccccagugccccacgauuaaggagauuagagaccaagguaguuguggaaguugcugggccuuuggggcaguggaagcaauuagcgaucgcauuugcauacacacuaaugcccacguaagcguugaagucucagcugaagaccuacuuacuugcuguggcagcauguguggcgauggcugcaauggaggcuaccccgcugaggcuuggaacuuuuggaccagaaagggccuggugagcggcggguuguacgaaucgcauguaggcugcaggcccuauaguaucccgccuugugaacaccaugugaacgggaguaggccacccuguacaggggaaggggacacaccuaaaugcuccaagaucugugaaccuggguacagccccaccuacaaacaagacaagcacuacggcuacaauucauacagugugagcaacuccgagaaagacauuauggccgagaucuauaagaauggaccaguagagggugcuuucagcguguauucggauuucuugcuguauaaaucaggaguauaucaacacguuaccggcgaaaugauggggggucaugccauaagaauacucggauggggcguggagaacggaacaccuuacugguugguugcuaacucuuggaauacggauuggggugacaauggauuuuuuaagauacuuagagggcaggaucauugcggcauugaaagugagguuguagcggguauucccagaaccgaucaguauugggagaagauauag

SEQ ID NO: 242278 - RNA, 1020 nt, Artificial Sequence
  derived and/or modified sequence
auguggcagcucugggcaagucuguguugccuucuuguccuagccaacgcccgcucccgaccuuccuuucauccgcucagcgacgaauugguaaacuacguuaacaagcggaacacaaccuggcaggccgggcacaauuuuuacaauguggauaugucuuaccuuaagaggcuaugcggaaccuuccuuggcggccccaaacccccucagagagucauguuuaccgaggaucuuaagcuccccgccucuuuugaugcccgcgaacaguggccucaauguccuacaaucaaggagauccgcgaucagggauccugcgguuccuguugggccuucggagcuguggaggccaucucugaccguauuuguauucacaccaacgcccacgucaguguggagguaucagcagaggaccugcuaacauguugcgguagcaugugcggggacggauguaauggagguuacccagcugaggcauggaauuuuuggacacguaaagggcugguuaguggcggcuuguacgaaucgcacguuggaugccggccguauaguauaccccccugugagcaccacguaaauggaaguagaccucccuguacgggugagggagauaccccuaaauguuccaaaauuugcgaaccaggcuacaguccaacuuauaaacaagacaagcauuacggcuacaauagcuacagcguuucgaacuccgagaaagacauuauggcggaaauauauaagaacggaccaguugagggcgcuuucucaguauacuccgacuuccuucucuacaaauccggaguauaucagcaugugaccggugaaaugaugggcgggcacgcaaucagaauucuugggugggggguggagaacgggacaccauauuggcuaguugcaaauucuuggaacacagacuggggggauaauggauucuuuaagauacuaagaggucaggaucauugcgguauagagagcgaggugguggcugguauuccacggacugaccaauacugggagaagauuuag

SEQ ID NO: 242279 - RNA, 1020 nt, Artificial Sequence
  derived and/or modified sequence
auguggcaguuaugggcuagucucuguugucugcugguccuggcgaacgcucgcucccggccuucguuccacccuuuaagcgacgagcuuguuaacuacgugaauaaacggaauaccaccuggcaggccggccacaauuuuuauaacgucgacaugagcuaccugaaaagauugugcgguacauuucuuggcggcccgaagcccccucagaggguuauguucacggaagaucugaaacugcccgccagcuuugacgcccgcgaacaauggccucaguguccuacuaucaaagagauucgggaucagggcucuugugguaguuguugggcuuucggugcgguggaagcuaucucugauagaauuuguauccauaccaaugcucaugucuccguggaaguaucagccgaagaccugcuuacuugcugcgggagcaugugcggagacgguuguaacgguggcuacccagccgaggcauggaauuuuuggacaagaaagggguuagucagugguggacuauacgagagucaugugggcuguagacccuacuccauaccccccugcgaacaccacgugaauggaagccgcccuccauguacgggagaaggagacacucccaaauguaguaaaaucugcgagcccggcuacagucccacauacaagcaggauaaacacuacggcuauaacucauauucugucuccaacucugagaaagauaucauggcggagaucuacaaaaauggaccuguggagggagcauucagcguguauagcgacuuccuucuuuauaagaguggcguauaccagcacgugaccggggaaaugauggggggacaugccauucggauacuggguugggguguggagaacggaacaccauacuggcuaguugcaaacucguggaacaccgauuggggcgauaaugguuuuuucaaaauucugcgaggccaggaucacugcgggaucgaaucagaaguuguggcggggauuccaaggacagaucaguacugggaaaaaaucuag

SEQ ID NO: 242280 - RNA, 1020 nt, Artificial Sequence
  derived and/or modified sequence
auguggcagcucugggccucucucugcugccugcuggugcucgccaaugccaggaguagacccuccuuccauccucuguccgacgaacuggugaacuacgugaacaaacggaacacaacauggcaagcagggcauaauuucuacaaugucgauaugucauaucugaaacggcucugugggacauuucuuggaggacccaaaccaccacagcgggucauguucaccgaagaccucaaacugccagcuuccuuugacgcacgagaacaguggccccaauguccgacuauuaaagaaauaagagaccagggguccugcgggaguuguugggcauucggcgccgucgaagcuauuagugauaggauuuguauucauacgaaugcacacgugagcguggaagucagcgcugaagaucuucugacauguugcgguucaaugugcggugauggguguaauggaggcuacccagccgaagcuuggaauuuuuggacucguaaaggacugguuucuggcggauuauacgaaucucaugucggcugccgaccuuauaguaucccuccuugugagcaccauguaaacgggagccguccucccuguacgggagagggcgauaccccuaaguguucgaaaaucugugagccuggguacucccccacauacaaacaggacaagcauuaugguuauaacucauacagcgucagcaauagcgagaaagauauuauggcugaaauuuauaagaacggccccguggagggcgcauuuucaguauauagcgacuuucuguuauacaaaucugguguguaucagcaugugacaggcgagaugaugggcggucaugcgaucagaauucuggguuggggcguggagaauggcacuccauacuggcuaguagccaacucguggaacacugauuggggggacaacggguuuuuuaaaauccuuagaggacaggaccauuguggcauagaguccgagguaguugcaggaauacccaggacagaccaauauugggaaaagauauag

SEQ ID NO: 242281 - RNA, 1020 nt, Artificial Sequence
  derived and/or modified sequence
auguggcagcuuugggccucucucugcugccucuugguacucgcuaacgcccgcucucgccccucuuuucacccccugucugacgaauuaguuaauuaugucaauaaaaggaauaccaccuggcaggcagggcacaacuuuuacaaugucgacauguccuacuugaagagauugugcggaaccuuccugggagguccuaaaccaccacagcgcgugauguuuacugaagauuugaaauuaccagcauccuucgacgcccgagagcaauggccacagugcccgacgauuaaggaaauucgcgaucaggguucuugcgguagcugcugggcguucggugccguagaagcuauuucggacagaauuugcauucauacaaaugcccacguuucuguggaggucagugcggaggauuuacuaaccuguugcggcucgauguguggagacgguugcaauggcgguuacccagcagaggcauggaauuuuuggacuagaaagggcuuggucaguggugggcuguacgagucccacguggguuguagaccuuacagcauaccacccugugaacaccacguuaaugggagcagaccuccuugcaccggagagggagacaccccaaaauguucgaaaauuugugaacccgguuauucaccuaccuacaaacaggauaaacauuacggcuacaauucuuacucugucuccaauucugaaaaggacauuauggccgaaaucuacaaaaacggacccguggagggagccuucagcgucuacagugauuuucuccuuuacaaguccggcgucuaucaacacgucaccggagaaaugauggguggacacgcuauccgcauacucgguuggggaguagaaaaugguacaccguauugguuggucgccaacucauggaacacggauuggggcgacaaugguuuuuuuaagauauuaagagggcaggaucauugcgguauagaaucagaggugguugccggcauaccgagaacggaucaguauugggaaaagauuuag

SEQ ID NO: 242282 - RNA, 738 nt, Artificial Sequence
  derived and/or modified sequence
augccaggugcaggaccauuaucuauuccaugcagaaugaguugggccuucggggcaguagaagccauuuccgacagaauuuguauucacacuaacgcccaugugagcguagagguuucugcagaggacuugcugacuuguuguggaucgauguguggugacggauguaacggcggcuacccugcugaggcauggaacuucuggacccgaaaaggauugguaucuggaggccuguacgaaagucacgucgguugucggccguacucgauaccaccuugugagcaucacguaaacggaucucgucccccuuguacuggagaaggcgacacccccaaguguuccaaaauaugugagccaggcuauaguccuacauauaagcaggauaaacacuauggauacaauuccuauagcgucaguaacucagagaaagauauuauggcagaaaucuauaagaacggccccguggaaggcgcuuuuucaguauacuccgauuuuuugcuguacaaaagcggcguuuaccagcaugucacuggcgagaugaugggaggccaugcaauacgaauacugggauggggcguagaaaauggaaccccauacuggcuuguggcuaacagcuggaacacagacuggggggauaacggauucuuuaaaauucugagaggucaggaucacugcggaauagagagugaagugguugcuggcauuccaaggacggaucaguacugggagaagauuuag

SEQ ID NO: 242283 - protein, 287 aa, Artificial Sequence
  derived and/or modified sequence
FKQGLWLLEMGARLSRRRLPADPSLALDALPPELLVQVLSHVPPRSLVTRCRPVCRAWRDIVDGPTVWLLQLARDRSAEGRALYAVAQRCLPSNEDKEEFPLCALARYCLRAPFGRNLIFNSCGEQGFRGWEVEHGGNGWAIEKNLTPVPGAPSQTCFVTSFEWCSKRQLVDLVMEGVWQELLDSAQIEICVADWWGARENCGCVYQLRVRLLDVYEKEVVKFSASPDPVLQWTERGCRQVSHVFTNFGKGIRYVSFEQYGRDVSSWVGHYGALVTHSSVRVRIRLS

SEQ ID NO: 242284 - DNA, 864 bp, Artificial Sequence
  derived and/or modified sequence
ttcaagcaaggcctgtggctgctcgaaatgggagcccgactttctagaaggcgccttcctgccgacccaagccttgctctcgacgcacttcccccagagctgctagtccaggtcttgtctcatgtgccacctcggtcactggtgacaaggtgcaggcccgtctgccgagcctggcgggatattgtcgacggaccaaccgtatggctgctccaactggcccgcgatcgttcggcggaaggccgagcgttgtacgccgtggcacaaagatgtctgcctagcaatgaggacaaagaggaattccccttgtgcgctctggctcgttattgtctgagagcgcccttcggcaggaacctgatcttcaactcttgcggagaacagggttttaggggatgggaagtagagcacggaggcaatgggtgggccattgaaaagaatctcacccctgtgccaggcgccccttcccagacctgttttgtgacctcctttgaatggtgtagtaaacgccagctggtagacctcgtgatggagggcgtgtggcaggaactgctggatagcgctcagatcgaaatttgtgtggccgactggtggggagccagggagaactgcggatgtgtctatcagcttcgtgtgaggcttcttgacgtctacgaaaaagaggtggtgaagttctccgcatcacctgatccggtgttgcagtggacagagcgcggttgtaggcaggtgagccatgtgtttacaaactttgggaagggcatccggtacgtgagcttcgagcaatacggtcgagacgtctcttcttgggttgggcattacggcgccctggtgacccattcatccgtaagagtacgtatcagactgagctag

SEQ ID NO: 242285 - DNA, 864 bp, Artificial Sequence
  derived and/or modified sequence
ttcaagcagggcctgtggctgctggagatgggcgcccggctgagcagaagaaggctgcctgctgaccccagcctggccctggatgccctgcccccagagctgctggtgcaggtgctgagccacgtgcccccaagaagcctggtgacccgctgcaggcctgtgtgccgggcctggagggacatcgtggatggccccaccgtgtggctgctgcagctggcccgggacagatctgctgagggccgggccctgtatgctgtggcccagcgctgcctgcccagcaatgaagacaaggaggagttccccctgtgtgccctggcccgctactgcctgcgggcccccttcggcaggaacctgatcttcaacagctgtggggagcagggcttccggggctgggaggtggagcacggcggcaatggctgggccatcgagaagaacctgacccctgtgcctggggcccccagccagacctgctttgtgaccagctttgagtggtgcagcaagaggcagctggtggacctggtgatggagggcgtgtggcaggagctgctggacagcgcccagatcgagatctgtgtggccgactggtggggcgcccgggagaactgtggctgtgtgtaccagctgcgggtgcggctgctggatgtgtatgagaaggaggtggtgaagttcagcgccagcccagaccctgtgctgcagtggacagagcggggctgccggcaggtgagccacgtgttcaccaactttgggaagggcatccgctacgtgtcctttgagcagtatggaagagatgtgtcctcctgggtgggccactatggagccctggtgacccacagctctgtgcgggtgcgcatccggctgtcctag

SEQ ID NO: 242286 - DNA, 864 bp, Artificial Sequence
  derived and/or modified sequence
ttcaagcagggcctgtggctgctggagatgggcgcccggctgagcaggcggcggctacccgccgatccttcattagcactggacgccctgccccccgagttactcgtacaagtgctgtctcacgtgcccccccggagtctggtcacacggtgccgacctgtgtgcagagcctggagagacatcgtggatggcccgactgtctggctgctgcaattggcccgcgatcgttcagctgagggcagagcactgtatgcagtggcgcaaaggtgcctacccagtaacgaggacaaggaggagttccctctatgtgcactggcccggtattgtctgagggcccccttcggacgcaacctaatcttcaattcttgcggggagcagggcttccgtggttgggaggtagagcatggtgggaatggctgggccatcgaaaaaaatttgactccggtgcccggggccccatcgcagacgtgcttcgttacttctttcgagtggtgttccaagaggcaactggtggacctagtgatggaaggagtttggcaggagcttttagactccgcgcaaatagagatctgtgtggcggactggtggggcgctcgagaaaattgcggctgcgtctaccagctgagggtacgcttgctggatgtctacgagaaagaggtagtgaagttctccgccagtcccgatcccgtgctgcagtggactgagcggggatgtcggcaggtatcccacgtgtttactaactttggtaaaggaatcagatatgtgagtttcgaacagtacggtcgagacgtctccagctgggtgggacactacggagccttagttacgcacagttctgtgagagtgcgtattcggctgtcatag

SEQ ID NO: 242287 - DNA, 864 bp, Artificial Sequence
  derived and/or modified sequence
tttaagcaggggctgtggttgctggagatgggcgcaagactcagccgccgacgcctccccgcagacccctctttagctcttgacgccctacctcctgaactgctcgtccaggtccttagccacgttccccctcgctcattggtgacccggtgtcggcctgtgtgccgtgcttggcgcgatatcgtcgacggccctacagtttggctgttgcagctggcaagagatcgtagtgccgaggggagagccttgtacgccgtggctcagagatgtcttccatccaatgaagataaagaagaatttcctctgtgcgcacttgcacgctactgcctccgtgccccattcggacggaaccttatctttaacagctgtggcgaacagggcttcaggggttgggaggttgaacatgggggtaatggctgggctattgaaaaaaacctcacccctgtgccaggggcacccagccagacttgtttcgttacaagtttcgagtggtgcagcaagagacagttggtcgatcttgttatggagggcgtctggcaagagcttctggactccgcccagattgaaatctgcgtggcagactggtggggggcacgagaaaattgtggttgtgtttaccagcttcgggtccgtcttctcgatgtgtacgagaaagaagtcgtgaaattttcagcaagtccagaccctgtgctgcagtggacagaaagaggctgccggcaggtctctcatgtgttcacgaatttcggcaaaggtatcaggtatgtgagctttgaacagtacggcagggatgtgagctcttgggtgggacattatggggcactcgtgacacattcttctgtgcgcgtcagaattaggctaagttag

SEQ ID NO: 242288 - DNA, 2215 bp, Artificial Sequence
  derived and/or modified sequence
agccgccacgccccgggagaggaccgaccgcccagaccgccggtcccggggccccctgggccacgccgatcacggggagcccctcgactgcctcccagaacaaagtgggaaagggaagcttagcccgccgctgccgcctccgagcagcccgccaggactctggctactggagatgggcgcccggctatcgcggcgacggctgccggcggacccatccctggccctggacgcgctgcccccggagctgctggtgcaggtgctgagccacgtgccgccacgctccttggtcacgcgatgccgcccagtgtgccgcgcctggcgcgacatagtggacgggcccactgtgtggctgctgcagctggcccgcgaccgcagcgccgagggccgcgcactctacgcagtggctcaacgctgcctgcccagcaacgaagacaaggaggagttcccgctgtgcgccctggcgcgctactgtctgcgcgcgcccttcggccgcaatctcatcttcaactcctgcggagagcagggcttcagaggctgggaggtggagcatggcgggaacggctgggccatagaaaagaacctaacaccggtgcctggggctccttcgcagacctgcttcgtgacctctttcgaatggtgctccaagaggcagcttgtggacctggtgatggaaggggtgtggcaggagctgctggacagcgcccagattgagatctgtgtggctgactggtggggcgctcgagagaactgcggctgcgtctaccagctccgggtccgccttctggatgtgtatgaaaaggaagtggtcaagttctcagcctcacctgacccggtccttcagtggactgagaggggctgccgacaggtctcccacgtcttcaccaactttggcaagggcatccgctacgtatcttttgagcagtacgggagagacgtgagttcctgggtggggcactatggcgcccttgtgacccactccagtgtgagggtcaggatccgtctgtcctagcgactggactactgcctgacgttgtcagtcaagaccagccttgcagccaggtgcagtggctcacacctgtggaatcccagcacttcaggaggccgaggtgggaggatcactggagctcgggagttcaagaccagcctgggcaacatagtgaaaccgtctccacaaataatttttaaaaaattagccaggcatggtggtgccgcctgtagtcccagctactcaggaggcttgggtgggaggattgcctgagaccaggaggttgaggctgcagtgagccgtgatttcaccaccactccagcctgggtgagaaagcaagaccctatatcaatgaaaaaaaaaaaaaaaaagaccagctttgcagccagaagccagaggatacccagggacagtagggctcccaggtggctggttctcagcacaccttccatgaatctgcttgctgctgcttcagtgtggtggccatcatgctgtgtgacaaaccaggctgttcacagcttcctcagccccccagaaggggagtgtcaggaagagacatttagttcatttgcctgcaaattttcttctcctgcaaggatctcggtggactcagtcacaaaacaaaggctaaaccaggatttataagagagggcttataaatccctctgccgacgcagggagcagagacttgccggcatgttttgggggtaatgatcgtgggcagggagcagaggtccgctgaggcagtctgtccttgagactaacaaagtcatctgctgtttggggaaatctctggtgttgggaacaggcccccaaatctggccataaactggccccaaaactggccataaacaaaatatctgcagcactgtgacatgtttgtgatggccatgacccccaccctgaaggttgtgggtttactggaacgagggcgaggaacacctggcccacccagggcggaaaaccgcttaaaggggttcctgaaccacaaaccatagcataagtgatctgtgccttaacgacatgttcctgctgcagataactagccagacccatccctttatttcagcccatccctttatttcctgtaagaaatgtttttagttaatctataatctatagaaataatgcttatcactggcttgctgtcaataaatatgtgggtaaatctctgttcaaggctctcagctctgaaggccgtgagacccctgatttcccactccacaccct

SEQ ID NO: 242289 - DNA, 2070 bp, Artificial Sequence
  derived and/or modified sequence
ttcaaacaaggactctggctactggagatgggcgcccggctatcgcggcgacggctgccggcggacccatccctggccctggacgcgctgcccccggagctgctggtgcaggtgctgagccacgtgccgccacgctccttggtcacgcgatgccgcccagtgtgccgcgcctggcgcgacatagtggacgggcccactgtgtggctgctgcagctggcccgcgaccgcagcgccgagggccgcgcactctacgcagtggctcaacgctgcctgcccagcaacgaagacaaggaggagttcccgctgtgcgccctggcgcgctactgtctgcgcgcgcccttcggccgcaatctcatcttcaactcctgcggagagcagggcttcagaggctgggaggtggagcatggcgggaacggctgggccatagaaaagaacctaacaccggtgcctggggctccttcgcagacctgcttcgtgacctctttcgaatggtgctccaagaggcagcttgtggacctggtgatggaaggggtgtggcaggagctgctggacagcgcccagattgagatctgtgtggctgactggtggggcgctcgagagaactgcggctgcgtctaccagctccgggtccgccttctggatgtgtatgaaaaggaagtggtcaagttctcagcctcacctgacccggtccttcagtggactgagaggggctgccgacaggtctcccacgtcttcaccaactttggcaagggcatccgctacgtatcttttgagcagtacgggagagacgtgagttcctgggtggggcactatggcgcccttgtgacccactccagtgtgagggtcaggatccgtctgtcctagcgactggactactgcctgacgttgtcagtcaagaccagccttgcagccaggtgcagtggctcacacctgtggaatcccagcacttcaggaggccgaggtgggaggatcactggagctcgggagttcaagaccagcctgggcaacatagtgaaaccgtctccacaaataatttttaaaaaattagccaggcatggtggtgccgcctgtagtcccagctactcaggaggcttgggtgggaggattgcctgagaccaggaggttgaggctgcagtgagccgtgatttcaccaccactccagcctgggtgagaaagcaagaccctatatcaatgaaaaaaaaaaaaaaaaagaccagctttgcagccagaagccagaggatacccagggacagtagggctcccaggtggctggttctcagcacaccttccatgaatctgcttgctgctgcttcagtgtggtggccatcatgctgtgtgacaaaccaggctgttcacagcttcctcagccccccagaaggggagtgtcaggaagagacatttagttcatttgcctgcaaattttcttctcctgcaaggatctcggtggactcagtcacaaaacaaaggctaaaccaggatttataagagagggcttataaatccctctgccgacgcagggagcagagacttgccggcatgttttgggggtaatgatcgtgggcagggagcagaggtccgctgaggcagtctgtccttgagactaacaaagtcatctgctgtttggggaaatctctggtgttgggaacaggcccccaaatctggccataaactggccccaaaactggccataaacaaaatatctgcagcactgtgacatgtttgtgatggccatgacccccaccctgaaggttgtgggtttactggaacgagggcgaggaacacctggcccacccagggcggaaaaccgcttaaaggggttcctgaaccacaaaccatagcataagtgatctgtgccttaacgacatgttcctgctgcagataactagccagacccatccctttatttcagcccatccctttatttcctgtaagaaatgtttttagttaatctataatctatagaaataatgcttatcactggcttgctgtcaataaatatgtgggtaaatctctgttcaaggctctcagctctgaaggccgtgagacccctgatttcccactccacaccct

SEQ ID NO: 242290 - DNA, 864 bp, Artificial Sequence
  derived and/or modified sequence
ttcaagcagggcctgtggctgctggagatgggcgccagactgagcagaagaagactgcccgccgaccccagcctggccctggacgccctgccccccgagctgctggtgcaggtgctgagccacgtgccccccagaagcctggtgaccagatgcagacccgtgtgcagagcctggagagacatcgtggacggccccaccgtgtggctgctgcagctggccagagacagaagcgccgagggcagagccctgtacgccgtggcccagagatgcctgcccagcaacgaggacaaggaggagttccccctgtgcgccctggccagatactgcctgagagcccccttcggcagaaacctgatcttcaacagctgcggcgagcagggcttcagaggctgggaggtggagcacggcggcaacggctgggccatcgagaagaacctgacccccgtgcccggcgcccccagccagacctgcttcgtgaccagcttcgagtggtgcagcaagagacagctggtggacctggtgatggagggcgtgtggcaggagctgctggacagcgcccagatcgagatctgcgtggccgactggtggggcgccagagagaactgcggctgcgtgtaccagctgagagtgagactgctggacgtgtacgagaaggaggtggtgaagttcagcgccagccccgaccccgtgctgcagtggaccgagagaggctgcagacaggtgagccacgtgttcaccaacttcggcaagggcatcagatacgtgagcttcgagcagtacggcagagacgtgagcagctgggtgggccactacggcgccctggtgacccacagcagcgtgagagtgagaatcagactgagctag

SEQ ID NO: 242291 - protein, 137 aa, Artificial Sequence
  derived and/or modified sequence
MGAGPSLLLAALLLLLSGDGAVRCDTPANCTYLDLLGTWVFQVGSSGSQRDVNCSVMGPQEKKVVVYLQKLDTAYDDLGNSGHFTIIYNQGFEIVLNDYKWFAFFKDVTDFISHLFMQLGTVGIYDLPHLRNKLVIK

SEQ ID NO: 242292 - DNA, 414 bp, Artificial Sequence
  derived and/or modified sequence
atgggcgcaggtccctctttgctgctcgccgccctgctgctcctcttgtcaggggacggcgctgtacgatgtgacacgcccgcgaattgcacatacctggatcttctgggaacgtgggtgttccaggttggcagcagcggctcccagcgtgacgtcaactgcagcgtaatgggtcctcaggagaaaaaagtggtcgtgtatttacagaagctggatacagcgtacgatgatttggggaactctggacactttacgataatctacaaccagggcttcgagatcgttctcaacgactacaagtggttcgcgttttttaaggatgtaaccgattttatcagccaccttttcatgcaattggggacagtcgggatctacgacctcccccacctgcgcaacaagctggttattaagtag

SEQ ID NO: 242293 - DNA, 414 bp, Artificial Sequence
  derived and/or modified sequence
atgggcgccggccccagcctgctgctggccgccctgctgctgctgctgtctggagatggagctgtgcgctgtgacaccccagccaactgcacctacctggacctgctgggcacctgggtgttccaggtgggcagcagcggcagccagagagatgtgaactgcagcgtgatgggcccccaggagaagaaggtggtggtgtacctgcagaagctggacacagcctatgatgacctgggcaacagcggccacttcaccatcatctacaaccagggctttgagatcgtgctgaatgactacaagtggtttgccttcttcaaggatgtgacagacttcatcagccacctgttcatgcagctgggcaccgtgggcatctatgacctgccccacctgaggaacaagctggtgatcaagtag

SEQ ID NO: 242294 - DNA, 414 bp, Artificial Sequence
  derived and/or modified sequence
atgggcgccggccccagcctgctgctggccgccctgctgctgctgctctccggagacggggccgtgagatgtgatacccctgctaattgcacttaccttgatctcctcggtacatgggtgtttcaagtgggttcctccgggtcacagcgggacgtaaattgttcggtgatgggcccgcaagaaaagaaagtcgtggtgtatctccaaaagctagacaccgcatacgatgacctaggaaacagcggacacttcactatcatatacaaccagggattcgaaattgttctgaacgattacaagtggtttgctttcttcaaagacgtgacagatttcatcagccacctttttatgcaactgggcaccgtcggcatttatgacctgccacacctgcgtaataaactggtgatcaaatag

SEQ ID NO: 242295 - DNA, 414 bp, Artificial Sequence
  derived and/or modified sequence
atgggcgcaggcccttccctgcttctggccgctttgttgctactcctctccggcgatggggctgtgcgctgcgacactccggctaactgcacatacctggacctgctgggaacctgggtgttccaggtggggtcctccgggagccagagggatgtgaattgctcagtgatgggccctcaggaaaaaaaagtggtggtctatctacaaaagctggacacagcgtacgatgatctgggaaactctggtcacttcacgatcatttacaaccaaggttttgagatcgttttgaatgattacaagtggtttgcctttttcaaggacgtgacagacttcattagtcatctgtttatgcaacttgggaccgtgggcatttacgacttgccacatctgaggaacaagttggtgataaaatag

SEQ ID NO: 242296 - DNA, 6125 bp, Artificial Sequence
  derived and/or modified sequence
aaggcgcgcgcctcgtggtggactcaccgctagcccgcagcgctcggcttcctggtaattcttcacctcttttctcagctccctgcagcatgggtgctgggccctccttgctgctcgccgccctcctgctgcttctctccggcgacggcgccgtgcgctgcgacacacctgccaactgcacctatcttgacctgctgggcacctgggtcttccaggtgggctccagcggttcccagcgcgatgtcaactgctcggttatgggaccacaagaaaaaaaagtagtggtgtaccttcagaagctggatacagcatatgatgaccttggcaattctggccatttcaccatcatttacaaccaaggctttgagattgtgttgaatgactacaagtggtttgccttttttaaggatgtcactgattttatcagtcatttgttcatgcagctgggaactgtggggatatatgatttgccacatctgaggaacaaactggttattaaatagagcatctgttgagggactcttttaaaaccacagccatgaacagacgttggggctaagagacagagcagcctgcgacagtgtggacctacctgtagcagctagcaaaggcctctagcagctacagtcccttctggagtctttatttgcatgcaaaatgcaaaggagtcctggtgacctacctccaaggcagctgccctcctgaacactcccttggaaaacagtaaacatcattttggaatgtgaacaaccagagactacacaggagaaaggaaaaaaaaattctgaagatgcaaaatcttgggtggcttcaccgttcagttttttaataaaaggaacaatatacaacacgttgttctttttctcttttgaaatcccttctattacagtgatttttttctaagattgtcaggatttgaagtgtatgttttgttttattcacagcgtaaattttattcacagtttaactgtctgcctgagtgtctttcctttctctaattaccttgaggaacccaagagcctgttgtaaggagaaaataaggcccttggatctcttgagattcacagatataagttattgaagggaagatggtcctatggaggacatatttaaagaagggaaaaaagaggctttctcagatatgtcagactgctatagtatacttctacagattatagacctccagtacctctggccagaaagatggtatcgtaaacaccctattttttttcttttcttttttcattaggtacaagctttgtgctaagaagttgacatactataagctacaaaagttctgtaaagtagatataactagtttcattttatagatagagaaaattaatctcttacagtgctaagctcacagagtttctaactgtaaaatgctagaacttgtctttcaagcctaaagacttccttggggctaaatagtgaaaaaagccatttcacaaataagtaaatggtatttagaggcatatttggatttcctggtaaattccagtctgtgagcatcatgaatattagtttaatgttgcatgggctcatgttgaagttttaagagaagaactgccttgaagcttaggtttccttagctattaggctactgactttcttgcctaaaccagggttttttcattgaagaccaaaacttaccttctccttcagtttgtagtttggaaattggtagaagagctttgtaaacttcaaattaagtacaaactaagtgtcatagtcaaatttactaatcttaattacagtattgttcaactgattgctatcttctagctctttcctgccgaataatggtcttgtttcctgctctgttggtttagagctgacttctttcagctttggtaagcctgaaattatggggttatgtttaattcatattgtctgggtggactttcctctcttgcatttctgcttgaatagaagaatttttctctagagagtagtttgtcatccttactctgttgattcagatgactctttgtatgatctgagaggtatactgttctgctattctgagaagaagtatttcagaaagatgaattaagagtacagtggactgctcccacctggaaacttttatctatctcacctctggacctgataaattctttatcactcaggaccttgatgacgctgctctctgaaaccctccccagctctctctattaccgtgagaaacatcagaactttggttcccattgcatatcgcaggtacctctgctttcatgccatgctgtaatggagtgattgggtagcatgttttcatctctttccagattgaaaatctgtatttctccctgtatatcttcaacacctaatgcacatagaactttgtaggtacctggaaaatgcaccacagttttcttttctttttgcagacttttcacaagtattaccaacttacaaagaattaattttgtaggattctagaaagacaaatcaggaatggtgccatatacatcttttttgattccctgctctaaagaatattatcaggttaccttcctgcagagttttaaaagaattgcatatttcaagctgactttcaggatgtaaatataaccaaagcaactgatatgtaaaaaatatattcaatggcattcctagattttcttctagggtgttttattgttttgggttttacatttaagtctttaatccatcttgagttaatttttgtataggtataagaaaggggtccagttttaattttctgcgtatggctagccagttctcccagcaccatttattaaatagggaatcctttccctattgtttgtttttgtacggtttgtcaaagattagatggttgtagatgtgtggtcttatttctgagatcttcattctcttccactggtctatgtgtctgtttttgtaccatgcttttttggttactgtagccttgtagtatagtatgaaagatagcatgatgcctccaggtttgttctttttgcttaggattgtcttggctatacgagcttttttttggttctatatgaattttaaaatagtttcttctaattgtgtgaagaatgttaatggtagtttaatgggaatagcattgaatctgtgaattgctttgggcagtatggccattttcatgatattgattcttcctatccatgagcatgtaacgtttttcccttcgtttgtgtcctctctcatttccttgagtagtggtttgtagttctccttgaagagatccttcacttcttctgtattcctagatattttattctctctgtagctattgggaatgggagttcattcatgattttgctctctgcttgccttttgttggtgtatagggatcctggtgacttctgcacattgattttgtatcctgagactttaccgaagttgcttatcagcttaagaagcttttgggctgagatgatggggttttctagatataggatcatgttatcttcaaacaaagacaatttgacttcctctcttcctatttgagtacgctttatttctttctcttgcctgattgccctggccagaactcccaatactatattgaataagaatggtgagagagggcatccttgtcttgtgccagttttcacggggaatgcttccagcttttgcccattcagtatgatattatctgtgggtttctcataaaaagctcttattatttgagatacgttccttcaatacctagtttattgagagtttttaacatgaagcgatgttgaattgtatcgaaggccttttctgtgtctattgagataatcatgtggtttttgtctttagttctgtttatgtgatgaatgacgtttattgatttgcatatgttgaaccggccttgcatcctggggatgaagccaacttgactgtggtagataagcttttggatgtgctgctggatttggtttatcagtatttcattgagattttttgcgtcgaagttcatcagggatattggactgaagttttctttttgttgtcgtatctctgccaggttttggtatcaggatgatgctggcctcataaaatgagttagggaggagtccctccttttcaattgtttggaatagtttcagaagaaagggtatcagctcctctttgtacctctggtagaattcaactgtaaatccatctggtcctggactttttttcattagtaggctatttattactgcctcactttcataacttgttattgatctattcagggatccaacttcttcctgattcagtcttgggagtgtgtatgcatccaggaatttatccatttcttctagattttctagtttctttgcatagaggtgtttgtagtatttgctgttggttgtttgtacttctgtgagatcagtggtggtatcctgtttatcattttttattgtgtctgtttgattcttctcttatttttgacaaagctgacaaaaagaagcaatagggaaaggactctctattcaattaatcctactgtatatctggctagccatatgcagaaaattgaaactgttcctgtttcttaatccatatacgaaaatcaacttacgatggattaaagacttaaatgtaaaacccaaaattataaaaccctggaatagaatataggcaatatcattctggacataggaatgggcaaagattttatgagaaagacaccaaaagcaattacaacaaaagcaaaaattggcaaatgagatctaattaaactaaagagctctgcacagcaaaagaaactactgtcagagtgaacaggcaaccaacagaatgggagaaaattttttcaatctatccatatgacaaaggtctaacatccagaatctacaaggaacttaacaaatttacaagaaaaaaggagccccattaaaaagttggcaaagaacatgaacagacacttcccagaagatattcatgtggccaataaacatgaagaaaagctcaacatcactgaccattagagacgtgcatatcaaaatcacaatgagataccatctcatgtcacaatggtgattattaaaaagtcaaacaacatgctagtgaggttgtagagaaataagaacgcttttacactgttggtgggaatgtcaactaattcaaccactgtggaagacagtgtggtgattcctcaaggatttagaaccagaaatatcattactgcatatagacccaaaggaatagaaatcattctattacaaagatacatgcacatgtatgtttattacagcactattcacaatagcaaagacatggaatcaacccaaatgctcatcagtgatagactggaaaaagagaatgtggaacataaacaccatggaatactatgcagcaataaaaaggaatgagatcctgtccttttcagggacatggatggagttggaagctgttatcctcagcaaactaatgcaggaacagaaaaccaaccaccacatgttctcacttataagtgggagctgaacaatagaacacatgggcacagggaggggaataacacacactggggccagtcagggggtggggggtcaagctgagggagagcattagaaaaaatagctaatgcattctgggcttaacccatttatgcctagtgttccatttctggaatgctaagcatgtggaagttctttatatcctgctcaaggtcattgccaaggtctgatttttcacattcaacaaattgcaacctctggcataaatgggttaatacctaggtgatgagttgataggtgcaggaaaccaccatggcacatgtttatctatgtaagaaacctgcacatcctacacatgtaccctggaacttaaaaaatttaaaatatatatgtatatatatttaatatggaattttaaaaattactaatgagttcttttatctgagtaattttgcatcaacatgcttttattatggaagagaagattcagtgagtacaaaattgcagatacatgtgtcagaagatccctgaatataataaggcttagtattctgtgtcataattgcctgtttgtattcctctctggtctttaaacttcattagggcaaggatcaactccatcttactaaccatttgattccctatgtattacacgatatatgaccaataataagccttcaataaatacttgtaaaataaagaatgttatgtaatata

SEQ ID NO: 242297 - DNA, 414 bp, Artificial Sequence
  derived and/or modified sequence
atgggcgccggccccagcctgctgctggccgccctgctgctgctgctgagcggcgacggcgccgtgagatgcgacacccccgccaactgcacctacctggacctgctgggcacctgggtgttccaggtgggcagcagcggcagccagagagacgtgaactgcagcgtgatgggcccccaggagaagaaggtggtggtgtacctgcagaagctggacaccgcctacgacgacctgggcaacagcggccacttcaccatcatctacaaccagggcttcgagatcgtgctgaacgactacaagtggttcgccttcttcaaggacgtgaccgacttcatcagccacctgttcatgcagctgggcaccgtgggcatctacgacctgccccacctgagaaacaagctggtgatcaagtag

SEQ ID NO: 242298 - protein, 236 aa, Artificial Sequence
  derived and/or modified sequence
MKRSGNPGAEVTNSSVAGPDCCGGLGNIDFRQADFCVMTRLLGYVDPLDPSFVAAVITITFNPLYWNVVARWEHKTRKLSRAFGSPYLACYSLSVTILLLNFLRSHCFTQAMLSQPRMESLDTPAAYSLGLALLGLGVVLVLSSFFALGFAGTFLGDYFGILKEARVTVFPFNILDNPMYWGSTANYLGWAIMHASPTGLLLTVLVALTYIVALLYEEPFTAEIYRQKASGSHKRS

SEQ ID NO: 242299 - protein, 213 aa, Artificial Sequence
  derived and/or modified sequence
MKRSGNPGAEVTNSSVAGPDCCGGLGNIDFRQADFCVMTRLLGYVDPLDPSFVAAVITITFNPLYWNVVARWEHKTRKLSRAFGSPYLACYSLSVTILLLNFLRSHCFTQAMLSQPRMESLDTPAAYSLGLALLGLGVVLVLSSFFALGFAGTFLGDYFGILKEARVTVFPFNILDNPMYWGSTANYLGWAIILCPCGRYPFPQRGPRAMREA

SEQ ID NO: 242300 - DNA, 711 bp, Artificial Sequence
  derived and/or modified sequence
atgaagagaagcggcaaccccggcgccgaggtgaccaacagcagcgtggccggccccgactgctgcggcggcctgggcaacatcgacttcagacaggccgacttctgcgtgatgaccagactgctgggctacgtggaccccctggaccccagcttcgtggccgccgtgatcaccatcaccttcaaccccctgtactggaacgtggtggccagatgggagcacaagaccagaaagctgagcagagccttcggcagcccctacctggcctgctacagcctgagcgtgaccatcctgctgctgaacttcctgagaagccactgcttcacccaggccatgctgagccagcccagaatggagagcctggacacccccgccgcctacagcctgggcctggccctgctgggcctgggcgtggtgctggtgctgagcagcttcttcgccctgggcttcgccggcaccttcctgggcgactacttcggcatcctgaaggaggccagagtgaccgtgttccccttcaacatcctggacaaccccatgtactggggcagcaccgccaactacctgggctgggccatcatgcacgccagccccaccggcctgctgctgaccgtgctggtggccctgacctacatcgtggccctgctgtacgaggagcccttcaccgccgagatctacagacagaaggccagcggcagccacaagagaagctag

SEQ ID NO: 242301 - DNA, 711 bp, Artificial Sequence
  derived and/or modified sequence
atgaagcgcagcggcaatcccggtgcagaagtcaccaattcatctgttgccggtcctgattgttgtggcggtcttggcaacattgactttcgacaggcagatttttgtgttatgactagactgttaggatatgtggaccctctggaccctagctttgtggcagcagtgattacaattactttcaatcctctgtactggaacgtggtggcccgctgggagcacaagacccgcaagctgtccagagctttcggatcaccttatttggcgtgttactccttatctgtgacaatactgctcttaaatttcctccggtcgcactgtttcacccaggctatgttatcccagccccgtatggaatccctggatacaccagccgcttacagcttagggctggccctgcttggactaggcgtggtgctggtgctctccagtttttttgcgctgggctttgccggtacattcctaggagattactttgggatcctaaaggaggctcgcgttacagtgttccccttcaacattctggacaatccaatgtattggggtagcacagccaattatctggggtgggcaatcatgcacgccagccctactggactgctgctgacggttttggtagccctcacatatatcgtcgccctgctgtatgaagaaccgtttaccgctgagatctacagacagaaggcttccggctcacacaagaggtcttag

SEQ ID NO: 242302 - DNA, 711 bp, Artificial Sequence
  derived and/or modified sequence
atgaagaggagcggcaaccctggagctgaggtgaccaacagctctgtggccggccctgactgctgcggcggcctgggcaacatcgacttccggcaggccgacttctgtgtgatgacccggctgctgggctacgtggaccccctggaccccagctttgtggccgctgtgatcaccatcaccttcaaccccctgtactggaatgtggtggcccgctgggagcacaagaccaggaagctgagccgggccttcggcagcccctacctggcctgctacagcctgtctgtgaccatcctgctgctgaacttcctgcggagccactgcttcacccaggccatgctgagccagcccaggatggagagcctggacaccccagctgcctacagcctgggcctggccctgctgggcctgggcgtggtgctggtgctgagcagcttctttgccctgggctttgctggcaccttcctgggggactacttcggcatcctgaaggaggcccgggtgaccgtcttccccttcaacatcctggacaaccccatgtactggggcagcacagccaactacctgggctgggccatcatgcacgccagccccaccggcctgctgctgactgtgctggtggccctgacctacatcgtggccctgctgtatgaggagcccttcaccgctgagatctaccggcagaaggccagcggcagccacaagaggagctag

SEQ ID NO: 242303 - DNA, 711 bp, Artificial Sequence
  derived and/or modified sequence
atgaagcggagcggcaaccccggcgccgaggtgaccaacagcagcgtggccggccctgactgctgtgggggactaggtaatatcgacttccggcaagcagacttctgtgtaatgaccaggttgttaggttatgtcgatccgctcgacccttccttcgtggccgctgtgattactatcacctttaatcccctgtactggaacgtggtggcacgatgggagcataagacccgaaaactgtcgagggcttttggcagcccttacctcgcctgctacagcctcagcgttacgatactcctcctgaactttctgcgatcccactgttttactcaggctatgctgtcgcagcctagaatggagagcctggacactccagctgcatactcccttggattagccctcctcgggcttggcgttgtactcgtgttatccagtttcttcgccctgggcttcgccgggacatttttaggggattattttggaatcctgaaggaggctagggttactgtatttccctttaacatcctggacaacccaatgtattggggcagcacagctaattatctcggctgggcgatcatgcacgcctcacctacagggctgctactcaccgtgctcgtcgctttgacatatattgtggctctgctttatgaagaaccctttacagccgaaatttatcggcagaaagcaagcggctcacacaaacgcagttag

SEQ ID NO: 242304 - DNA, 1013 bp, Artificial Sequence
  derived and/or modified sequence
ggctctataggtccggttccgggggcgcgtggctgcagcggggcccgcgtggtgcctcctgaggcggcccccggatgaagagatctgggaacccgggagccgaggtaacgaacagctcggtggcagggcctgactgctgcggaggcctcggcaatattgattttagacaggcagacttctgcgttatgacccggctgctgggctacgtggaccccctggatcccagctttgtggctgccgtcatcaccatcaccttcaatccgctctactggaatgtggttgcacgatgggaacacaagacccgcaagctgagcagggccttcggatccccctacctggcctgctactctctaagcgtcaccatcctgctcctgaacttcctgcgctcgcactgcttcacgcaggccatgctgagccagcccaggatggagagcctggacacccccgcggcctacagcctgggcctcgcgctcctgggactgggcgtcgtgctcgtgctctccagcttctttgcactggggttcgctggaactttcctaggtgattacttcgggatcctcaaggaggcgagagtgaccgtgttccccttcaacatcctggacaaccccatgtactggggaagcacagccaactacctgggctgggccatcatgcacgccagccccacgggcctgctcctgacggtgctggtggccctcacctacatagtggctctcctatacgaagagcccttcaccgctgagatctaccggcagaaagcctccgggtcccacaagaggagctgattgagctgcaacagctttgctgaaggcctggccagcctcctggcctgccccaagtggcaggccctgcgcagggcgagaatggtgcctgctgctcagggctcgcccccggcgtgggctgccccagtgccttggaacctgctgccttggggaccctggacgtgccgacatatggccattgagctccaacccacacattcccattcaccaataaaggcaccctgaccccaa

SEQ ID NO: 242305 - DNA, 711 bp, Artificial Sequence
  derived and/or modified sequence
atgaaaaggagcgggaatccaggtgcagaggtcactaacagctcagtggccggtccagactgctgtggagggttgggtaacatcgattttaggcaggccgatttctgcgtgatgacccgcctgctcggttacgtcgatcctctggatccatccttcgtggctgccgtaatcaccatcacttttaaccctctttactggaatgtggtagcacgctgggagcacaaaaccagaaaactcagtagggcatttgggtctccttacttggcctgctactcgctttctgtcaccattttgttactcaatttcctccgctcacactgtttcacccaggcaatgctgtctcagcccagaatggagagccttgatactccggcagcctactccctgggtttggccctcttgggcctaggagtggtgttggtgttgtctagcttcttcgccctcgggtttgcgggtacgttccttggtgattatttcggaattttgaaggaagcaagggtcacagtgtttccgtttaatatcttggacaaccccatgtactgggggtctacggctaattacctaggatgggctataatgcatgccagtcccaccgggcttctccttaccgttctggtggccctaacttatatcgttgcgctgctctatgaggagccttttacagccgaaatttacaggcagaaggctagcgggtcgcacaaacgttcctag

SEQ ID NO: 242306 - protein, 520 aa, Artificial Sequence
  derived and/or modified sequence
MGKRQHQKDKMYITCAEYTHFYGGKKPDLPQTNFRRLPFDHCSLSLQPFVYPVCTPDGIVFDLLNIVPWLKKYGTNPSNGEKLDGRSLIKLNFSKNSEGKYHCPVLFTVFTNNTHIVAVRTTGNVYAYEAVEQLNIKAKNFRDLLTDEPFSRQDIITLQDPTNLDKFNVSNFYHVKNNMKIIDPDEEKAKQDPSYYLKNTNAETRETLQELYKEFKGDEILAATMKAPEKKKVDKLNAAHYSTGKVSASFTSTAMVPETTHEAAAIDEDVLRYQFVKKKGYVRLHTNKGDLNLELHCDLTPKTCENFIRLCKKHYYDGTIFHRSIRNFVIQGGDPTGTGTGGESYWGKPFKDEFRPNLSHTGRGILSMANSGPNSNRSQFFITFRSCAYLDKKHTIFGRVVGGFDVLTAMENVESDPKTDRPKEEIRIDATTVFVDPYEEADAQIAQERKTQLKVAPETKVKSSQPQAGSQGPQTFRQGVGKYINPAATKRAAEEEPSTSATVPMSKKKPSRGFGDFSSW

SEQ ID NO: 242307 - DNA, 1563 bp, Artificial Sequence
  derived and/or modified sequence
atgggcaagcggcagcaccagaaagacaagatgtacatcacctgcgctgagtacactcatttctatggtggaaagaaacctgatcttccccagactaacttcaggcggcttccctttgatcattgtagtctgtctctccagccctttgtctatccagtatgcacaccagacggtattgtcttcgatttgcttaatatcgtgccctggcttaaaaaatatggcactaatcctagtaatggcgagaagctcgatggtcgcagcttgatcaagctgaacttttctaaaaacagcgaaggaaaataccattgccctgtgttgttcactgtgtttaccaataacacccatattgtcgccgtaaggacaacgggaaacgtgtacgcatacgaggctgtggagcagctaaatattaaagccaagaattttcgggacctgttaaccgacgaaccttttagtaggcaggatattataactttacaggacccaaccaacctggacaaattcaatgttagcaatttctaccacgtgaagaataacatgaagattatcgacccagatgaggagaaggctaaacaggaccctagttattatttaaaaaacacaaacgccgagacaagggagacgctccaagagctttacaaggaatttaagggggacgaaatcctggctgccacaatgaaggctcctgagaagaagaaggtggacaagctgaatgccgcccactactcaacgggtaaggtatccgcttctttcacttcaaccgcaatggtaccagagacaacccacgaagccgcagctatcgacgaagacgtgctgcgttaccagtttgtcaaaaaaaaaggctacgtgcggttacatactaacaagggagatctaaacctcgagctgcattgtgatctcacacccaaaacatgtgaaaacttcattaggctgtgtaaaaagcattattacgacggcacgatttttcacaggtctattcggaacttcgtaatccaaggtggagacccaaccggcacaggcactggtggcgagtcctactggggtaagccattcaaggacgaatttcggcccaacctatcccatactggcaggggaatcctatcgatggctaacagcggacctaattcaaatagaagccagttcttcatcacattcagatcgtgcgcctatctggacaagaagcataccatctttggcagggttgtcgggggatttgatgttttgactgccatggagaatgtggagagtgatcctaaaacagacaggcccaaggaagagattcgcattgatgccacaacggtgttcgtagatccttacgaagaagccgacgcccaaatagcccaggaaaggaaaacacagctaaaggttgctcctgagaccaaagtgaagagcagtcagccacaggcgggctcccagggtcctcagactttccgccaaggggtgggcaaatacattaatcccgccgccacaaagcgcgccgctgaagaagaacctagcacgtcagctactgtgcccatgtccaagaagaagcccagcagaggctttggggatttttccagttggtag

SEQ ID NO: 242308 - DNA, 1563 bp, Artificial Sequence
  derived and/or modified sequence
atgggcaagagacagcaccagaaggataaaatgtacataacttgcgctgagtacacccacttttatggaggtaagaagcccgacctgcctcagactaacttcagacgcctcccgtttgaccattgttccctgtcattacagccctttgtgtacccagtgtgcacaccagacggcatcgtgttcgacttactaaatattgtgccatggctgaagaaatacggaactaacccttccaatggggagaaactcgacggtcgatccctgattaaactaaatttctccaagaattccgaaggcaagtatcattgccccgtgctgtttaccgtattcaccaataacacacatattgtagctgtgaggacgaccggcaatgtgtatgcctatgaggcagtcgaacagctcaatatcaaagctaaaaatttcagagatctgctgacagacgaacctttcagtcgccaagatatcatcactctgcaggacccaacaaatctggacaaatttaatgtgagcaacttctatcatgtcaagaataatatgaagattatcgacccagacgaggagaaggcaaaacaagaccctagttattacctgaagaataccaacgcggaaactagagagacacttcaggagttgtacaaggagttcaaaggggacgaaattctagcggcaacaatgaaggcacctgaaaagaaaaaggttgataagttaaatgctgctcattattctacaggcaaggtatcggccagctttaccagtacggctatggtgcctgagactactcacgaggctgcagccattgatgaagatgtcctgcggtaccagttcgttaagaagaagggatatgtgaggctgcatactaacaaaggcgacctgaacctggagttacactgtgatctaactcctaagacatgcgaaaacttcattagactgtgcaagaagcactactatgacggaacaattttccaccgatcaatacggaatttcgtgattcagggtggagacccgactggaactggcacaggcggggagtcctactggggcaagccctttaaagacgaattccggcccaatctcagccatactgggagaggcatcctgtcaatggccaattcgggacccaactccaaccgatctcagtttttcattacctttagatcctgtgcatatcttgacaagaagcacaccatattcggccgcgtggtgggcgggttcgacgtgctgaccgccatggaaaacgtcgagtccgacccaaaaaccgatcgacctaaagaggaaattcggattgacgccaccacagttttcgtggacccttacgaggaggccgacgcgcagatcgcgcaggaaagaaagacacagttgaaggttgctcctgagactaaggtgaaaagttcccagccccaggctggatcccaaggcccacagactttccgccagggggtaggcaagtacatcaatcccgccgctaccaaacgggccgccgaagaagaacctagcacctctgcgaccgttcctatgtcaaaaaaaaaaccgagccgcggatttggggatttttcctcttggtag

SEQ ID NO: 242309 - DNA, 1563 bp, Artificial Sequence
  derived and/or modified sequence
atgggaaagaggcagcatcagaaggacaaaatgtatataacatgcgcagaatacactcacttctacggaggaaagaagcccgatctcccacagactaacttccgaagactgccgtttgaccactgttcgctttcccttcagcccttcgtctacccagtctgcactccagacggcatcgttttcgacctgctcaatattgtgccatggctcaagaagtatggcaccaatccctctaatggggaaaagctcgacgggcgatctcttattaagcttaactttagcaagaatagcgaaggaaagtaccactgtcctgttcttttcactgtcttcaccaataatacccacattgtcgctgtgcgcacaacagggaacgtatacgcttatgaggctgttgagcaactgaatattaaggcaaaaaacttccgtgaccttctgacggacgaaccattcagtaggcaggatatcattactcttcaggaccccacgaacttggataagtttaacgtgtcaaatttctaccacgtcaagaataatatgaaaatcatagaccccgatgaagagaaagccaagcaagacccttcatactacctgaagaacacaaacgccgagacgagggagacacttcaggagctttataaggagtttaagggtgacgaaattcttgccgccactatgaaagcacctgaaaaaaagaaagtcgataagctcaatgctgcacactatagcaccggaaaagtgtccgctagttttacctctacagccatggtgcctgagacaacacacgaggcagccgccattgacgaagacgtcctgcggtaccagtttgtgaagaagaagggctatgtccgacttcacactaataaaggcgacctaaacctggaacttcactgtgaccttacccccaagacctgcgagaacttcatcaggctgtgcaagaaacactactacgacggcacgatttttcatagaagtattcgaaacttcgtgatccaaggcggggaccctaccgggactgggactggcggcgaaagctattgggggaagccattcaaggatgagttccgacctaacttgtctcataccggacgggggattctctcgatggctaattctggcccaaattccaaccgaagccagttcttcatcacgttccggagctgtgcatacttagataaaaagcacaccattttcggcagggtggttgggggatttgacgtcttaacagcgatggagaacgtcgagtcagacccaaagacagaccgaccaaaggaagaaatacggatagatgccactactgtctttgttgatccatatgaggaggccgacgctcagatcgcccaggagaggaaaactcagctgaaagtggctcccgagacaaaggtcaaatctagccaaccccaggcgggtagccaggggccacagacgtttagacaaggagtgggaaaatacattaacccagctgctacaaagcgagctgcggaggaggagccctctacatccgctaccgtgcccatgtctaagaaaaaaccatcacgcgggtttggagatttttcctcgtggtag

SEQ ID NO: 242310 - DNA, 1563 bp, Artificial Sequence
  derived and/or modified sequence
atggggaaaagacaacaccagaaagataagatgtacatcacatgcgcagagtatactcatttttacggaggaaagaagcccgacctgccgcagaccaacttcaggcggctgccgttcgatcactgttcactgtccctgcaacccttcgtgtatccagtgtgcacccccgatggaatcgttttcgatttgctcaatatcgttccatggctgaagaaatacggcactaacccctctaatggcgaaaaactggacggccgaagcctgattaagctgaatttctctaagaattctgagggtaaataccactgtcccgttctgtttactgtctttacgaataatacacacatcgttgctgtcagaactaccggcaacgtctacgcttacgaagctgtcgaacagctgaacattaaagccaagaatttcagggatctcctgacagacgagcccttttcacgacaggatattataacccttcaggatcccactaatttggataagtttaatgtgtccaacttttaccatgtgaagaacaacatgaaaataattgatcctgatgaagaaaaggcgaagcaggatccttcatactatctaaaaaataccaatgcagagacaagagaaacactgcaggagctgtacaaggaatttaaaggggatgaaattttggctgccaccatgaaggcacctgaaaagaaaaaggtggacaaacttaacgctgcccactacagtacgggcaaggttagtgcctcctttacctccacagccatggtacccgaaacaacccatgaggcggcggccatagatgaagacgttctgaggtatcagtttgtcaaaaagaagggttacgtgcgattgcataccaacaaaggtgatttgaacctggaactgcattgcgatctaacgccgaaaacctgcgagaatttcattcgcctgtgcaagaagcactactacgatggaacaatctttcacaggtcaatacggaacttcgtgattcaagggggagacccgaccggaacaggcaccggcggcgagtcctactggggaaagccgtttaaagacgagttccggcctaatctgagccatacaggccgtgggatcctatccatggctaatagtggacccaactctaacaggtcccagttttttatcactttcaggtcctgcgcgtatctggacaaaaaacatacaattttcggccgcgtggtaggaggctttgatgtgctgacagcgatggaaaacgtggaaagtgaccccaagaccgaccggcctaaggaggaaattcggatcgacgccactaccgtgtttgtggatccttatgaggaggccgatgcgcaaatagcccaggagcgcaagactcagctcaaggtcgcacccgaaaccaaagtgaaaagtagccaaccccaggccggttcacaagggccccagacatttagacagggagtgggaaaatatatcaatccagccgccaccaagcgcgctgccgaggaagagccctctacttcagcgacagtccctatgtcgaagaagaaacccagtagaggattcggtgacttcagttcatggtag

SEQ ID NO: 242311 - DNA, 1563 bp, Artificial Sequence
  derived and/or modified sequence
atgggcaagaggcagcaccagaaggacaagatgtacatcacctgtgccgagtacacccacttctacggcggcaagaagccagacctgccccagaccaacttccggcggctgccctttgaccactgcagcctgagcctgcagccctttgtgtaccctgtgtgcaccccagatggcatcgtgtttgacctgctgaacatcgtgccctggctgaagaagtatggcaccaaccccagcaatggagagaagctggatggccgcagcctcatcaagctgaacttcagcaagaacagcgagggcaagtaccactgccctgtgctcttcaccgtcttcaccaacaacacccacatcgtggccgtgaggaccactggaaatgtgtatgcctatgaggccgtggagcagctgaacatcaaggccaagaacttccgggacctgctgacagatgagcccttcagccggcaggacatcatcaccctgcaggaccccaccaacctggacaagttcaacgtgagcaacttctaccacgtgaagaacaacatgaagatcatcgaccctgatgaggagaaggccaagcaggaccccagctactacctgaagaacaccaatgctgagacccgggagaccctgcaggagctgtacaaggagttcaagggagatgagatcctggccgccaccatgaaggcccctgagaagaagaaggtggacaagctgaatgctgcccactacagcacaggcaaggtgtctgccagcttcaccagcacagccatggtgcctgagaccacccatgaagctgctgccattgatgaagatgtgctgcgctaccagtttgtgaagaagaagggctacgtgcggctgcacaccaacaagggggacctgaacctggagctgcactgtgacctgacccccaagacctgtgagaacttcatccggctgtgcaagaagcactactatgatggcaccatcttccacaggagcatccggaacttcgtcatccagggcggggaccccaccggcaccggcaccggcggggagagctactggggcaagcccttcaaggatgagttccggcccaacctgagccacacaggccggggcatcctgtccatggccaacagcggccccaacagcaacagaagccagttcttcatcaccttccgcagctgtgcctacctggacaagaagcacaccatcttcggccgggtggtgggcggctttgatgtgctgacagccatggagaatgtggagagtgaccccaagacagaccggcccaaggaggagatcagaattgatgccaccaccgtgtttgtggacccctatgaggaggctgatgcccagatcgcccaggagaggaagacccagctgaaggtggcccctgagaccaaggtgaagagcagccagccccaggccggcagccagggcccccagaccttccggcagggcgtgggcaagtacatcaacccagctgccaccaagagagctgctgaggaggagcccagcaccagcgccaccgtgcccatgagcaagaagaagcccagccggggctttggagacttcagctcctggtag

SEQ ID NO: 242312 - DNA, 1563 bp, Artificial Sequence
  derived and/or modified sequence
atgggcaagcggcagcaccagaaggacaagatgtacatcacctgcgccgaatacacacatttttatggaggaaaaaagccagaccttcctcagacgaactttcgaagacttcccttcgaccattgctcactgtcactacagccttttgtctatcctgtgtgcactcccgacggcatcgtatttgacttgctcaatatcgtgccatggctcaagaagtacgggaccaacccgagtaacggcgaaaaactcgatggacgctctctgattaagctcaacttcagcaaaaactccgaaggcaagtaccattgccctgtgctttttaccgttttcactaacaacactcatattgtggctgtgagaacgacagggaatgtgtacgcatatgaagccgtggagcagctcaatatcaaggccaagaattttagggacctacttacagatgagcctttttccaggcaggatattatcactcttcaggatcccactaatctcgataaatttaacgtgagcaatttttatcatgtgaaaaacaacatgaaaatcattgatcctgatgaagaaaaagcaaaacaagacccatcttactatctcaagaacacaaacgccgagacacgggaaaccttacaggaactctacaaggaatttaagggagatgagattttggcagccaccatgaaagcccctgaaaagaaaaaggtggacaagctgaacgcagcccactattccacgggaaaagtgtcagccagttttacatccaccgccatggtgccggaaacaacacatgaagccgcagccatagatgaggacgtcctgcgataccagttcgtcaaaaaaaagggttacgttcgcctgcacactaataagggtgatcttaatctagagttacattgtgaccttacacctaagacctgcgagaattttatccgcctgtgcaaaaaacattactacgatggcaccatctttcacagatctataaggaactttgttatacagggtggtgacccaacgggtacaggaacaggcggcgagtcttattggggcaaaccgttcaaagacgagttcagaccaaacctatctcacactgggcggggcattctgtcgatggccaattccggacccaactccaatcggagccaattcttcatcaccttccgcagctgcgcttatctggacaagaagcatactattttcgggagagtcgttgggggcttcgatgtgttgactgccatggagaacgtggaaagtgaccccaaaacagaccgccccaaggaggaaattcgaattgacgccaccacagtgtttgtggacccttacgaggaagctgacgctcagatcgctcaagagcggaagacgcagctcaaggtggcgcctgagacgaaagttaaaagctctcagccccaagcaggatctcaggggcctcagactttccggcagggggttggcaagtacattaacccagctgctaccaagcgcgccgcagaggaagaacctagtaccagcgccaccgtcccaatgagcaagaaaaagccgagcaggggctttggggacttttcctcttggtag

SEQ ID NO: 242313 - DNA, 1563 bp, Artificial Sequence
  derived and/or modified sequence
atgggcaagcggcagcaccagaaggacaagatgtacatcacctgcgctgaatatacccatttttatgggggcaaaaagccagacctgccccagacaaacttcaggagactgccattcgaccactgttctctgagtcttcagcccttcgtgtacccagtttgtactccagatggaatagtcttcgacctgttgaacatcgtgccttggctgaagaaatatgggacgaatccctctaacggcgagaaactcgacggccgaagtctcatcaagctaaatttctctaagaactccgagggtaagtaccactgccccgtgcttttcaccgtttttaccaataatacccacatcgtggcagtgcgcaccacgggcaacgtgtatgcctatgaggctgttgagcagctgaacatcaaggctaagaatttccgggatcttctaacagacgaaccttttagccgacaagacatcattaccctccaagaccctaccaatctggacaagtttaatgtgagtaacttctatcacgttaagaacaacatgaaaatcatcgaccctgacgaagagaaagctaagcaggatccctcttattatcttaaaaatacgaatgccgaaacgagagaaacactacaagaactttacaaggagtttaagggcgatgaaatcctggccgccactatgaaagccccagagaaaaagaaggtggataagctaaatgcggctcactactcaaccggaaaagtgtctgcaagcttcaccagcaccgccatggtgccggagaccactcacgaggcagccgccatcgacgaggacgtgctgcggtaccaattcgtcaagaaaaagggatacgttagactccacacaaataagggagatttgaacctcgagctgcattgcgacttaacaccaaagacctgcgagaattttattcggttatgcaaaaaacactactatgacgggacaattttccatcggtctattaggaacttcgttatccaaggcggggaccctaccggaacggggactggaggcgagtcatactggggcaaaccttttaaagacgagtttcgccctaatctgtcacacactgggagagggatcctatccatggctaactccgggccaaactcaaatagaagccagttttttatcacattcagatcctgcgcgtatctggataagaaacataccatattcggccgagttgtgggcggtttcgatgtgcttactgccatggagaacgtggaatccgatcctaaaactgaccgacctaaggaggagatcagaatcgacgccactacagtttttgtggatccgtatgaagaagctgatgctcagattgctcaagagcgcaagacccagttgaaggtcgcgccagagaccaaagtcaaaagttcccagccacaggcggggtcacagggaccgcagaccttccgtcaaggtgtcgggaagtatatcaaccctgccgccactaagcgggcagccgaagaggaaccctccacctcggccacagttcctatgagcaaaaagaagcccagcagaggctttggcgacttcagctcctggtag

SEQ ID NO: 242314 - DNA, 1563 bp, Artificial Sequence
  derived and/or modified sequence
atgggcaagcggcagcaccagaaggacaagatgtacatcacctgcgccgaatatacccatttttatggaggcaagaagcctgaccttcctcaaaccaactttagaaggctcccttttgaccactgtagcctgagtcttcagcccttcgtctatcctgtctgcacccctgatgggatcgtgtttgatctgctgaacatcgtgccctggctgaagaaatatgggaccaacccatctaatggcgagaaactggatggccgaagccttatcaagctgaacttctctaagaacagcgaagggaaatatcactgccccgttctgttcacggtttttaccaataacacacatatcgtggctgtgcgtactacaggcaatgtgtacgcctatgaggcagtcgagcagctgaacatcaaagcgaagaacttccgggacctactcaccgatgagccttttagccgccaagacatcatcactcttcaggaccctaccaatctggataagttcaatgtaagcaatttttaccacgttaaaaataacatgaagataattgacccagacgaggaaaaagctaaacaagacccatcatactatctgaagaatacaaacgcggagacaagagaaacgctgcaagaactttataaggagttcaaaggagacgaaatactggctgcgacaatgaaggcacccgaaaaaaagaaggtagataagctcaacgcagctcactattctactggcaaggtaagtgccagtttcacttctacagcaatggtgcccgagacaacccacgaggccgctgctatcgacgaggatgttctaaggtaccagtttgtgaaaaagaagggctacgtgagacttcatacgaataaaggagacctcaacctggagctgcattgcgatctcactcccaagacctgcgaaaactttatccggctgtgcaagaagcattattacgacggcacaatctttcacagatcaatcaggaactttgtgatccagggcggtgacccaaccggaaccgggaccggaggtgagagctactggggcaagccgtttaaggatgagtttcggcccaatctctcccataccggacgaggcattctgtccatggcaaacagcggtcctaattctaatagatcacaatttttcattacgtttaggtcttgcgcttacctggacaaaaaacacaccatatttggccgcgtggtgggtggatttgatgtgctcaccgccatggagaacgtggagagcgaccctaagaccgacagaccgaaggaggaaatccggatcgacgccaccacagtatttgtggatccctacgaagaggctgatgcccagatcgcccaagagaggaagacccagcttaaagtggccccagagacaaaagtcaagagcagtcaaccccaggcaggcagtcaagggccccagacgttccgacaaggggtcggaaagtatattaatccggcagccacaaaaagagccgcggaagaagagccatcaacctcagcgaccgtccctatgtcaaagaagaaacctagtcgcggatttggagacttcagctcatggtag

SEQ ID NO: 242315 - DNA, 1563 bp, Artificial Sequence
  derived and/or modified sequence
atgggcaagcggcagcaccagaaggacaagatgtacatcacctgcgctgaatacacccacttttatggcggaaagaaacccgatctgcctcagacgaattttagacgcctgcccttcgatcactgctccctcagcctgcagccatttgtgtacccggtgtgtactccagacggcatcgtgtttgatctccttaatattgttccatggctgaaaaaatatggcacaaatccaagcaacggcgaaaagttagatggaagaagcttaattaaattgaatttttcgaagaacagcgagggaaaatatcactgccccgtgcttttcacagttttcactaataatacgcatatcgtggcagtgagaactacagggaatgtatatgcctacgaggccgtggagcagcttaatatcaaagccaagaattttagagatctgctaaccgacgagccctttagcagacaggacatcattacattgcaggaccctaccaatctagacaaatttaatgtgtctaatttctatcatgtaaagaacaatatgaagatcattgaccccgacgaagagaaggcgaaacaggatccatcttactacctcaaaaacaccaacgcggagacacgcgagactctgcaggagctgtacaaagaattcaaaggggatgaaatattagcagctacgatgaaagccccggaaaagaagaaagtggataaactgaatgctgcgcactactccaccggaaaggtcagcgcatctttcacctcgacagccatggtgccggaaacgacccatgaggctgccgcaatcgatgaggacgtgctgagataccaattcgtgaagaagaagggatacgtgaggttgcataccaataagggtgacctaaatctggagttacattgcgacctaacaccgaagacttgtgagaacttcatcagactatgtaaaaagcactactacgatggcacgatatttcataggtcgattagaaactttgtaatacaagggggcgacccgaccggtaccggcaccgggggcgagtcctattgggggaagcctttcaaggacgaattccggccgaacctcagtcatacaggtagaggaattctgagtatggcgaactctggcccgaacagtaacaggagccagttcttcatcacctttagatcatgtgcttacttagataaaaagcatacaatttttgggagagtagtggggggtttcgacgttctgacagccatggaaaacgtagaaagcgacccaaagacagatagacctaaagaggaaatacgcatagacgcaaccactgtatttgtggatccatacgaggaggcagatgcccagattgctcaggaacgcaaaacccaactgaaggtggcacccgagactaaggtcaagagttcccagccacaggcgggctcccagggcccacagaccttccgccaaggagtagggaaatacattaaccccgctgcaacaaagcgggccgctgaggaggagccatctacctccgcgacagttccgatgtcaaaaaaaaagccttcccggggcttcggggacttctccagctggtag

SEQ ID NO: 242316 - DNA, 2817 bp, Artificial Sequence
  derived and/or modified sequence
ggaagtggtcacggaactcggctgcggctccatggtctgagttgtcagccgttgttttttcgtgctcgctagtcgccgccgccgctccgccatggggaagcgacagcaccaaaaggacaaaatgtacattacctgtgctgaatacactcacttttatggtggcaagaagccagatctcccacaaacaaattttcgtcgtttaccttttgaccactgcagtctctctctgcagccctttgtctacccagtctgcactcccgatggcatcgtctttgacttactgaacattgttccatggcttaagaagtacgggaccaaccccagcaatggagagaagctggacgggaggtccctgatcaagctgaacttttccaagaacagtgaggggaagtaccactgcccagtgctgtttaccgtgttcaccaacaacacccacatcgtggctgtgaggacgaccggcaacgtctacgcctatgaggcagtggaacagctaaatatcaaggccaagaacttccgggacctgctgaccgacgagcccttctcccggcaggacatcatcaccctccaggaccccaccaatttggacaagttcaatgtctctaacttctatcatgtgaagaataacatgaaaataatagacccagatgaagagaaggccaaacaggacccgtcttattatctgaaaaatacaaatgccgagacccgagagaccctgcaggagctctacaaggagttcaaaggggacgagattctggcagccaccatgaaggccccggagaagaagaaagtggacaagctgaacgctgcccactattccacagggaaggtcagcgcttccttcacctccaccgcgatggtcccggagaccacacatgaagcagctgccatcgacgaggatgtgctgcgctaccagtttgtgaagaagaagggctacgtgcggctgcacaccaacaagggcgacctcaacctggagctgcactgcgacctgacaccaaaaacctgcgaaaacttcatcaggctttgcaagaagcattattacgatggcaccatcttccacagatccatccggaactttgtgatccaagggggcgaccccacaggcacaggcacgggtggggagtcatactgggggaagcccttcaaagacgagttccggcccaacctctcgcacacgggccgcggcatcctcagcatggccaactccgggcccaacagcaacaggtctcaattcttcatcacgtttcgctcctgtgcctacctggacaagaagcataccatctttggacgggttgttgggggctttgacgtactgacagccatggagaatgtggagagtgaccccaaaactgaccgccctaaggaggagatccgcattgatgccactacagtgttcgtggacccctatgaggaggccgatgcccagattgcgcaggagcggaagacacagctcaaggtagccccggagaccaaagtgaagagcagccagccccaggcagggagccagggcccccagaccttccgccagggcgtgggcaagtacatcaacccagcagccacgaagcgagcagcagaggaagagccctcaaccagtgccactgtccccatgtccaagaagaagcccagtcggggttttggggacttcagctcctggtagcagcagcaacttgcaggctgtacctctgcccttccttttctcatcaatcactgatgctgaagctgcaggcctgagccctttgtctccctggatgctgggtggcgcctcatctgcatctctgcctcaccccatccactgccacaggctgcctgatgaccactagaggtatgtctgcccctcgtcaccctgctgcacaccaatctgtggcccttcatcatgctaagaacaagaactgcgccatggctggctccttctcttctccagcccatccctctgcagcctgtcatccctgtctgtgaccattggtcgggcccctgggctctagagtgacttttgacgccctccatccctcccgccaggcactgtcctccgcaaggcctggtgcagccctggcagtaactggcttgtaagaggctcagacaccaagctgggcctgcagaggaggggcacagtaggacacagtgactgcccaggtgtccacacacctgtaggcctctgagccagcgtccagggtacaggtgcgggtggtggggatgaaggcctgaccagggagggagaagcaggtttggagaggaccctgtgcccaccctgacagacaccctggctggccctgactgactgtattctctggccacattcaagtcccccattggtgggggcagagaagtaggaccaggccatccttggctccagagctcgaagaccccaagacagccctctgctctcagcggcgccacagagagcctgggctcagccttctgcatcaggacatggcctcgtccactgagggcacgatttaaacatttgacatcagaagctttatttgtaaacctcacacagataaggaccaagggctggcggtgtggccagaggacaggggaagctgaaggccccgtgcttgagctcggcagtcctgctccttgcagtgaagccaccatgggtgaccgtccagcctcacccggtggcctgcacagtgagggaagggcttcagggccatctgctcccagggcaggggacaggccaccaaggacctttggcaaatgaaggtttacatttctgtagtttgtttgttttagagcttaatttgtagttttttagctattaaaaccatttgaatttttaacgacctgatgagggcatcaggtaaattaaaggattttggg

SEQ ID NO: 242317 - DNA, 2574 bp, Artificial Sequence
  derived and/or modified sequence
gaactcggctgcggctccatggtctgagttgtcagccgttgttttttcgtgctcgctagtcgccgccgccgctccgccatggggaagcgacagcaccaaaaggacaaaatgtacattacctgtgctgaatacactcacttttatggtggcaagaagccagatctcccacaaacaaattttcgtcgtttaccttttgaccactgcagtctctctctgcagccctttgtctacccagtctgcactcccgatggcatcgtctttgacttactgaacattgttccatggcttaagaagtacgggaccaaccccagcaatggagagaagctggacgggaggtccctgatcaagctgaacttttccaagaacagtgaggggaagtaccactgcccagtgctgtttaccgtgttcaccaacaacacccacatcgtggctgtgaggacgaccggcaacgtctacgcctatgaggcagtggaacagctaaatatcaaggccaagaacttccgggacctgctgaccgacgagcccttctcccggcaggacatcatcaccctccaggaccccaccaatttggacaagttcaatgtctctaacttctatcatgtgaagaataacatgaaaataatagacccagatgaagagaaggccaaacaggacccgtcttattatctgaaaaatacaaatgccgagacccgagagaccctgcaggagctctacaaggagttcaaaggggacgagattctggcagccaccatgaaggccccggagaagaagaaagtggacaagctgaacgctgcccactattccacagggaaggtcagcgcttccttcacctccaccgcgatggtcccggagaccacacatgaagcagctgccatcgacgaggatgtgctgcgctaccagtttgtgaagaagaagggctacgtgcggctgcacaccaacaagggcgacctcaacctggagctgcactgcgacctgacaccaaaaacctgcgaaaacttcatcaggctttgcaagaagcattattacgatggcaccatcttccacagatccatccggaactttgtgatccaagggggcgaccccacaggcacaggcacgggtggggagtcatactgggggaagcccttcaaagacgagttccggcccaacctctcgcacacgggccgcggcatcctcagcatggccaactccgggcccaacagcaacaggtctcaattcttcatcacgtttcgctcctgtgcctacctggacaagaagcataccatctttggacgggttgttgggggctttgacgtactgacagccatggagaatgtggagagtgaccccaaaactgaccgccctaaggaggagatccgcattgatgccactacagtgttcgtggacccctatgaggaggccgatgcccagattgcgcaggagcggaagacacagctcaaggtagccccggagaccaaagtgaagagcagccagccccaggcagggagccagggcccccagaccttccgccagggcgtgggcaagtacatcaacccagcagccacgaagcgagcagcagaggaagagccctcaaccagtgccactgtccccatgtccaagaagaagcccagtcggggttttggggacttcagctcctggtagcagcaggttggccgctgtggaccttggtggggttgcagggctgggggcccatgtccacatctccatttccagcctttctagcctgccctctgctgccagccaataaattgcttgcctgctgcctgcatcccctttcctggcccctgggagcccacagccttcccatcccttaacctgttgccaagggccttggccctgtttccaggacctggcccagccagagcccactgctgggaccttcaagcacaaggcctgccctacacccaggctggtgcctcaggcctcccctctagtaggcaggccaggttagtgaggaaggactgtgtctccagattgtggtttcctctttaagacagggtcttgctctgttgcccaggctccagtgcagtggtgtgatcatggctcactgcagcctcgacctcctgggctcaagcaatcctcctgcctcagcctcgcaagtagctgggactacagccgtgcaccactacatccagctgtatatgtctggttttcttacccctacttctgtcatcttctcagggacagcctatttatacaaccagtgtggtcccctgaccaacgccattacctgggacaagttttcagaccccagacttactgagcctaagcctctgcagggtgggcttctcggtctgttttgacaaaacttcaggggcttctgaaggctggtgttggacggcagcattgagtttcctgccgtgccctgcctgagctctcagggccctgctcacctgctctggctgtgaaccacctgggcttcatctcaagcctgcctggcgtctctgtgcccctgtgagaatcttgaggggacccacactgggttgaggccagtgtctcctgctgtgagaacaagtggatgtccctctccccgccctcctgctgaagtggccttgctgctctcaggcccggcca

SEQ ID NO: 242318 - DNA, 3875 bp, Artificial Sequence
  derived and/or modified sequence
atggtctgagttgtcagccgttgttttttcgtgctcgctagtcgccgccgccgctccgccatggggaagcgacagcaccaaaaggacaaaatgtacattacctgtgctgaatacactcacttttatggtggcaagaagccagatctcccacaaacaaattttcgtcgtttaccttttgaccactgcagtctctctctgcagccctttgtctacccagtctgcactcccgatggcatcgtctttgacttactgaacattgttccatggcttaagaagtacgggaccaaccccagcaatggagagaagctggacgggaggtccctgatcaagctgaacttttccaagaacagtgaggggaagtaccactgcccagtgctgtttaccgtgttcaccaacaacacccacatcgtggctgtgaggacgaccggcaacgtctacgcctatgaggcagtggaacagctaaatatcaaggccaagaacttccgggacctgctgaccgacgagcccttctcccggcaggacatcatcaccctccaggaccccaccaatttggacaagttcaatgtctctaacttctatcatgtgaagaataacatgaaaataatagacccagatgaagagaaggccaaacaggacccgtcttattatctgaaaaatacaaatgccgagacccgagagaccctgcaggagctctacaaggagttcaaaggggacgagattctggcagccaccatgaaggccccggagaagaagaaagtggacaagctgaacgctgcccactattccacagggaaggtcagcgcttccttcacctccaccgcgatggtcccggagaccacacatgaagcagctgccatcgacgaggatgtgctgcgctaccagtttgtgaagaagaagggctacgtgcggctgcacaccaacaagggcgacctcaacctggagctgcactgcgacctgacaccaaaaacctgcgaaaacttcatcaggctttgcaagaagcattattacgatggcaccatcttccacagatccatccggaactttgtgatccaagggggcgaccccacaggcacaggcacgggtggggagtcatactgggggaagcccttcaaagacgagttccggcccaacctctcgcacacgggccgcggcatcctcagcatggccaactccgggcccaacagcaacaggtctcaattcttcatcacgtttcgctcctgtgcctacctggacaagaagcataccatctttggacgggttgttgggggctttgacgtactgacagccatggagaatgtggagagtgaccccaaaactgaccgccctaaggaggagatccgcattgatgccactacagtgttcgtggacccctatgaggaggccgatgcccagattgcgcaggagcggaagacacagctcaaggtagccccggagaccaaagtgaagagcagccagccccaggcagggagccagggcccccagaccttccgccagggcgtgggcaagtacatcaacccagcagccacgaagcgagcagcagaggaagagccctcaaccagtgccactgtccccatgtccaagaagaagcccagtcggggttttggggacttcagctcctggtagcagcagggacagcctatttatacaaccagtgtggtcccctgaccaacgccattacctgggacaagttttcagaccccagacttactgagcctaagcctctgcagggtgggcttctcggtctgttttgacaaaacttcaggggcttctgaaggctggtgttggacggcagcattgagtttcctgccgtgccctgcctgagctctcagggccctgctcacctgctctggctgtgaaccacctgggcttcatctcaagcctgcctggcgtctctgtgcccctgtgagaatcttgaggggacccacactgggttgaggccagtgtctcctgctgtgagaacaagtggatgtccctctccccgccctcctgctgaagtggccttgctgctctcaggcccggccactgggctccaagactctgctcctcctgtcagtcactgactctgatggccttgggccagctgcatcagcagcccttaaagaaagacccctccctcaacccccatttttctgttaaatgtgcccctggctggctttttcttcgtcttcagcccaggccagtggtcagtgttctcatgtcatggactctccttgcctgacacttgcctcttgggctccctgttgccctcaggccaccccccacttctagttcttcacactaagccctaacttaggccttgttcttggttttctcatttttgttgccccaaatcttgaacctgtcagcaacttgcaggctgtacctctgcccttccttttctcatcaatcactgatgctgaagctgcaggcctgagccctttgtctccctggatgctgggtggcgcctcatctgcatctctgcctcaccccatccactgccacaggctgcctgatgaccactagaggtatgtctgcccctcgtcaccctgctgcacaccaatctgtggcccttcatcatgctaagaacaagaactgcgccatggctggctccttctcttctccagcccatccctctgcagcctgtcatccctgtctgtgaccattggtcgggcccctgggctctagagtgacttttgacgccctccatccctcccgccaggcactgtcctccgcaaggcctggtgcagccctggcagtaactggcttgtaagaggctcagacaccaagctgggcctgcagaggaggggcacagtaggacacagtgactgcccaggtgtccacacacctgtaggcctctgagccagcgtccagggtacaggtgcgggtggtggggatgaaggcctgaccagggagggagaagcaggtttggagaggaccctgtgcccaccctgacagacaccctggctggccctgactgactgtattctctggccacattcaagtcccccattggtgggggcagagaagtaggaccaggccatccttggctccagagctcgaagaccccaagacagccctctgctctcagcggcgccacagagagcctgggctcagccttctgcatcaggacatggcctcgtccactgagggcacgatttaaacatttgacatcagaagctttatttgtaaacctcacacagataaggaccaagggctggcggtgtggccagaggacaggggaagctgaaggccccgtgcttgagctcggcagtcctgctccttgcagtgaagccaccatgggtgaccgtccagcctcacccggtggcctgcacagtgagggaagggcttcagggccatctgctcccagggcaggggacaggccaccaaggacctttggcaaatgaaggtttacatttctgtagtttgtttgttttagagcttaatttgtagttttttagctattaaaaccatttgaatttttaacgacctgatgagggcatcaggtaaattaaaggattttgggaagattcttattttcaattctaatatctgacagatgccatcaagaataagcattaaggtataaaaaatactgtgtgtataaaacaatgccaaaccacattcctacagcaaatgcactgtgccatttataaccctgacatcacctcccaaggctctcaaggaagatttattttaaataacttaaatagaagtcctagatgatattgtttaggaatttaagagggtggtggatatggtcctgtgaatagcacttcccctgaagccagctcatggtctgttcatttggtttaaaaatgagcttgtattttgcagaagcccaacaaaaaaaaagtgataaaagtgttgttggtataaattacaaaaaaaaaaaaaaa

SEQ ID NO: 242319 - DNA, 1841 bp, Artificial Sequence
  derived and/or modified sequence
gaactcggctgcggctccatggtctgagttgtcagccgttgttttttcgtgctcgctagtcgccgccgccgctccgccatggggaagcgacagcaccaaaaggacaaaatgtacattacctgtgctgaatacactcacttttatggtggcaagaagccagatctcccacaaacaaattttcgtcgtttaccttttgaccactgcagtctctctctgcagccctttgtctacccagtctgcactcccgatggcatcgtctttgacttactgaacattgttccatggcttaagaagtacgggaccaaccccagcaatggagagaagctggacgggaggtccctgatcaagctgaacttttccaagaacagtgaggggaagtaccactgcccagtgctgtttaccgtgttcaccaacaacacccacatcgtggctgtgaggacgaccggcaacgtctacgcctatgaggcagtggaacagctaaatatcaaggccaagaacttccgggacctgctgaccgacgagcccttctcccggcaggacatcatcaccctccaggaccccaccaatttggacaagttcaatgtctctaacttctatcatgtgaagaataacatgaaaataatagacccagatgaagagaaggccaaacaggacccgtcttattatctgaaaaatacaaatgccgagacccgagagaccctgcaggagctctacaaggagttcaaaggggacgagattctggcagccaccatgaaggccccggagaagaagaaagtggacaagctgaacgctgcccactattccacagggaaggtcagcgcttccttcacctccaccgcgatggtcccggagaccacacatgaagcagctgccatcgacgaggatgtgctgcgctaccagtttgtgaagaagaagggctacgtgcggctgcacaccaacaagggcgacctcaacctggagctgcactgcgacctgacaccaaaaacctgcgaaaacttcatcaggctttgcaagaagcattattacgatggcaccatcttccacagatccatccggaactttgtgatccaagggggcgaccccacaggcacaggcacgggtggggagtcatactgggggaagcccttcaaagacgagttccggcccaacctctcgcacacgggccgcggcatcctcagcatggccaactccgggcccaacagcaacaggtctcaattcttcatcacgtttcgctcctgtgcctacctggacaagaagcataccatctttggacgggttgttgggggctttgacgtactgacagccatggagaatgtggagagtgaccccaaaactgaccgccctaaggaggagatccgcattgatgccactacagtgttcgtggacccctatgaggaggccgatgcccagattgcgcaggagcggaagacacagctcaaggtagccccggagaccaaagtgaagagcagccagccccaggcagggagccagggcccccagaccttccgccagggcgtgggcaagtacatcaacccagcagccacgaagcgagcagcagaggaagagccctcaaccagtgccactgtccccatgtccaagaagaagcccagtcggggttttggggacttcagctcctggtagcagcaggctccagtgcagtggtgtgatcatggctcactgcagcctcgacctcctgggctcaagcaatcctcctgcctcagcctcgcaagtagctgggactacagccgtgcaccactacatccagctgtatatgtctggttttcttacccctacttctgtcatcttctcagggacagcctatttatacaaccagtgtggtc

SEQ ID NO: 242320 - DNA, 1563 bp, Artificial Sequence
  derived and/or modified sequence
atggggaaacggcagcatcaaaaagataaaatgtatatcacttgcgccgaatacactcacttttacggaggtaaaaaacctgacctgcctcagacgaacttccgaaggctcccctttgaccactgttcactgtcactccagccttttgtctaccccgtttgtacccccgatggaatagtgttcgatctgctaaatatagtgccctggctgaagaaatatggaactaacccttccaacggcgaaaagcttgatggccgatctttaatcaagttgaattttagtaagaattcggagggcaagtaccactgtccagtactgtttacagttttcactaacaacacccacattgttgccgtccgcactacggggaatgtgtacgcgtatgaggccgtggagcaattgaacattaaggcaaagaacttccgggatctcctgacagatgagccgttctccaggcaggacattatcaccctccaggatccgactaacctggacaagtttaatgtgagcaatttttaccatgttaaaaacaacatgaaaattattgatcccgacgaagaaaaagctaagcaagatccatcttattatctgaagaatacaaacgctgagactcgggagacactccaggagttgtacaaggaattcaagggagacgagattctggcagcgaccatgaaggccccagagaaaaagaaggttgacaagttaaacgcagctcattatagcacaggaaaggtcagtgcgtctttcacatcaactgccatggttcctgaaacgacccacgaggctgcggctatagatgaagacgttcttagatatcaatttgtgaagaagaaaggatacgttcgcctccataccaacaagggcgacttgaatttagagctacactgtgacctgaccccaaagacatgtgagaactttattcgcttgtgcaaaaaacactattacgacgggactatctttcaccggagcatccgtaattttgtgatccaaggaggcgatccaacaggaactgggaccgggggagaaagctattgggggaaaccatttaaagatgaatttagacccaatcttagccacaccgggaggggaatcctgagtatggccaatagtggacccaacagcaatcgtagtcagttttttattaccttccggtcgtgcgcataccttgataagaagcacaccattttcggcagagtcgtgggcggtttcgacgtgctcacagccatggaaaatgtcgagtcagacccgaagacggaccgacctaaagaggaaatacgcatcgacgccacaacagtgttcgtggatccgtatgaggaagctgacgctcagatcgcacaagagagaaagacgcagctcaaggtggcacctgagacaaaagtcaaatcatcacagccacaggctggctcacagggcccacagacatttagacagggcgtgggcaaatacattaacccagccgctactaaacgcgcagccgaggaagaaccgtctacttctgccacagtcccaatgtcaaaaaaaaaacccagtcggggattcggcgactttagttcctggtag

SEQ ID NO: 242321 - DNA, 1563 bp, Artificial Sequence
  derived and/or modified sequence
atgggtaagaggcagcatcagaaggacaagatgtatattacatgtgcagaatatactcacttctacggtggaaaaaagccagaccttcctcaaactaacttcagacgtcttccctttgatcactgtagcctcagcctacagccattcgtgtatcctgtctgcactccggatggaattgtctttgacctgctgaacatcgtgccttggttaaaaaaatatggcaccaacccttctaacggggagaaattagatgggagaagtctgattaagttgaacttcagtaagaactccgaagggaaataccactgtcccgttctgtttaccgtgttcacgaataacacccacattgtggcagtgcgtactactgggaacgtctacgcttatgaggctgtggagcagctcaacatcaaggccaaaaatttcagagacctgctcactgatgaacccttcagcaggcaggatatcatcaccttacaggatccaaccaacctcgacaagtttaatgtcagcaacttctatcacgtgaagaacaacatgaagattatcgaccctgatgaagagaaggccaagcaggacccatcctactatctgaaaaatacaaacgccgagaccagagagaccctccaggagttatacaaggagttcaagggcgacgaaatattagccgcaaccatgaaggctcctgagaaaaaaaaggtcgataaattaaatgccgctcactactccaccggaaaggtctctgcgtctttcacctcaactgctatggttcctgagacaacccacgaggccgctgctattgatgaagacgttctgcgatatcagtttgtcaaaaagaaagggtacgttagactgcacacaaacaagggagacctgaatttggagctacactgcgacttgacgcctaagacttgcgaaaattttatccgcctgtgcaagaagcactactacgatggaaccattttccacaggtctatcagaaattttgtgatccagggtggcgatccaacaggcaccggtacgggcggtgaaagctattggggaaagccatttaaggatgagtttagaccaaatctgagccacaccgggcgaggtattctctctatggctaacagtgggcctaacagtaaccgtagccaattctttatcaccttccggtcttgcgcttacctcgacaagaagcatacaattttcggtagagttgtgggcggatttgacgtccttaccgccatggaaaacgtggaaagtgatccaaagactgacaggccgaaggaagagattcgcatcgacgccaccactgtgttcgttgatccttacgaagaggcggatgctcagatagcacaggagagaaaaacccagcttaaagtcgcccctgagacaaaggttaagagctcacagcctcaagccggatcccagggacctcaaacgtttcggcaaggtgtcggtaagtatattaatccagctgctacaaagcgtgcggctgaagaggagccgtcaactagcgcaaccgttcctatgagcaaaaaaaagccctcacgtggttttggggatttttccagctggtag

SEQ ID NO: 242322 - DNA, 1563 bp, Artificial Sequence
  derived and/or modified sequence
atgggaaagcggcaacatcagaaggataagatgtatatcacctgtgcagagtacactcacttttacggcggaaagaaacctgacttgcctcagactaatttcagaaggctccctttcgaccactgtagtctgtctctccagccgtttgtgtaccccgtgtgcactcctgatggaattgttttcgacttactgaacatcgttccctggctcaagaaatacgggactaaccctagcaatggggagaagctcgatggacggtccttgattaaactgaatttcagcaagaacagtgagggcaagtaccactgccccgtcctattcaccgtctttacaaacaatacgcacatcgttgcggtacggacgactggaaacgtgtatgcctacgaagccgtggagcagctaaacatcaaggcaaagaacttccgagatctgttaactgacgaacctttctctagacaagatataatcacgctgcaggatccaacgaaccttgataagtttaatgtctcaaacttctaccatgtgaagaacaatatgaaaattatcgaccccgacgaagagaaggccaaacaagatcctagttactatctcaaaaatacaaatgctgagactcgagagacacttcaggaactttataaggaattcaaaggagatgagattcttgctgctacgatgaaagctcctgagaagaaaaaagtcgataaactgaacgctgcacattattcgacagggaaagtaagtgcaagctttacatcaacagctatggtgccagagacaacccacgaggcagcagcaatagacgaggatgtcttgaggtaccagttcgtaaagaaaaaagggtatgtaaggctccacacgaataagggggacctgaacctggagctccactgtgatctcactcctaaaacatgtgagaacttcatccgactgtgcaagaaacattactacgacgggacaatcttccaccggtcgatcaggaatttcgtaatacagggcggagacccaacaggcacagggaccggcggtgagtcatactggggcaagcctttcaaggacgagttccgcccaaatctgtcccacaccggtcgtggtatactttccatggccaactccgggccaaactcaaacaggtcccagtttttcatcaccttccgctcctgtgcttacctggataagaaacacacaatattcggtcgggtggtcggcggattcgacgtgttaacagcaatggaaaatgtggagtccgatcccaaaaccgaccgacctaaagaagagattaggatcgatgccactactgtgttcgtggacccgtatgaagaagccgatgcacagattgctcaggaacgcaagacgcagctgaaggttgctccagaaaccaaggtgaaatccagtcaacctcaggcagggtcccagggaccacagactttccggcaaggtgtgggtaagtatattaacccagccgcaaccaaacgtgccgctgaagaggagccaagtactagcgccaccgtgccaatgtccaaaaagaagccatcaaggggctttggagacttttctagttggtag

SEQ ID NO: 242323 - DNA, 1563 bp, Artificial Sequence
  derived and/or modified sequence
atgggcaagaggcagcaccagaaggacaagatgtacattacctgcgcggaatacacacacttttatggcggtaagaagccggacctgccgcagacaaattttaggcggttaccgtttgaccattgttcactgagcctgcaaccctttgtttatccagtgtgtacccccgatggtattgtctttgacctcctcaacatcgttccatggctgaagaaatacggtacaaatcctagcaatggtgagaagcttgacggtaggagcctcattaagctgaatttctccaagaatagcgaaggtaagtaccattgtcccgtgctgttcaccgtgttcacaaataatacccacatcgttgcagttcggactactggcaacgtgtatgcatacgaggccgtcgagcagctgaacatcaaggctaagaacttcagagacttactgaccgatgaaccattttccagacaagatatcattaccctgcaggatcctacaaatctcgacaaatttaacgtgagtaacttttaccatgttaaaaacaacatgaaaattatcgacccggacgaagaaaaggctaagcaagatccgtcttactaccttaaaaatacgaacgccgagacacgcgaaaccctccaggaactgtacaaggagtttaaaggcgacgagattctcgctgccacaatgaaagcgccagagaagaagaaggtcgacaaactgaacgcagcccactattcaaccgggaaggtttcagccagttttacgtcaactgccatggtacctgaaaccacacatgaagctgccgcaatagacgaagacgttctgcgttaccagttcgtgaagaaaaaaggctatgttcggctgcatacaaataagggagacctgaatctggaactgcattgcgacttgacaccaaagacatgcgaaaacttcatcagattatgcaagaagcactattacgatggtaccatctttcacagaagcattcgtaattttgtgatccagggaggcgatcccacaggaaccggaactggcggagaaagctattggggcaagcctttcaaagatgagttccgccctaacctctcacatacaggcaggggaattctttctatggcaaatagcgggccaaactcaaaccggtctcaatttttcattacatttcggagctgtgcatatctcgacaagaaacacaccatcttcgggcgagtcgtgggcggattcgacgtcttgactgcaatggagaatgtggagagcgacccaaaaacagaccggccaaaagaagaaattagaattgatgccacaaccgtgttcgtcgatccgtacgaagaagcagatgcccagatagcccaggaacgcaaaacacagctcaaagtcgctcccgaaaccaaggtgaagtcttcccaaccacaggccggttcacagggtcctcaaacgtttagacagggagtgggtaagtacattaaccccgctgcaacaaagcgcgctgcagaagaagaaccgtcaacgagcgccaccgtacccatgagtaaaaaaaagccctcccgcggatttggcgacttctcaagttggtag

SEQ ID NO: 242324 - DNA, 1563 bp, Artificial Sequence
  derived and/or modified sequence
atgggcaagagacagcaccagaaggacaagatgtacatcacctgcgccgagtacacccacttctacggcggcaagaagcccgacctgccccagaccaacttcagaagactgcccttcgaccactgcagcctgagcctgcagcccttcgtgtaccccgtgtgcacccccgacggcatcgtgttcgacctgctgaacatcgtgccctggctgaagaagtacggcaccaaccccagcaacggcgagaagctggacggcagaagcctgatcaagctgaacttcagcaagaacagcgagggcaagtaccactgccccgtgctgttcaccgtgttcaccaacaacacccacatcgtggccgtgagaaccaccggcaacgtgtacgcctacgaggccgtggagcagctgaacatcaaggccaagaacttcagagacctgctgaccgacgagcccttcagcagacaggacatcatcaccctgcaggaccccaccaacctggacaagttcaacgtgagcaacttctaccacgtgaagaacaacatgaagatcatcgaccccgacgaggagaaggccaagcaggaccccagctactacctgaagaacaccaacgccgagaccagagagaccctgcaggagctgtacaaggagttcaagggcgacgagatcctggccgccaccatgaaggcccccgagaagaagaaggtggacaagctgaacgccgcccactacagcaccggcaaggtgagcgccagcttcaccagcaccgccatggtgcccgagaccacccacgaggccgccgccatcgacgaggacgtgctgagataccagttcgtgaagaagaagggctacgtgagactgcacaccaacaagggcgacctgaacctggagctgcactgcgacctgacccccaagacctgcgagaacttcatcagactgtgcaagaagcactactacgacggcaccatcttccacagaagcatcagaaacttcgtgatccagggcggcgaccccaccggcaccggcaccggcggcgagagctactggggcaagcccttcaaggacgagttcagacccaacctgagccacaccggcagaggcatcctgagcatggccaacagcggccccaacagcaacagaagccagttcttcatcaccttcagaagctgcgcctacctggacaagaagcacaccatcttcggcagagtggtgggcggcttcgacgtgctgaccgccatggagaacgtggagagcgaccccaagaccgacagacccaaggaggagatcagaatcgacgccaccaccgtgttcgtggacccctacgaggaggccgacgcccagatcgcccaggagagaaagacccagctgaaggtggcccccgagaccaaggtgaagagcagccagccccaggccggcagccagggcccccagaccttcagacagggcgtgggcaagtacatcaaccccgccgccaccaagagagccgccgaggaggagcccagcaccagcgccaccgtgcccatgagcaagaagaagcccagcagaggcttcggcgacttcagcagctggtag

SEQ ID NO: 242325 - protein, 527 aa, Artificial Sequence
  derived and/or modified sequence
MGKRQHQKDKMYITCAEYTHFYGGKKPDLPQTNFRRLPFDHCSLSLQPFVYPVCTPDGIVFDLLNIVPWLKKYGTNPSNGEKLDGRSLIKLNFSKNSEGKYHCPVLFTVFTNNTHIVAVRTTGNVYAYEAVEQLNIKAKNFRDLLTDEPFSRQDIITLQDPTNLDKFNVSNFYHVKNNMKIIDPDEEKAKQDPSYYLKNTNAETRETLQELYKEFKGDEILAATMKAPEKKKVDKLNAAHYSTGKVSASFTSTAMVPETTHEAAAIDEDVLRYQFVKKKGYVRLHTNKGDLNLELHCDLTPKTCENFIRLCKKHYYDGTIFHRSIRNFVIQGGDPTGTGTGGESYWGKPFKDEFRPNLSHTGRGILSMANSGPNSNRSQFFITFRSCAYLDKKHTIFGRVVGGFDVLTAMENVESDPKTDRPKEEIRIDATTVFVDPYEEADAQIAQERKTQLKVAPETKVKSSQPQAGSQGPQTFRQGVGKYINPAATEQQRKSPQPVPLSPCPRRSPVGVLGTSAPGSSRLPDDH

SEQ ID NO: 242326 - DNA, 1584 bp, Artificial Sequence
  derived and/or modified sequence
atgggcaagaggcagcatcagaaggacaagatgtacattacgtgtgcagagtacactcatttctatggaggcaagaaacccgacttaccgcagacaaactttcgtcgcctgccgtttgaccactgcagcctgagcttacaacctttcgtgtatccggtttgcacccctgatggaattgtgttcgacctcctcaacatcgttccatggctgaagaagtacggcacgaacccctcaaatggggaaaagttggacggcagatccctgatcaaattgaacttcagcaagaatagtgagggaaagtaccattgtccagtcctgtttaccgtattcactaataacacccacatcgtcgcagtgcggactacaggtaacgtctacgcctatgaagcagtcgagcagctcaatatcaaagccaaaaactttagggacctgctgacggacgaaccattcagcagacaggatatcataaccctgcaggatcccaccaatctcgacaagttcaatgtatctaatttttaccacgttaaaaacaatatgaagattatagaccccgacgaagaaaaagctaaacaggatcccagctattacctgaaaaacaccaatgccgaaacacgcgagactcttcaggaattatacaaagagtttaagggtgacgagatcctggcagccaccatgaaagctcccgagaaaaagaaagtggataaactgaacgccgcgcattactcgaccggaaaagtctccgcatcatttacatcgacagccatggtgcctgaaacaactcatgaagccgctgctattgatgaagacgtgctacgataccaatttgtgaagaagaaggggtatgtgagactccacacaaataagggcgacttgaacctggagctgcattgcgacttaaccccaaagacatgcgagaatttcatcagactgtgcaaaaaacattactacgacggaacaatctttcatcgctcaatacggaacttcgttatccaggggggcgaccctacaggcactggaacagggggtgagtcttattggggtaaaccgttcaaggacgaatttcgaccgaacctctcccacacaggcagaggaattctgagcatggccaatagtggcccaaattctaatcggagccagttctttataacattcaggtcatgtgcctatctggataaaaagcacactatcttcggcagagtggtcggaggctttgacgttcttaccgctatggaaaacgtcgaatccgatcctaagacagaccgaccaaaagaagagatccgcatcgatgccacaactgtgtttgtggatccttacgaggaagctgatgcccaaattgctcaggaacggaagactcagctaaaggtagctcccgaaacaaaggtcaagtcgagtcagccgcaggccggatctcagggcccgcagacctttagacagggcgtcggtaaatacatcaaccctgcggccaccgagcagcagcgtaagagcccccaaccagtgcctcttagcccctgtcccaggcggtccccagttggtgtattgggcacttccgctccaggctcctcacgtcttcctgatgaccattag

SEQ ID NO: 242327 - DNA, 1584 bp, Artificial Sequence
  derived and/or modified sequence
atgggcaagaggcagcaccagaaggacaagatgtacatcacctgtgccgagtacacccacttctacggcggcaagaagccagacctgccccagaccaacttccggcggctgccctttgaccactgcagcctgagcctgcagccctttgtgtaccctgtgtgcaccccagatggcatcgtgtttgacctgctgaacatcgtgccctggctgaagaagtatggcaccaaccccagcaatggagagaagctggatggccgcagcctcatcaagctgaacttcagcaagaacagcgagggcaagtaccactgccctgtgctcttcaccgtcttcaccaacaacacccacatcgtggccgtgaggaccactggaaatgtgtatgcctatgaggccgtggagcagctgaacatcaaggccaagaacttccgggacctgctgacagatgagcccttcagccggcaggacatcatcaccctgcaggaccccaccaacctggacaagttcaacgtgagcaacttctaccacgtgaagaacaacatgaagatcatcgaccctgatgaggagaaggccaagcaggaccccagctactacctgaagaacaccaatgctgagacccgggagaccctgcaggagctgtacaaggagttcaagggagatgagatcctggccgccaccatgaaggcccctgagaagaagaaggtggacaagctgaatgctgcccactacagcacaggcaaggtgtctgccagcttcaccagcacagccatggtgcctgagaccacccatgaagctgctgccattgatgaagatgtgctgcgctaccagtttgtgaagaagaagggctacgtgcggctgcacaccaacaagggggacctgaacctggagctgcactgtgacctgacccccaagacctgtgagaacttcatccggctgtgcaagaagcactactatgatggcaccatcttccacaggagcatccggaacttcgtcatccagggcggggaccccaccggcaccggcaccggcggggagagctactggggcaagcccttcaaggatgagttccggcccaacctgagccacacaggccggggcatcctgtccatggccaacagcggccccaacagcaacagaagccagttcttcatcaccttccgcagctgtgcctacctggacaagaagcacaccatcttcggccgggtggtgggcggctttgatgtgctgacagccatggagaatgtggagagtgaccccaagacagaccggcccaaggaggagatcagaattgatgccaccaccgtgtttgtggacccctatgaggaggctgatgcccagatcgcccaggagaggaagacccagctgaaggtggcccctgagaccaaggtgaagagcagccagccccaggccggcagccagggcccccagaccttccggcagggcgtgggcaagtacatcaacccagctgccacagagcagcagaggaagagcccccagcctgtgcccctgagcccctgcccccggcgcagccctgtgggcgtgctgggcaccagcgcccctggcagcagccggctgcctgatgaccactag

SEQ ID NO: 242328 - DNA, 1584 bp, Artificial Sequence
  derived and/or modified sequence
atgggcaagcggcagcaccagaaggacaagatgtacatcacctgcgcagaatacacccatttctatggcggcaagaaaccagacctcccacaaacaaatttccgtcgtctgcccttcgatcattgcagcctctccctgcagccctttgtctatcccgtatgcacaccagatggaatcgtcttcgatctgctgaatatcgtaccatggctgaaaaaatacgggacaaacccgagcaacggggagaaattggatggccgtagtctgattaaattaaatttctccaagaacagcgagggcaaataccattgcccagtgctctttaccgtgttcactaacaatacccatattgtagctgtgagaaccaccggcaatgtctatgcttatgaggcggtagaacaactgaatatcaaagccaaaaatttccgagaccttttgaccgacgagccattttctcgccaagatatcattaccctccaggatccaactaacctagacaagttcaatgtttctaacttttaccacgtcaaaaataatatgaaaatcatcgaccctgatgaggagaaagctaagcaagatccaagctactatctgaagaacacaaatgcagagacgagggagacccttcaagaactctacaaagagtttaagggcgacgaaatcttggcagccactatgaaagccccagagaaaaagaaggttgacaaactgaatgccgctcactatagcactggaaaggtgtcagcttctttcacctcaaccgcaatggtacctgagactactcatgaggcagccgccatcgacgaggacgtgcttcgataccagtttgtgaagaaaaagggctatgtaaggctgcataccaataaaggggatttgaatctggagttgcactgcgacctaaccccgaaaacatgtgagaacttcattcgcttgtgtaagaaacactactatgatggaaccattttccataggagcatacgtaactttgtcatccagggaggggatcctacagggactggcaccgggggcgagtcctattggggaaagcccttcaaggacgagtttcgcccaaacctttcacacacagggcgcggcatactatctatggcaaactctggccctaacagcaaccggtcacaattctttatcaccttccgtagttgcgcctatctggataagaagcacaccatttttggtcgggttgtcggcgggtttgacgtgctcaccgccatggaaaatgtcgaatcagaccctaagactgaccggcccaaagaggagatacggattgacgctacaacagtgttcgtggatccctacgaggaggcagatgctcagattgcccaggagcgtaagacccagctgaaagtggcacccgagaccaaggtgaaatcatctcaaccgcaggctggtagccagggcccccaaacattccggcagggggttgggaagtacattaaccctgcggccactgaacagcaaagaaagtctccccagccagtccctctgtccccatgtccgcgacgaagccccgtcggagtccttggtacgagcgcgcctggcagctccaggctgccagacgaccactag

SEQ ID NO: 242329 - DNA, 2709 bp, Artificial Sequence
  derived and/or modified sequence
gtttccggggcgcgccgcggaacccggaagtggtcacggaactcggctgcggctccatggtctgagttgtcagccgttgttttttcgtgctcgctagtcgccgccgccgctccgccatggggaagcgacagcaccaaaaggacaaaatgtacattacctgtgctgaatacactcacttttatggtggcaagaagccagatctcccacaaacaaattttcgtcgtttaccttttgaccactgcagtctctctctgcagccctttgtctacccagtctgcactcccgatggcatcgtctttgacttactgaacattgttccatggcttaagaagtacgggaccaaccccagcaatggagagaagctggacgggaggtccctgatcaagctgaacttttccaagaacagtgaggggaagtaccactgcccagtgctgtttaccgtgttcaccaacaacacccacatcgtggctgtgaggacgaccggcaacgtctacgcctatgaggcagtggaacagctaaatatcaaggccaagaacttccgggacctgctgaccgacgagcccttctcccggcaggacatcatcaccctccaggaccccaccaatttggacaagttcaatgtctctaacttctatcatgtgaagaataacatgaaaataatagacccagatgaagagaaggccaaacaggacccgtcttattatctgaaaaatacaaatgccgagacccgagagaccctgcaggagctctacaaggagttcaaaggggacgagattctggcagccaccatgaaggccccggagaagaagaaagtggacaagctgaacgctgcccactattccacagggaaggtcagcgcttccttcacctccaccgcgatggtcccggagaccacacatgaagcagctgccatcgacgaggatgtgctgcgctaccagtttgtgaagaagaagggctacgtgcggctgcacaccaacaagggcgacctcaacctggagctgcactgcgacctgacaccaaaaacctgcgaaaacttcatcaggctttgcaagaagcattattacgatggcaccatcttccacagatccatccggaactttgtgatccaagggggcgaccccacaggcacaggcacgggtggggagtcatactgggggaagcccttcaaagacgagttccggcccaacctctcgcacacgggccgcggcatcctcagcatggccaactccgggcccaacagcaacaggtctcaattcttcatcacgtttcgctcctgtgcctacctggacaagaagcataccatctttggacgggttgttgggggctttgacgtactgacagccatggagaatgtggagagtgaccccaaaactgaccgccctaaggaggagatccgcattgatgccactacagtgttcgtggacccctatgaggaggccgatgcccagattgcgcaggagcggaagacacagctcaaggtagccccggagaccaaagtgaagagcagccagccccaggcagggagccagggcccccagaccttccgccagggcgtgggcaagtacatcaacccagcagccaccgagcagcagaggaagagccctcaaccagtgccactgtccccatgtccaagaagaagcccagtcggggttttggggacttcagctcctggtagcagcaggctgcctgatgaccactagaggtatgtctgcccctcgtcaccctgctgcacaccaatctgtggcccttcatcatgctaagaacaagaactgcgccatggctggctccttctcttctccagcccatccctctgcagcctgtcatccctgtctgtgaccattggtcgggcccctgggctctagagtgacttttgacgccctccatccctcccgccaggcactgtcctccgcaaggcctggtgcagccctggcagtaactggcttgtaagaggctcagacaccaagctgggcctgcagaggaggggcacagtaggacacagtgactgcccaggtgtccacacacctgtaggcctctgagccagcgtccagggtacaggtgcgggtggtggggatgaaggcctgaccagggagggagaagcaggtttggagaggaccctgtgcccaccctgacagacaccctggctggccctgactgactgtattctctggccacattcaagtcccccattggtgggggcagagaagtaggaccaggccatccttggctccagagctcgaagaccccaagacagccctctgctctcagcggcgccacagagagcctgggctcagccttctgcatcaggacatggcctcgtccactgagggcacgatttaaacatttgacatcagaagctttatttgtaaacctcacacagataaggaccaagggctggcggtgtggccagaggacaggggaagctgaaggccccgtgcttgagctcggcagtcctgctccttgcagtgaagccaccatgggtgaccgtccagcctcacccggtggcctgcacagtgagggaagggcttcagggccatctgctcccagggcaggggacaggccaccaaggacctttggcaaatgaaggtttacatttctgtagtttgtttgttttagagcttaatttgtagttttttagctattaaaaccatttgaatttttaacgacctgatgagggcatcaggtaaattaaaggattttgggaagattctt

SEQ ID NO: 242330 - DNA, 1584 bp, Artificial Sequence
  derived and/or modified sequence
atggggaaacggcagcaccagaaggataagatgtacatcacctgcgcagagtacactcacttctatgggggtaagaagccggatttgccccagactaattttagacgtctcccattcgatcactgctctttgagtctgcagccctttgtctaccctgtctgtacaccggatgggatcgtgtttgatctcctgaacattgtgccctggctgaaaaagtacggcacaaatccctcaaatggtgagaagcttgacggccgttcccttattaagttaaactttagtaagaactccgaaggtaagtaccactgccccgtcctattcacagttttcaccaataacactcacatagtggccgtcagaaccaccggcaacgtgtatgcgtacgaggccgtggagcagttaaatattaaggctaaaaactttcgagacctcttgaccgatgaacctttctctaggcaggatattattacactgcaggatcctactaacctggacaaattcaatgtttcaaacttctatcacgtcaaaaataatatgaaaatcatcgacccagacgaagagaaagcgaagcaggatcctagctactacctgaagaatactaatgcggagacccgcgagactctgcaggagctgtacaaagaatttaagggcgatgaaattctggccgctaccatgaaagctccagaaaaaaaaaaggtggataaactgaatgcagcccactactctacaggaaaggtgtcggcaagctttacctccaccgccatggtaccagagaccacacacgaagcggcagccatcgatgaggacgtgctgcggtaccagttcgtaaagaaaaaaggctatgtacgccttcacaccaataaaggggatctcaacttggagctgcattgcgatctgacccctaagacctgtgaaaatttcatccgtctctgcaaaaaacattactatgacgggactatctttcacaggtctattagaaacttcgtaatccaggggggtgatccgaccggcactggtaccgggggtgaatcatactgggggaaaccatttaaggacgagtttagaccaaatctgtcccataccggcagggggatcttgtccatggccaattctggcccaaatagcaaccgatcgcaatttttcattacatttcggtcctgcgcctacctcgacaaaaaacataccatatttggacgcgtggttggaggattcgatgttttgacagcaatggaaaacgtcgaaagcgatccgaaaaccgatcggcctaaagaagaaatccgcattgacgctactactgtgttcgtggatccctacgaagaagcagacgctcaaatcgcgcaggaacgaaagacccagctgaaagtggccccagagacgaaagtgaaatcctctcagcctcaggctggctcccagggtcctcagaccttccggcagggtgtcggtaaatacattaacccagcagcaacggagcagcaaaggaagtcaccgcaacctgttccactctctccttgtccaagacggtcacccgtgggggttctcgggaccagcgcgccaggcagcagccgactccctgatgatcattag

SEQ ID NO: 242331 - DNA, 1584 bp, Artificial Sequence
  derived and/or modified sequence
atgggcaagagacagcaccagaaggacaagatgtacatcacctgcgccgagtacacccacttctacggcggcaagaagcccgacctgccccagaccaacttcagaagactgcccttcgaccactgcagcctgagcctgcagcccttcgtgtaccccgtgtgcacccccgacggcatcgtgttcgacctgctgaacatcgtgccctggctgaagaagtacggcaccaaccccagcaacggcgagaagctggacggcagaagcctgatcaagctgaacttcagcaagaacagcgagggcaagtaccactgccccgtgctgttcaccgtgttcaccaacaacacccacatcgtggccgtgagaaccaccggcaacgtgtacgcctacgaggccgtggagcagctgaacatcaaggccaagaacttcagagacctgctgaccgacgagcccttcagcagacaggacatcatcaccctgcaggaccccaccaacctggacaagttcaacgtgagcaacttctaccacgtgaagaacaacatgaagatcatcgaccccgacgaggagaaggccaagcaggaccccagctactacctgaagaacaccaacgccgagaccagagagaccctgcaggagctgtacaaggagttcaagggcgacgagatcctggccgccaccatgaaggcccccgagaagaagaaggtggacaagctgaacgccgcccactacagcaccggcaaggtgagcgccagcttcaccagcaccgccatggtgcccgagaccacccacgaggccgccgccatcgacgaggacgtgctgagataccagttcgtgaagaagaagggctacgtgagactgcacaccaacaagggcgacctgaacctggagctgcactgcgacctgacccccaagacctgcgagaacttcatcagactgtgcaagaagcactactacgacggcaccatcttccacagaagcatcagaaacttcgtgatccagggcggcgaccccaccggcaccggcaccggcggcgagagctactggggcaagcccttcaaggacgagttcagacccaacctgagccacaccggcagaggcatcctgagcatggccaacagcggccccaacagcaacagaagccagttcttcatcaccttcagaagctgcgcctacctggacaagaagcacaccatcttcggcagagtggtgggcggcttcgacgtgctgaccgccatggagaacgtggagagcgaccccaagaccgacagacccaaggaggagatcagaatcgacgccaccaccgtgttcgtggacccctacgaggaggccgacgcccagatcgcccaggagagaaagacccagctgaaggtggcccccgagaccaaggtgaagagcagccagccccaggccggcagccagggcccccagaccttcagacagggcgtgggcaagtacatcaaccccgccgccaccgagcagcagagaaagagcccccagcccgtgcccctgagcccctgccccagaagaagccccgtgggcgtgctgggcaccagcgcccccggcagcagcagactgcccgacgaccactag

SEQ ID NO: 242332 - protein, 1097 aa, Artificial Sequence
  derived and/or modified sequence
MLKPQPLQQPSQPQQPPPTQQAVARRPPGGTSPPNGGLPGPLATSAAPPGPPAAASPCLGPVAAAGSGLRRGAEGILAPQPPPPQQHQERPGAAAIGSARGQSTGKGPPQSPVFEGVYNNSRMLHFLTAVVGSTCDVKVKNGTTYEGIFKTLSSKFELAVDAVHRKASEPAGGPRREDIVDTMVFKPSDVMLVHFRNVDFNYATKDKFTDSAIAMNSKVNGEHKEKVLQRWEGGDSNSDDYDLESDMSNGWDPNEMFKFNEENYGVKTTYDSSLSSYTVPLEKDNSEEFRQRELRAAQLAREIESSPQYRLRIAMENDDGRTEEEKHSAVQRQGSGRESPSLASREGKYIPLPQRVREGPRGGVRCSSSRGGRPGLSSLPPRGPHHLDNSSPGPGSEARGINGGPSRMSPKAQRPLRGAKTLSSPSNRPSGETSVPPPPAVGRMYPPRSPKSAAPAPISASCPEPPIGSAVPTSSASIPVTSSVSDPGVGSISPASPKISLAPTDVKELSTKEPGRTLEPQELARIAGKVPGLQNEQKRFQLEELRKFGAQFKLQPSSSPENSLDPFPPRILKEEPKGKEKEVDGLLTSEPMGSPVSSKTESVSDKEDKPPLAPSGGTEGPEQPPPPCPSQTGSPPVGLIKGEDKDEGPVAEQVKKSTLNPNAKEFNPTKPLLSVNKSTSTPTSPGPRTHSTPSIPVLTAGQSGLYSPQYISYIPQIHMGPAVQAPQMYPYPVSNSVPGQQGKYRGAKGSLPPQRSDQHQPASAPPMMQAAAAAGPPLVAATPYSSYIPYNPQQFPGQPAMMQPMAHYPSQPVFAPMLQSNPRMLTSGSHPQAIVSSSTPQYPSAEQPTPQALYATVHQSYPHHATQLHAHQPQPATTPTGSQPQSQHAAPSPVQHQAGQAPHLGSGQPQQNLYHPGALTGTPPSLPPGPSAQSPQSSFPQPAAVYAIHHQQLPHGFTNMAHVTQAHVQTGITAAPPPHPGAPHPPQVMLLHPPQSHGGPPQGAVPQSGVPALSASTPSPYPYIGHPQGEQPGQAPGFPGGADDRILCRVGRSHSRRRQGLAPGSVLCFPPSSLSCDPAAPLPTASPALSDPDCLLT

SEQ ID NO: 242333 - DNA, 3294 bp, Artificial Sequence
  derived and/or modified sequence
atgctgaagcctcaacccctccagcagccatcgcaaccccaacagccccctcctacacagcaggccgtcgccaggaggccaccgggcggtacctctcctcccaacggcggactgcctggaccacttgcaaccagcgctgcccccccgggaccacctgcagctgcgtccccctgcctggggcctgtcgcagcggcagggagcggcttacggaggggcgcagaaggcattctagccccccaacctcctcctccccaacagcatcaggaaaggcctggagctgccgcaatcggcagcgctcgaggacagagcacgggaaaaggtcctcctcagagccctgtgtttgaaggggtgtataacaattcacggatgctccactttcttacagcggtggttggctcaacatgcgacgtgaaggtgaagaacggaaccacatatgagggaattttcaagacacttagcagtaagttcgaactggccgtcgacgccgtacatcggaaggcctctgaaccggccggggggccgagaagagaagatatcgtggatacaatggtgttcaaaccatccgacgtgatgctagtgcatttcagaaatgtcgatttcaattacgcgactaaggacaagttcactgattccgccatagcgatgaacagtaaggttaacggtgagcacaaagaaaaggtgcttcaaaggtgggagggaggcgattcaaacagcgacgactacgacctggaatcagacatgtccaacgggtgggaccctaatgagatgtttaagttcaatgaggaaaattatggcgtcaaaacgacctacgatagcagcctctcatcatacactgtccccctcgagaaagacaacagtgaggagtttcggcagcgggagctcagagccgcccagcttgctcgtgaaattgagtcatctccccagtatagactgcggattgcgatggaaaacgatgacgggcgaaccgaggaggagaagcattctgcagtccagcggcagggatctggccgggaatccccttctttggcatcacgggaaggtaagtatattcctctgccacagcgggttcgtgaaggccctcggggaggagtgagatgctcttcatctcgtggtggtcggcctggcttatcttctctgccaccaaggggtccccatcatttggacaacagctccccgggcccaggcagcgaagccagggggataaatgggggtcccagcaggatgagcccaaaggcccagcgtccgctgaggggtgctaaaacacttagcagtccaagtaatcgcccctccggggagacgtccgtccccccaccacctgcagtcggaagaatgtatcctcccagatcacctaaatccgcggcacccgcccccataagcgcctcatgccccgaaccacctattgggtccgcagtgcctacgagttccgccagcataccagtcaccagctctgttagtgatcctggtgtaggcagcatcagccccgcatcccccaagatctcgctggcacccactgacgtcaaagaattatctaccaaagagcctggcagaaccctggaaccccaggaactggctcgcatcgcagggaaagtgcctggcctgcagaatgagcaaaagcggttccaactagaggaactccggaagtttggtgctcagttcaagctgcaaccctctagcagtcctgagaatagcttagaccctttcccccctaggatccttaaggaagaaccaaaaggcaaagaaaaagaagttgacggattgttaacttctgagcctatgggaagtccagtgtcttctaaaactgaatctgtgtccgataaggaagacaagccgcctctggccccctcaggcgggacagagggcccagaacagccaccacctccatgcccctcccagacagggtcacctccagtcgggctcattaagggagaggataaggatgagggtcccgtggccgagcaagtgaaaaagtcgacactcaacccaaatgccaaagagttcaatcctaccaaacccttgctgtcagtgaataaatccacctctacgcccacttcccctgggccacgcacacactccactccatctatacctgttttgacagccggccagagcgggctttacagcccgcagtatatctcctatatcccccaaattcacatgggccctgctgtccaggcaccacaaatgtacccctatcccgtgtctaactccgtcccgggccaacagggaaagtacaggggggccaaggggtccctgcctccccagcggtctgatcaacaccagccggcctctgctccacccatgatgcaagccgcagccgccgcgggtcctccgctggttgccgcaacgccctattccagctatatcccatataatcctcaacagtttcccggacaaccagccatgatgcaaccaatggcccactacccttcacagcccgtctttgccccgatgttacagagtaacccccgtatgctcacctctggcagtcacccccaggcaattgtaagttcctccactcctcaatacccaagcgctgaacagccgactccgcaggctctgtacgccaccgtgcatcagagctacccgcaccatgccactcagctccacgcccatcagccacagcccgctacaactccaacagggagccagccgcagtcacagcacgctgctcctagccctgtgcagcaccaggccggtcaggccccacacctcggaagtgggcaaccccagcaaaacctttatcacccaggcgcattgactgggactccgccatcccttcccccaggccctagtgctcaaagcccacagtcttcattcccccagccggctgcggtctatgccatccaccatcaacagctgcctcacggcttcaccaacatggctcacgttactcaggcacacgtgcagacaggcatcaccgccgccccccccccccatcccggagccccacatcctccccaagttatgttgctgcatcctcctcagagccatggcggtccgccacaaggggcagtgcctcaatccggagtgcctgcactgagtgcatctacacctagcccttacccttatattgggcaccctcagggagagcagccgggccaggctcctgggttccccggaggggcggacgacaggatcctctgcagggtcggccgctcccattcgagacgccggcagggactagccccggggtccgtgctgtgttttccaccgtcttcccttagctgtgatcccgccgcccctctgcctaccgcatctccagccttatccgatcctgattgcctgttgacgtag

SEQ ID NO: 242334 - DNA, 3294 bp, Artificial Sequence
  derived and/or modified sequence
atgctgaagccccagcccctgcagcagcccagccagccccagcagcccccacccacccagcaggccgtggcccggcggcccccaggcggcaccagccccccaaatggaggcctgcccggccccctggccaccagcgctgcccctcctggccccccagctgctgccagcccctgcctgggccctgtggccgctgctggcagcggcctgcggagaggagctgagggcatcctggccccccagcccccaccaccccagcagcaccaggagaggcctggagctgctgccatcggcagcgcccggggccagagcacaggcaagggccccccccagagccctgtgtttgagggcgtgtacaacaacagcaggatgctgcacttcctgacagctgtggtgggcagcacctgtgatgtgaaggtgaagaatggcaccacctatgagggcatcttcaagaccctgagcagcaagtttgagctggccgtggatgctgtgcacaggaaggccagcgagcctgctgggggccccaggagagaagatattgtggacaccatggtgttcaagcccagtgatgtgatgctggtgcacttcagaaatgtggacttcaactatgccaccaaggacaagttcacagattctgccatcgccatgaacagcaaggtgaatggagagcacaaggagaaggtgctgcagcgctgggagggcggggacagcaacagtgatgattatgacctggagagtgacatgagcaatggctgggaccccaatgagatgttcaagttcaatgaggagaactacggcgtgaagaccacctatgacagcagcctgagcagctacacagtgcccctggagaaggacaacagcgaggagttccggcagcgggagctgcgggccgcccagctggcccgggagattgagagcagcccccagtaccgcctgagaattgccatggagaatgatgatggccgcacagaggaggagaagcacagcgctgtgcagaggcagggcagcggccgggagagccccagcctggccagccgggagggcaagtacatccccctgccccagagggtgcgggagggcccccggggcggcgtgcgctgcagcagcagcagaggaggccggcccggcctgagcagcctgcccccccggggcccccaccacctggacaacagcagccctggccctggcagcgaggcccggggcatcaatggaggccccagcaggatgagccccaaggcccagaggcccctgcggggggccaagaccctgagcagccccagcaaccggcccagcggggagacctctgtgcccccacctcctgctgtgggccgcatgtacccacccaggagccccaagtctgctgccccagcccccatcagcgccagctgcccagagccccccatcggcagcgctgtgcccaccagcagcgccagcatccctgtgaccagctctgtgtctgaccccggggtgggcagcatcagccctgccagccccaagatcagcctggcccccacagatgtgaaggagctgagcaccaaggagcccggccgcaccctggagccccaggagctggccagaattgctgggaaggtgcccggcctgcagaatgagcagaagcgcttccagctggaggagctgaggaagtttggagcccagttcaagctgcagcccagcagcagccctgagaacagcctggaccccttccccccacgcatcctgaaggaggagcccaagggcaaggagaaggaggtggatggcctgctgaccagcgagcccatgggcagccctgtgagcagcaagacagagagcgtgtctgacaaggaggacaagccacccctggcccccagcggcggcacagagggccctgagcagcccccaccaccctgccccagccagacaggcagcccccctgtgggcctcatcaagggggaggacaaggatgagggccctgtggccgagcaggtgaagaagagcaccctgaaccccaatgccaaggagttcaaccccaccaagcccctgctgtctgtgaacaagagcaccagcacccccaccagccctggccccaggacccacagcacccccagcatccctgtgctgacagctggccagagcggcctgtacagcccccagtacatctcctacatcccccagatccacatgggccctgctgtgcaggccccccagatgtacccctaccctgtgagcaacagcgtgcccggccagcagggcaagtacagaggagccaagggcagcctgcccccccagaggagtgaccagcaccagcctgccagcgccccacccatgatgcaggccgctgctgctgctggcccccccctggtggccgccaccccctacagcagctacatcccctacaacccccagcagtttcctggccagcctgccatgatgcagcccatggcccactaccccagccagcctgtgtttgcccccatgctgcagagcaaccccaggatgctgaccagcggcagccacccccaggccatcgtgagcagcagcaccccccagtaccccagcgctgagcagcccaccccccaggccctgtatgccaccgtgcaccagagctacccccaccacgccacccagctgcacgcccaccagccccagcctgccaccacccccaccggcagccagccccagagccagcacgccgcccccagccctgtgcagcaccaggccggccaggccccccacctgggcagcggccagccccagcagaacctgtaccaccctggggccctgaccggcaccccacccagcctgcccccaggccccagcgcccagagcccccagagcagcttcccccagcctgctgctgtgtatgccatccaccaccagcagctgccccacggcttcaccaacatggcccacgtgacccaggcccacgtgcagacaggcatcacagctgcccccccaccccaccctggggccccccaccccccccaggtgatgctgctgcaccccccccagagccatggaggccccccccagggcgctgtgccccagagcggcgtgcctgccctgagcgccagcacccccagcccctacccctacatcggccacccccagggcgagcagcccggccaggcccctggcttccctggaggagcagatgaccgcatcctgtgccgggtgggccgcagccacagcagaagacggcagggcctggcccctggctctgtgctgtgcttcccccccagcagcctgagctgtgaccctgctgcccccctgcccacagccagccctgccctgagtgaccctgactgcctgctgacctag

SEQ ID NO: 242335 - DNA, 3294 bp, Artificial Sequence
  derived and/or modified sequence
atgctgaagccccagcccctgcagcagcccagccagccccagcagcctccacctacccagcaagctgttgccaggaggccccctggcggaaccagcccacccaatggcggactcccagggccccttgctactagcgctgccccgcccggtccgcccgcagccgcctccccatgtctaggacctgttgccgccgcaggcagcgggctgcgcaggggagcggaggggatcctcgcaccccaacccccccctccacagcaacaccaggaaaggcctggagcagccgcgatcggcagcgcgcggggccaaagtacggggaagggcccgccccagtcccctgttttcgagggtgtctacaataatagccggatgcttcatttcctgaccgcagttgtgggctccacctgtgacgtcaaggtaaaaaacggaacgacatacgaaggcatcttcaagacgctgtcgtccaagtttgagcttgctgtagacgcagttcaccggaaggcctctgaacctgcagggggccctcggcgcgaagatatcgttgacactatggtgttcaaaccgtcggacgttatgctcgtccacttccggaacgtcgattttaactatgccaccaaggataagttcacagactctgccatcgcaatgaatagcaaggtgaatggtgaacacaaggagaaagtcctccagaggtgggagggaggcgattccaatagcgacgattacgacctggaatcagatatgtctaacggttgggatccaaacgagatgtttaagttcaacgaggaaaactacggagttaaaaccacttacgattcaagcctaagctcatatactgtgcctctggagaaggataatagcgaggaatttagacagagagaattacgagccgctcagctcgctagggagatagaaagcagccctcagtatagactgcgcatcgcaatggagaacgatgacggtcgcactgaagaagaaaagcatagcgccgtgcaaaggcagggcagcggcagagagtcaccctccctcgcctctagagaaggtaagtacatacccctacctcagagagtccgggaaggcccgcgcggaggcgttcgttgttctagttctcggggaggcaggcccgggctttcaagtttaccacccagaggcccgcatcacctcgacaactcttccccaggcccaggctccgaggcccgtgggatcaatggtggacctagcagaatgtctccaaaggcccagcgtcctttaaggggagccaaaactctcagctctcccagtaaccgcccaagcggagagaccagtgtgccaccacccccagctgttggcagaatgtacccgccacggtccccgaaatcggccgctcctgcacccattagcgcaagttgccctgagccgcctattggctccgcagttcctacgagctccgcctcgattcccgttacatccagcgtctctgaccctggagtaggctccatcagcccagcatctccaaagattagtctggccccaactgatgtcaaggaacttagcacaaaggagcctggccgcaccctggaacctcaagaactggcccgtatcgctggcaaggtccccgggctgcagaatgagcagaagcgctttcaactggaggagctccgaaagtttggggcccagttcaaactccagcctagcagctctcctgaaaatagtctcgacccatttcccccacggatactcaaggaagagccaaagggcaaggagaaggaggttgacggcctattaacatccgagcctatgggttctccggtcagctcaaagactgagtcagtgagtgataaggaagacaaacccccacttgcccctagtggaggcaccgagggccctgagcagcctcctcccccgtgtccgagccagaccgggtccccccccgtaggcttaataaagggagaggacaaggatgaaggccccgtagcagagcaggtcaagaaatccactctgaaccccaatgctaaggagttcaatccaactaagcctctcctgtctgtgaataagagtacatccacccctacatctccaggcccccgcacacattccacaccgtccatccctgtgcttaccgcaggacaatcaggcctgtactcgccacagtatatcagctacataccccagatccatatgggacccgctgtccaagctcctcagatgtacccttatcccgtcagtaactctgtgccgggccaacagggaaagtaccgtggtgcgaaaggatcattaccacctcaacgatcagaccagcaccagccagcgtctgcccccccgatgatgcaggccgctgcagctgcgggacctccattagtggcagcaacgccctactcatcgtatataccctataaccctcagcagtttccaggacaacctgccatgatgcagccaatggcacattatccctctcagcctgtttttgctcctatgctgcagagtaacccacgaatgttgacttccggttcacacccacaagccatagtttcgagtagcacccctcagtatccgtcagccgagcagcctacacctcaggctttgtacgccaccgtgcaccagtcttatccccaccatgcaacacagctgcacgcccatcagccccagcccgctacgacacccacgggctcgcagccccagtcacaacacgccgcaccctcccctgttcaacaccaagcaggccaagctccacacttaggcagtggccaaccacagcaaaatctgtatcatcccggcgctctcacgggcaccccaccgtcgttacctcccggccctagtgctcagtctccccagagttcttttccacagccagcagcagtctacgcgattcatcaccagcaactgccccatggatttactaatatggcacatgtgactcaggcacacgtgcagacaggaataaccgcggcccctcctcctcaccctggagctccgcacccgccccaggtgatgcttcttcaccccccccagtcccacggcgggcccccacagggggccgtgcctcagtccggcgttccagccctgtctgcgtctactccttccccctacccctatattggacacccccagggtgagcaacccggccaagcccccggattcccggggggggcagatgacagaatcctttgccgcgtgggaagaagtcattcaaggaggaggcagggcctggcgcccggaagtgttctgtgttttccccctagctccttgagctgtgaccccgcagcacctctcccaacagcaagccctgccctgtcagatcccgactgtctcctcacgtag

SEQ ID NO: 242336 - DNA, 3294 bp, Artificial Sequence
  derived and/or modified sequence
atgttgaagccgcagcctctgcaacagcctagccagccccaacagccgccaccgactcagcaagcggtggccagaaggccacccggaggaactagccctcccaacgggggtctccctggccctcttgctacgtccgctgcacctccaggtcctccagctgcggcatcgccgtgtctcggaccagttgcagccgctggatcaggtcttcgccgtggtgcagaggggatccttgccccacagcctccgccaccacagcaacaccaagagcgtccgggtgcagcagccatcggctctgctcgaggacagagcactggcaagggtccacctcagtcgcccgttttcgaaggcgtgtataacaacagcagaatgctccacttcttgactgctgtggttgggtcgacgtgcgatgttaaggtcaagaacggtaccacctatgaagggatcttcaagaccttgtcctcaaagtttgagctggccgtcgacgcagtgcacaggaaggccagtgagcctgcgggaggtccccgtcgagaggatatagttgataccatggtgttcaaaccttcagatgtgatgctggtacatttccgtaacgtggatttcaactacgctacaaaggacaaatttacagactccgccatcgcaatgaactcgaaggtgaacggagagcacaaagagaaggtcctgcagcgatgggaggggggtgattcaaacagcgatgactacgatcttgagtcggatatgtctaacgggtgggaccccaacgaaatgttcaagtttaacgaggagaattatggagtgaagacaacctacgattcttcactgagtagctacaccgttcccctggagaaggacaacagcgaggaatttcggcagcgggagttacgagcagcacagcttgctagggagatcgagtcctctccccagtacagactacgtattgcaatggagaatgacgatggtaggaccgaggaggagaaacactccgccgtgcaaagacaagggtcggggcgtgaaagcccgtctctcgccagcagggagggcaagtatattcccctgccgcaaagagtgcgggagggccctcgtggcggagtgcgatgtagctctagtcgcggaggaaggcctggattgtcaagcctcccccctcgtgggcctcaccacctggacaattccagtcccggaccagggtcggaagctagaggtatcaatggaggacccagtaggatgagcccaaaggcccagagacccttgaggggagcgaaaactctctccagcccaagcaaccgaccaagcggcgaaacttcagtgccgcctccccctgctgtgggcagaatgtaccccccacggagtccgaagtctgccgcacccgcacccataagcgcctcttgccccgagccgccaattgggtcagccgtgccaaccagcagcgcgtcaattcctgtgacgagtagcgtgagtgatcccggtgtggggagcatctctcctgcctccccaaagatctcgctcgcgccaacggatgtcaaggaactgtcaactaaagaaccgggacgcaccttggaaccccaagagcttgcgcgaatcgcgggaaaagtgccagggctgcagaatgagcaaaaaaggtttcagttagaggagctgagaaagtttggggcacagtttaaactccagccttcaagctcacctgaaaatagccttgacccctttcctccacgtatcctgaaggaggagccaaaaggaaaggaaaaggaagtggatgggttgctgacatcagaaccgatgggctcaccggttagcagtaagaccgaatctgtgtccgataaggaggacaagcctcccctggcacccagcggtgggaccgaagggcctgagcagccccctcctccctgcccctcccagaccgggagcccccctgttggcctcatcaagggtgaggataaagatgagggccctgtcgccgaacaggttaagaagagtacactgaatccaaacgccaaggaattcaaccccacgaagcccttgctcagtgtgaacaagagcacatcaacacccacgagccccggaccccgtacgcattcaactccttcaatccccgtcctgaccgcgggacaatcaggcttatacagtccacagtatattagctatatcccccagatacacatgggccctgctgtccaagcgcctcagatgtacccatatcctgtcagtaattccgtgcccggtcagcagggcaaatacaggggagctaaggggtcattgcctcctcaaagatctgatcaacatcagccagcgagtgcccctcctatgatgcaagcagccgctgccgctggtcccccacttgtggccgctacgccctacagctcgtacattccgtacaatcctcagcaattccccggacagccagcgatgatgcaacctatggcacattatcccagtcagccggtcttcgcccctatgctgcagagcaacccacgtatgctgacaagtggatcacatccacaggccatcgtctcttcctcaacccctcagtaccccagcgccgagcaacctacacctcaggccctgtacgcaactgtgcaccagtcctatccgcaccacgctactcagctgcacgcgcatcagccgcagcctgccacgacgcccaccggatcccaaccgcaatctcagcatgccgctccaagtcctgtgcagcaccaggccggtcaagcaccgcacttgggctccgggcaacctcagcagaatctgtatcaccctggcgcactcaccggaacgcctcccagtcttcctccaggcccatctgcgcaaagcccccaatccagctttccacagcccgcagctgtatacgctatacaccatcagcagttgcctcatgggttcaccaatatggcacacgtgactcaggctcacgttcaaactggcattaccgccgctccgccacctcaccctggcgctccgcacccccctcaggtcatgctgctacatcccccacagtcccacggcggacctcctcagggggctgtgccccaatcaggcgtgcctgctctgagcgccagcacaccttccccctacccctatattggacatccccaaggagagcagcccggacaggccccaggctttcccggaggggcagacgataggatcctgtgccgcgtcggcagaagccactcccgcaggcgacaaggactagcgccagggtccgtattatgctttcccccatcttcactctcctgcgacccagcagccccactgcctacagcctccccagccctgtcggacccggactgtctgctgacatag

SEQ ID NO: 242337 - DNA, 3981 bp, Artificial Sequence
  derived and/or modified sequence
ccgcggtcttctctctccacccccgacaccgcggggctccccccgcccgcccacggcgggccccggctgcccgatccccctcgcttcccgcgctctccagcggggccccagccccggccccctctctccctcccttctctctaattccccttccggacgctgccatcatgttgaagcctcagccgctacaacagccctcccagccccagcagccgccccccacgcaacaggccgtggcccgtcggccccccgggggcaccagccctcccaacggcggcctcccggggccgctggccacctctgcggctcctcccgggcctccagcggccgcctccccctgcctggggcctgtggccgctgccgggagcgggctccgccggggagccgaaggcatcttggcgccgcagccgccgccgccgcagcaacaccaggagaggccgggggcagccgccatcggcagcgccaggggacagagcacaggaaagggacccccacagtcacctgtgtttgaaggcgtctacaacaattccagaatgctgcatttccttacagctgttgtgggctccacttgtgatgtaaaggtgaaaaatggtaccacttatgagggtatcttcaagacgctaagctcaaagtttgaactagccgtggatgctgtgcaccggaaagcatctgagccagcaggtggccctcgtcgggaggacattgtggacaccatggtgtttaagccaagtgatgtcatgcttgttcacttccgaaatgttgacttcaactatgctactaaagacaagttcaccgattcagccattgccatgaactcgaaagtgaatggggaacacaaagagaaggtgcttcagcgctgggaggggggtgacagcaacagcgacgactatgacctcgagtctgacatgtccaatggatgggaccccaatgaaatgttcaagttcaatgaggagaactacggtgtgaagactacctatgatagcagtctttcttcttatacggtgcccttagaaaaggacaactcagaagagtttcgtcagcgagagctgcgtgcggcccagttggctcgagagattgaatcaagcccccagtaccgcctacggatcgccatggagaacgacgatgggcgcactgaagaggagaagcacagtgcagtccagcggcagggctcagggcgggagagccccagcttggcatccagggaggggaagtatatccctctgcctcaacgagtccgggaaggtccccggggaggagttcgatgcagcagctctcggggcggtcggcctggccttagctctttgccacctcgtggccctcaccatctggacaacagcagccctggcccaggttctgaggcccgtggtatcaatggaggcccttcccgcatgtccccaaaggcacaacggcctctgagaggtgccaagactctgtcttcgcccagtaataggccttctggagaaacttctgttccacctcctcctgcagtgggccggatgtatcccccgcgttctcccaagtctgctgcccctgccccaatctcagcttcctgtccagagcctcccatcggctcggcagtgccaacctcttcagcctccatccctgtgacctcatcagtctcagatcctggagtgggctccatttctccagcttctccaaagatctccctggcccccacagatgtaaaagaactctctaccaaggaacctgggagaactctggagccccaggagctggctcggatagctgggaaagtccctggtcttcagaatgaacagaaacgattccaactggaagaactgagaaagtttggggcccagtttaagcttcagcccagtagctcccctgagaacagcctggatccttttcctccccggatcttaaaggaggagcccaaaggaaaggagaaagaggttgatggtctgttgacttcagagcccatggggtctcccgtctcctccaagacagagtccgtatcggataaggaggacaaaccacccctggcaccatcaggaggcactgaggggccagagcagcccccaccaccttgtccaagccaaactggcagccccccggtgggcctcatcaagggagaagacaaagatgagggccctgttgctgaacaagtaaagaaatcaacgttgaaccctaatgctaaggagttcaatcctacaaagcctctgctgtctgtgaataaatccaccagtaccccaacttctccggggccccggactcattcaactccctccatcccggtgctgacagcaggccagagtgggctatacagcccccagtacatctcctacatacctcagatccacatgggaccagctgtgcaggcacctcagatgtatccatatcctgtatccaattcagtgcctgggcagcagggcaagtaccggggagcaaaaggctcccttcctccgcagcgctcggaccaacaccagccagcctcagccccgccgatgatgcaggccgccgcggctgctggcccgcctctggtggctgccacgccctattcttcctacatcccctacaaccctcagcagttcccaggccagccagccatgatgcagcccatggcccactacccctcacagccggtgtttgcccccatgcttcagagcaacccacgcatgctgacgtcgggcagccatccccaggccatcgtgtcatcctctacccctcagtacccttctgcagagcagcctaccccccaagccctttatgccactgttcaccagtcctacccacaccatgccacacagctccatgcccaccagccgcagccggctaccacgcctactggaagccagccgcagtcccagcatgcggcccccagtcctgtccagcatcaggcggggcaggccccacacttgggcagtggacagccacagcagaatctgtaccacccaggggccctgacaggcacgccgccctctctgccaccgggaccttctgcccagtcccctcagagcagcttcccccagccagccgctgtgtatgccatccaccaccagcagctgccccacggcttcaccaacatggcccatgttacccaggcccatgtccaaactggaatcacagcagccccgccccctcaccctggggctccccacccgccccaggtgatgctgctgcacccaccccagagtcatggggggcccccccaaggcgcggtgccccagagtggggtgcctgcactctcagcttccacaccctcaccctacccctacatcggacacccccaaggtgagcagcctggccaggcgcctggatttccaggaggagccgatgacaggattctatgtagggtgggcagaagccacagtcgccgccgccaggggcttgctcctggctctgtcctttgcttccctccgtcctcgctcagttgtgatccagcagcccccctccccactgcctccccagctctcagtgaccccgactgtctcctgacttagccgaggtaagttcaatctcatccctcccagcagctccccttccaccccccggggaactgaagattgtcctggccgcgacctgagacctccatgagtggagggaagagtgatctatgtctcttcccccagcagctcggaccactcccagccccccatccccccgttccccaggggagctggggaattcctgccaagcaccttgaatgggaggggcctcacagagggcagggccagggtccagcaggggtggggggttcctgctctgcccctgcccgtccccacccagtcttgccctcccatcctctcatctattcccccgctggagacggaagatcttttattttctattatttataacttcagacttgggccccctgttctttctttcccattaacttgagtgacctgtgtgagagacagacagatgccccacgaggatggctggacaaggacttttactttttattacataaaaatattaaaaaataaataaaaaaaataaaattttaaactaacttaa

SEQ ID NO: 242338 - DNA, 3294 bp, Artificial Sequence
  derived and/or modified sequence
atgctgaagccccagcccctgcagcagcccagccagccccagcagcccccccccacccagcaggccgtggccagaagaccccccggcggcaccagcccccccaacggcggcctgcccggccccctggccaccagcgccgccccccccggcccccccgccgccgccagcccctgcctgggccccgtggccgccgccggcagcggcctgagaagaggcgccgagggcatcctggccccccagcccccccccccccagcagcaccaggagagacccggcgccgccgccatcggcagcgccagaggccagagcaccggcaagggccccccccagagccccgtgttcgagggcgtgtacaacaacagcagaatgctgcacttcctgaccgccgtggtgggcagcacctgcgacgtgaaggtgaagaacggcaccacctacgagggcatcttcaagaccctgagcagcaagttcgagctggccgtggacgccgtgcacagaaaggccagcgagcccgccggcggccccagaagagaggacatcgtggacaccatggtgttcaagcccagcgacgtgatgctggtgcacttcagaaacgtggacttcaactacgccaccaaggacaagttcaccgacagcgccatcgccatgaacagcaaggtgaacggcgagcacaaggagaaggtgctgcagagatgggagggcggcgacagcaacagcgacgactacgacctggagagcgacatgagcaacggctgggaccccaacgagatgttcaagttcaacgaggagaactacggcgtgaagaccacctacgacagcagcctgagcagctacaccgtgcccctggagaaggacaacagcgaggagttcagacagagagagctgagagccgcccagctggccagagagatcgagagcagcccccagtacagactgagaatcgccatggagaacgacgacggcagaaccgaggaggagaagcacagcgccgtgcagagacagggcagcggcagagagagccccagcctggccagcagagagggcaagtacatccccctgccccagagagtgagagagggccccagaggcggcgtgagatgcagcagcagcagaggcggcagacccggcctgagcagcctgccccccagaggcccccaccacctggacaacagcagccccggccccggcagcgaggccagaggcatcaacggcggccccagcagaatgagccccaaggcccagagacccctgagaggcgccaagaccctgagcagccccagcaacagacccagcggcgagaccagcgtgccccccccccccgccgtgggcagaatgtacccccccagaagccccaagagcgccgcccccgcccccatcagcgccagctgccccgagccccccatcggcagcgccgtgcccaccagcagcgccagcatccccgtgaccagcagcgtgagcgaccccggcgtgggcagcatcagccccgccagccccaagatcagcctggcccccaccgacgtgaaggagctgagcaccaaggagcccggcagaaccctggagccccaggagctggccagaatcgccggcaaggtgcccggcctgcagaacgagcagaagagattccagctggaggagctgagaaagttcggcgcccagttcaagctgcagcccagcagcagccccgagaacagcctggaccccttcccccccagaatcctgaaggaggagcccaagggcaaggagaaggaggtggacggcctgctgaccagcgagcccatgggcagccccgtgagcagcaagaccgagagcgtgagcgacaaggaggacaagccccccctggcccccagcggcggcaccgagggccccgagcagcccccccccccctgccccagccagaccggcagcccccccgtgggcctgatcaagggcgaggacaaggacgagggccccgtggccgagcaggtgaagaagagcaccctgaaccccaacgccaaggagttcaaccccaccaagcccctgctgagcgtgaacaagagcaccagcacccccaccagccccggccccagaacccacagcacccccagcatccccgtgctgaccgccggccagagcggcctgtacagcccccagtacatcagctacatcccccagatccacatgggccccgccgtgcaggccccccagatgtacccctaccccgtgagcaacagcgtgcccggccagcagggcaagtacagaggcgccaagggcagcctgcccccccagagaagcgaccagcaccagcccgccagcgccccccccatgatgcaggccgccgccgccgccggcccccccctggtggccgccaccccctacagcagctacatcccctacaacccccagcagttccccggccagcccgccatgatgcagcccatggcccactaccccagccagcccgtgttcgcccccatgctgcagagcaaccccagaatgctgaccagcggcagccacccccaggccatcgtgagcagcagcaccccccagtaccccagcgccgagcagcccaccccccaggccctgtacgccaccgtgcaccagagctacccccaccacgccacccagctgcacgcccaccagccccagcccgccaccacccccaccggcagccagccccagagccagcacgccgcccccagccccgtgcagcaccaggccggccaggccccccacctgggcagcggccagccccagcagaacctgtaccaccccggcgccctgaccggcaccccccccagcctgccccccggccccagcgcccagagcccccagagcagcttcccccagcccgccgccgtgtacgccatccaccaccagcagctgccccacggcttcaccaacatggcccacgtgacccaggcccacgtgcagaccggcatcaccgccgccccccccccccaccccggcgccccccaccccccccaggtgatgctgctgcaccccccccagagccacggcggccccccccagggcgccgtgccccagagcggcgtgcccgccctgagcgccagcacccccagcccctacccctacatcggccacccccagggcgagcagcccggccaggcccccggcttccccggcggcgccgacgacagaatcctgtgcagagtgggcagaagccacagcagaagaagacagggcctggcccccggcagcgtgctgtgcttcccccccagcagcctgagctgcgaccccgccgcccccctgcccaccgccagccccgccctgagcgaccccgactgcctgctgacctag

SEQ ID NO: 242339 - protein, 1044 aa, Artificial Sequence
  derived and/or modified sequence
MLKPQPLQQPSQPQQPPPTQQAVARRPPGGTSPPNGGLPGPLATSAAPPGPPAAASPCLGPVAAAGSGLRRGAEGILAPQPPPPQQHQERPGAAAIGSARGQSTGKGPPQSPVFEGVYNNSRMLHFLTAVVGSTCDVKVKNGTTYEGIFKTLSSKFELAVDAVHRKASEPAGGPRREDIVDTMVFKPSDVMLVHFRNVDFNYATKDKFTDSAIAMNSKVNGEHKEKVLQRWEGGDSNSDDYDLESDMSNGWDPNEMFKFNEENYGVKTTYDSSLSSYTVPLEKDNSEEFRQRELRAAQLAREIESSPQYRLRIAMENDDGRTEEEKHSAVQRQGSGRESPSLASREGKYIPLPQRVREGPRGGVRCSSSRGGRPGLSSLPPRGPHHLDNSSPGPGSEARGINGGPSRMSPKAQRPLRGAKTLSSPSNRPSGETSVPPPPAVGRMYPPRSPKSAAPAPISASCPEPPIGSAVPTSSASIPVTSSVSDPGVGSISPASPKISLAPTDVKELSTKEPGRTLEPQELARIAGKVPGLQNEQKRFQLEELRKFGAQFKLQPSSSPENSLDPFPPRILKEEPKGKEKEVDGLLTSEPMGSPVSSKTESVSDKEDKPPLAPSGGTEGPEQPPPPCPSQTGSPPVGLIKGEDKDEGPVAEQVKKSTLNPNAKEFNPTKPLLSVNKSTSTPTSPGPRTHSTPSIPVLTAGQSGLYSPQYISYIPQIHMGPAVQAPQMYPYPVSNSVPGQQGKYRGAKGSLPPQRSDQHQPASAPPMMQAAAAAGPPLVAATPYSSYIPYNPQQFPGQPAMMQPMAHYPSQPVFAPMLQSNPRMLTSGSHPQAIVSSSTPQYPSAEQPTPQALYATVHQSYPHHATQLHAHQPQPATTPTGSQPQSQHAAPSPVQHQAGQAPHLGSGQPQQNLYHPGALTGTPPSLPPGPSAQSPQSSFPQPAAVYAIHHQQLPHGFTNMAHVTQAHVQTGITAAPPPHPGAPHPPQVMLLHPPQSHGGPPQGAVPQSGVPALSASTPSPYPYIGHPQVQSHPSQQLPFHPPGN

SEQ ID NO: 242340 - DNA, 3135 bp, Artificial Sequence
  derived and/or modified sequence
atgttaaagcctcagccacttcaacagccctcccaaccgcagcagcctccccctacccaacaggcggtagcgcggcggcctcctggaggcacctcccctcccaacggaggcctacctggcccgctggccacctcggcagctcctcccggccctccagctgcagccagtccttgcctgggaccggtcgctgccgcaggttcgggcctgcgccggggtgcagagggcatcctggctccccagcctccacctccccaacagcaccaggagcgccccggggccgcagcgatcggctcggcgcgagggcagtccacaggtaaagggccaccccagagccctgtgttcgagggcgtttataacaactctagaatgctccattttctgaccgctgtggtgggatctacctgcgacgtaaaggtgaaaaacggtactacatatgagggcatcttcaaaactctgagctcgaagtttgaacttgccgtcgatgcagtgcatcgtaaagcaagcgaaccagcaggcggcccgaggagggaggatatcgttgacaccatggtgtttaaaccgtccgatgtgatgttggttcatttccggaatgtggactttaattatgcaaccaaggataagttcaccgacagtgcaattgccatgaatagcaaggtgaatggagagcacaaggagaaagtgctgcaacggtgggaaggcggtgactccaacagcgatgattacgacctggagagtgacatgtccaatggttgggatcctaacgagatgttcaagtttaatgaggagaactatggtgtgaagactacttacgactcaagtctctcatcttataccgtccccctggagaaggacaacagtgaagaatttcgtcaacgggagctgagagctgcacagctggcacgcgagatcgagagctctcctcagtatcgccttcgaatcgccatggagaacgatgacggacgcaccgaggaagaaaagcattctgccgtgcaacgtcagggttctggaagagagagcccctcactcgcctcaagagaagggaagtatattcccctgcctcagagagttcgggagggtccccggggaggggtgcgctgtagcagttcaagaggaggccgccccgggctcagctctcttccccccagggggcctcaccatttggataatagcagtcccggcccaggctccgaggcgcgcggcattaatggcgggccatccagaatgagtcctaaagcccaaaggccccttagaggggccaagacgctgagctcaccatcaaaccggccatccggggagacaagcgtccccccccccccagctgtgggtaggatgtatccaccccgcagccccaagagcgcagccccggctccaatcagcgcgtcctgcccagagcccccaattggcagcgcagtcccaacatcttcagccagcattcctgtgacttcttctgttagtgatccaggagttggaagcatttctccggcaagtcctaagataagcctggcaccaacagacgtcaaagagctctcgaccaaggagccaggacgaacacttgaacctcaggagctcgcaagaattgccggtaaggtgcccggccttcagaacgaacagaaaagattccagcttgaggaactgagaaagttcggtgcccaattcaaactccaacctagtagcagccctgagaactctcttgatccattcccaccacgtattctgaaggaagagcctaaaggcaaggaaaaagaggtagatggccttctaacatccgagccaatgggttcacccgtcagcagcaagaccgaatcagtctctgacaaggaggacaagccaccactagctccgagtgggggcaccgaggggccagagcagccaccacctccctgcccttcccagactggtagtcctcccgtgggtctgattaaaggtgaagataaagacgaaggcccagtcgcagagcaagtgaagaagtccacccttaacccgaatgccaaagaatttaatcccactaaaccactactgtcggtcaacaagtccaccagcacaccaacatctcccggacccaggacgcattccactccctctatccctgttctcaccgccggccagagcggactgtatagcccacaatacatttcatatatcccacaaatccacatgggtcccgccgtccaggcacctcagatgtatccttaccctgtctcaaacagcgtccctggacagcagggcaaataccgtggcgccaaaggcagtctgcctccacaacgtagtgatcagcatcagcccgccagcgctccgccaatgatgcaagcagcggcagccgccggccctcctcttgtcgccgccacaccttactctagctacatcccatacaaccctcaacaatttcctggccagcctgctatgatgcagcccatggcccattacccctcccagccagtgtttgcgcccatgttacagagcaatccaagaatgctcacatcaggtagccacccccaggccattgtcagttcatcaactccacagtaccctagcgctgagcagccgaccccacaggcattgtatgctacagtgcaccaatcgtacccacatcatgctactcagctgcacgcacatcagcctcagccagcaacaacaccaactggcagtcaaccacagagtcaacacgcagccccaagtcctgtgcagcaccaggcaggccaggctccccacctgggctccggccagccccaacagaatctgtaccaccccggtgcactgaccggcacacctccttccctgcctccgggcccatcggcccagtctccccagtcaagttttcctcagccagccgcagtgtatgctatccaccatcagcaactacctcatggttttaccaatatggcccacgtgacacaggctcatgtgcaaactgggatcacagccgcgccacccccccaccctggagctccccaccctccgcaagtgatgctgctgcaccctcctcagagccacggcggcccaccccagggagcagtgccacagtctggcgttcccgccctttcagcctcaactccctctccttacccctatattggccatccccaggtgcagtcccacccaagccagcagttaccattccacccgccaggtaactag

SEQ ID NO: 242341 - DNA, 3135 bp, Artificial Sequence
  derived and/or modified sequence
atgctgaagccccagcccctgcagcagcccagccagccccagcagcccccacccacccagcaggccgtggcccggcggcccccaggcggcaccagccccccaaatggaggcctgcccggccccctggccaccagcgctgcccctcctggccccccagctgctgccagcccctgcctgggccctgtggccgctgctggcagcggcctgcggagaggagctgagggcatcctggccccccagcccccaccaccccagcagcaccaggagaggcctggagctgctgccatcggcagcgcccggggccagagcacaggcaagggccccccccagagccctgtgtttgagggcgtgtacaacaacagcaggatgctgcacttcctgacagctgtggtgggcagcacctgtgatgtgaaggtgaagaatggcaccacctatgagggcatcttcaagaccctgagcagcaagtttgagctggccgtggatgctgtgcacaggaaggccagcgagcctgctgggggccccaggagagaagatattgtggacaccatggtgttcaagcccagtgatgtgatgctggtgcacttcagaaatgtggacttcaactatgccaccaaggacaagttcacagattctgccatcgccatgaacagcaaggtgaatggagagcacaaggagaaggtgctgcagcgctgggagggcggggacagcaacagtgatgattatgacctggagagtgacatgagcaatggctgggaccccaatgagatgttcaagttcaatgaggagaactacggcgtgaagaccacctatgacagcagcctgagcagctacacagtgcccctggagaaggacaacagcgaggagttccggcagcgggagctgcgggccgcccagctggcccgggagattgagagcagcccccagtaccgcctgagaattgccatggagaatgatgatggccgcacagaggaggagaagcacagcgctgtgcagaggcagggcagcggccgggagagccccagcctggccagccgggagggcaagtacatccccctgccccagagggtgcgggagggcccccggggcggcgtgcgctgcagcagcagcagaggaggccggcccggcctgagcagcctgcccccccggggcccccaccacctggacaacagcagccctggccctggcagcgaggcccggggcatcaatggaggccccagcaggatgagccccaaggcccagaggcccctgcggggggccaagaccctgagcagccccagcaaccggcccagcggggagacctctgtgcccccacctcctgctgtgggccgcatgtacccacccaggagccccaagtctgctgccccagcccccatcagcgccagctgcccagagccccccatcggcagcgctgtgcccaccagcagcgccagcatccctgtgaccagctctgtgtctgaccccggggtgggcagcatcagccctgccagccccaagatcagcctggcccccacagatgtgaaggagctgagcaccaaggagcccggccgcaccctggagccccaggagctggccagaattgctgggaaggtgcccggcctgcagaatgagcagaagcgcttccagctggaggagctgaggaagtttggagcccagttcaagctgcagcccagcagcagccctgagaacagcctggaccccttccccccacgcatcctgaaggaggagcccaagggcaaggagaaggaggtggatggcctgctgaccagcgagcccatgggcagccctgtgagcagcaagacagagagcgtgtctgacaaggaggacaagccacccctggcccccagcggcggcacagagggccctgagcagcccccaccaccctgccccagccagacaggcagcccccctgtgggcctcatcaagggggaggacaaggatgagggccctgtggccgagcaggtgaagaagagcaccctgaaccccaatgccaaggagttcaaccccaccaagcccctgctgtctgtgaacaagagcaccagcacccccaccagccctggccccaggacccacagcacccccagcatccctgtgctgacagctggccagagcggcctgtacagcccccagtacatctcctacatcccccagatccacatgggccctgctgtgcaggccccccagatgtacccctaccctgtgagcaacagcgtgcccggccagcagggcaagtacagaggagccaagggcagcctgcccccccagaggagtgaccagcaccagcctgccagcgccccacccatgatgcaggccgctgctgctgctggcccccccctggtggccgccaccccctacagcagctacatcccctacaacccccagcagtttcctggccagcctgccatgatgcagcccatggcccactaccccagccagcctgtgtttgcccccatgctgcagagcaaccccaggatgctgaccagcggcagccacccccaggccatcgtgagcagcagcaccccccagtaccccagcgctgagcagcccaccccccaggccctgtatgccaccgtgcaccagagctacccccaccacgccacccagctgcacgcccaccagccccagcctgccaccacccccaccggcagccagccccagagccagcacgccgcccccagccctgtgcagcaccaggccggccaggccccccacctgggcagcggccagccccagcagaacctgtaccaccctggggccctgaccggcaccccacccagcctgcccccaggccccagcgcccagagcccccagagcagcttcccccagcctgctgctgtgtatgccatccaccaccagcagctgccccacggcttcaccaacatggcccacgtgacccaggcccacgtgcagacaggcatcacagctgcccccccaccccaccctggggccccccaccccccccaggtgatgctgctgcaccccccccagagccatggaggccccccccagggcgctgtgccccagagcggcgtgcctgccctgagcgccagcacccccagcccctacccctacatcggccacccccaggtgcagagccaccccagccagcagctgcccttccaccccccaggcaactag

SEQ ID NO: 242342 - DNA, 3135 bp, Artificial Sequence
  derived and/or modified sequence
atgctgaagccccagcccctgcagcagcccagccagccccagcagccgcctcccacccaacaggcagttgcccgaagaccacctggggggacttcaccgcctaacggtggtctccctggacctctggccacgtcagccgctcctcccgggccccctgccgccgcctcaccctgccttggtccggtggctgccgctggcagtggtctccggagaggagctgaaggaatactagcaccacagcctccccctccccaacagcaccaagaacgccccggagcagcggcaatcggctctgcgcgagggcaatctacaggcaaaggtcctccccagagtcctgtgtttgaaggagtgtacaataacagtcgcatgctgcatttcctgacggcagtcgtgggctcaacttgtgatgtgaaagtgaaaaatggtacaacctacgagggtattttcaagaccctcagctccaagtttgagctcgctgtggatgctgtccacagaaaagctagtgagccagcaggcggaccgcggcgtgaagacatcgtggatacaatggttttcaagccctcagatgttatgcttgttcatttccgcaacgtagacttcaactacgccacaaaagacaagttcacagactctgccatcgcaatgaattccaaggttaacggggaacataaggaaaaagttctgcaaagatgggaaggcggagattctaactcggacgactacgatctggagtccgacatgagcaatggctgggatccgaatgagatgttcaagttcaacgaggaaaattacggcgtcaaaaccacgtatgattcgtcactgtcaagctacaccgttccccttgagaaggataattcggaagagttcagacagcgcgagcttagagccgcacaattggcgcgtgagatcgaaagctcccctcagtatagactgagaatagccatggagaacgatgacggccgaaccgaggaggagaaacactccgctgttcaacgccaggggtccgggcgggagagccctagcctggcctctcgggagggtaaatatattccactgcctcagcgcgtccgggaaggccctagaggcggcgtacgatgttctagttccaggggaggcaggcccggcctcagttctcttcccccccggggtccccatcacctagataatagctcccccggtccaggatccgaggcaagaggcatcaacggtggcccaagccggatgagcccaaaagcacagcggccgcttcggggcgcgaagaccctgtcaagtccctctaataggcctagcggcgagactagcgtaccaccgccacccgctgttggtagaatgtacccccctcggagtcctaaatcagcagccccagctccaatttcagctagctgccctgagcctccaatcggcagcgctgttccaaccagttccgcctctattcctgtgacctctagcgtttctgaccccggtgtcggtagcatttcacctgcctccccaaagatcagcttggctcccactgatgtgaaggagctttctactaaggagccaggcaggactctcgagccacaggaactagcacgaatcgccggcaaggtccccggactgcaaaacgagcagaagagatttcaactggaagaactccgcaagtttggagctcagttcaagttacagccctctagctcgcctgagaatagcctggatcccttccctccccgaatcttaaaggaagaaccaaaggggaaggagaaggaagtcgatggcttactgacaagtgagcccatgggaagcccggtgtcatccaagaccgaatctgtgtccgataaggaagacaaacctccccttgcaccctccggcggaaccgaaggccccgagcaaccaccacccccttgcccatcccagacaggctcaccgccagtcggcctgattaagggggaggataaagatgaaggccctgtcgccgagcaggtcaagaaaagtacccttaatccaaatgctaaggaatttaacccaacaaaaccactgctgtcagttaataaaagcacctcaacgcccacgagccctggccctagaactcacagcacccccagtattcccgtgctgactgcaggacagtccggcttatatagcccacagtacataagctatatcccacagattcatatgggacctgcagtgcaggcccctcagatgtatccttatccggtgagtaatagcgtgcccgggcagcaaggaaagtataggggtgcgaaaggcagtctgccacctcaaaggtcagatcagcatcagcctgcatctgccccgcccatgatgcaggcagccgctgctgcaggaccaccattagttgccgctacgccctactcctcctatattccctataatcctcagcagtttcccgggcaaccagccatgatgcagcccatggctcattatccttctcagcccgtctttgccccgatgttacagagtaacccacgaatgctgacatccggatctcatccccaagctatcgtgagcagcagtacacctcaataccctagcgccgaacagccaactccacaagctctttacgcgaccgtgcaccagagctacccccatcacgcaacacaactgcacgcacaccagcctcagcccgctacgactccaactggtagtcagccccagtctcagcacgcagcgcccagcccggtgcagcatcaggccggccaagctccccatctaggaagtggacaaccgcagcaaaacctctatcaccctggagccctcacgggaacacccccaagtcttccaccaggcccctcagcccagtctcctcaatccagtttcccccaacccgccgccgtctacgctatccatcatcagcaactgcctcatgggtttaccaacatggcacatgtcacccaggcccacgtgcagactggcataacagcagcccctcccccccacccgggcgccccacatccgccgcaggtcatgctactccatcctcctcagagtcatggaggtcctcctcaaggcgcagtcccccagtcaggggtgcctgcactttccgcatctactccctccccctatccttacattggccaccctcaggtccagtctcatccttcccagcagctgccctttcacccacccggtaactag

SEQ ID NO: 242343 - DNA, 3135 bp, Artificial Sequence
  derived and/or modified sequence
atgttgaaaccccagccgctgcagcagccatcccaaccgcagcagccccctcccacacagcaggcagttgctcgcaggcctcctggaggcacatccccgcctaacgggggtcttccagggcctctggctacatctgccgcacctcccggtccccctgctgcagcctcaccgtgtctgggcccagtggccgctgccggaagcgggttgcggcgtggtgcagagggcatcctggcaccccaacctcccccaccacaacagcatcaggaacggcctggggcagcagccataggatcggcgaggggccagagcaccggaaagggtccgcctcagtcgccggtcttcgaaggcgtgtacaataattcccgcatgttacactttctgacggcggtggtgggcagcacatgtgatgtgaaagttaagaatggcaccacttatgaaggaattttcaaaaccctgtctagcaagtttgaacttgcagttgacgctgtccatcggaaggcaagtgagcccgcaggcggtcccagaagagaggacattgtcgacactatggttttcaaacctagtgatgtgatgctcgtacactttcggaacgtcgacttcaactatgctactaaagataagttcacagatagcgcaattgccatgaattcgaaagttaatggagagcataaggagaaggtgcttcagcggtgggaaggcggtgactcgaactctgacgactacgatctggaatccgatatgagcaacggatgggaccccaatgagatgttcaaatttaacgaagagaactacggggtgaaaactacatacgatagtagtctgtcgagttacactgtgccactcgaaaaagataacagcgaagaatttcgtcagagggagttgcgggctgcccagctggcgcgagaaatcgaatccagccctcaatatcgactgcgcattgctatggagaatgacgacggacgtacggaagaggagaagcatagcgcagtacagcgccaggggagcggtcgcgaatccccttcgttggcttcaagggaggggaagtacatacccttgccccaacgcgtcagagaaggaccccgtgggggagtgaggtgtagtagctccagaggtggccgtccagggctctcttcactcccacctcgcggtcctcatcatctcgacaactcgtctcctggcccaggaagtgaagcacggggtatcaacggaggtccttcacgaatgtctcccaaagcccaaaggccactgcggggtgccaagacccttagcagtccgagcaatcggccaagtggtgaaaccagtgtgccgccacctccagccgtggggagaatgtacccacccagatccccaaaatcagccgcacccgcacccatatccgccagctgtcccgagccaccaatcgggagcgcggtgccgacttcaagcgcctcaattcctgtgaccagttcagtatctgacccaggcgtggggtccattagtcccgcttccccgaagatcagtctggccccaacagacgtgaaggagttaagcaccaaggaacctggaaggacgctcgagccacaggaactcgctaggatagcaggcaaggtgcccggacttcaaaatgaacagaagagatttcagctggaagaacttagaaaattcggtgctcaatttaaattgcaaccctcctcaagtccagaaaattcccttgatccatttcctccacgaattctgaaagaagagccaaaaggcaaggaaaaagaggtggatggcctccttacctctgagcctatgggcagtcccgtctctagcaaaacagaatctgtgagtgacaaggaagataagccgccattagctccgtctggagggaccgagggaccagagcagccacctcctccctgtcctagtcagacaggatctccacctgttggactaattaagggggaagacaaagacgaaggtcctgtggccgaacaggtcaagaagtccacacttaacccaaacgcaaaagaattcaacccaaccaaaccgttgctttcggtcaacaagtcaacctcaacaccaaccagccctggacctcgtacccactccactcccagcatcccagttctcacagccggtcaatctggcctatactcaccacaatacatcagctatatcccacagatccacatgggcccagcagtgcaggcccctcaaatgtacccgtacccagtctccaattccgtaccagggcagcagggcaaataccggggtgcaaagggaagcctgccgccacagcgatctgaccagcatcagcccgctagtgcccctccaatgatgcaggccgctgcagccgctggtcctcccctggtggccgctaccccatattccagctacattccctacaacccacagcaatttccaggccagccagctatgatgcagccaatggcccactaccccagtcagccagtgttcgcgcctatgctgcagtcaaaccccaggatgctcacatccggctcccacccccaggccattgtctcctcttcaacaccccaatacccgtctgcggagcagcccaccccccaggccctgtatgccaccgtacatcagtcttacccccatcatgctacacagctacatgcgcaccagccacagcccgctacaactcccaccggtagccaaccccagagtcagcatgccgcaccctcccctgtccagcaccaagccggacaagccccacatttgggaagcggccagccccaacagaatctttaccatcctggggctcttacgggtactcctccttcactcccaccagggccttctgcccagtcacctcaaagttccttcccgcaacccgctgctgtctacgccatccatcaccagcagcttccccacggtttcaccaacatggcccacgtgactcaggcccatgtccagacaggcatcactgccgcaccccctccacaccccggagcccctcatcctccacaagttatgttgctccaccccccacaaagccacggcggacctccccaaggagccgtgccacagtcaggcgtacccgctttgtcagcctcaactcctagtccatacccatacatcgggcaccctcaggtgcagagccatccttctcagcagctccctttccacccaccaggaaattag

SEQ ID NO: 242344 - DNA, 3856 bp, Artificial Sequence
  derived and/or modified sequence
ggcgacgcgcacgcgcgccagcccggctcgcgccctctcgctttcctccagccgcgagaccccctccccttccgcctcgcggcgcttcctcgcgccgcggtcttctctctccacccccgacaccgcggggctccccccgcccgcccacggcgggccccggctgcccgatccccctcgcttcccgcgctctccagcggggccccagccccggccccctctctccctcccttctctctaattccccttccggacgctgccatcatgttgaagcctcagccgctacaacagccctcccagccccagcagccgccccccacgcaacaggccgtggcccgtcggccccccgggggcaccagccctcccaacggcggcctcccggggccgctggccacctctgcggctcctcccgggcctccagcggccgcctccccctgcctggggcctgtggccgctgccgggagcgggctccgccggggagccgaaggcatcttggcgccgcagccgccgccgccgcagcaacaccaggagaggccgggggcagccgccatcggcagcgccaggggacagagcacaggaaagggacccccacagtcacctgtgtttgaaggcgtctacaacaattccagaatgctgcatttccttacagctgttgtgggctccacttgtgatgtaaaggtgaaaaatggtaccacttatgagggtatcttcaagacgctaagctcaaagtttgaactagccgtggatgctgtgcaccggaaagcatctgagccagcaggtggccctcgtcgggaggacattgtggacaccatggtgtttaagccaagtgatgtcatgcttgttcacttccgaaatgttgacttcaactatgctactaaagacaagttcaccgattcagccattgccatgaactcgaaagtgaatggggaacacaaagagaaggtgcttcagcgctgggaggggggtgacagcaacagcgacgactatgacctcgagtctgacatgtccaatggatgggaccccaatgaaatgttcaagttcaatgaggagaactacggtgtgaagactacctatgatagcagtctttcttcttatacggtgcccttagaaaaggacaactcagaagagtttcgtcagcgagagctgcgtgcggcccagttggctcgagagattgaatcaagcccccagtaccgcctacggatcgccatggagaacgacgatgggcgcactgaagaggagaagcacagtgcagtccagcggcagggctcagggcgggagagccccagcttggcatccagggaggggaagtatatccctctgcctcaacgagtccgggaaggtccccggggaggagttcgatgcagcagctctcggggcggtcggcctggccttagctctttgccacctcgtggccctcaccatctggacaacagcagccctggcccaggttctgaggcccgtggtatcaatggaggcccttcccgcatgtccccaaaggcacaacggcctctgagaggtgccaagactctgtcttcgcccagtaataggccttctggagaaacttctgttccacctcctcctgcagtgggccggatgtatcccccgcgttctcccaagtctgctgcccctgccccaatctcagcttcctgtccagagcctcccatcggctcggcagtgccaacctcttcagcctccatccctgtgacctcatcagtctcagatcctggagtgggctccatttctccagcttctccaaagatctccctggcccccacagatgtaaaagaactctctaccaaggaacctgggagaactctggagccccaggagctggctcggatagctgggaaagtccctggtcttcagaatgaacagaaacgattccaactggaagaactgagaaagtttggggcccagtttaagcttcagcccagtagctcccctgagaacagcctggatccttttcctccccggatcttaaaggaggagcccaaaggaaaggagaaagaggttgatggtctgttgacttcagagcccatggggtctcccgtctcctccaagacagagtccgtatcggataaggaggacaaaccacccctggcaccatcaggaggcactgaggggccagagcagcccccaccaccttgtccaagccaaactggcagccccccggtgggcctcatcaagggagaagacaaagatgagggccctgttgctgaacaagtaaagaaatcaacgttgaaccctaatgctaaggagttcaatcctacaaagcctctgctgtctgtgaataaatccaccagtaccccaacttctccggggccccggactcattcaactccctccatcccggtgctgacagcaggccagagtgggctatacagcccccagtacatctcctacatacctcagatccacatgggaccagctgtgcaggcacctcagatgtatccatatcctgtatccaattcagtgcctgggcagcagggcaagtaccggggagcaaaaggctcccttcctccgcagcgctcggaccaacaccagccagcctcagccccgccgatgatgcaggccgccgcggctgctggcccgcctctggtggctgccacgccctattcttcctacatcccctacaaccctcagcagttcccaggccagccagccatgatgcagcccatggcccactacccctcacagccggtgtttgcccccatgcttcagagcaacccacgcatgctgacgtcgggcagccatccccaggccatcgtgtcatcctctacccctcagtacccttctgcagagcagcctaccccccaagccctttatgccactgttcaccagtcctacccacaccatgccacacagctccatgcccaccagccgcagccggctaccacgcctactggaagccagccgcagtcccagcatgcggcccccagtcctgtccagcatcaggcggggcaggccccacacttgggcagtggacagccacagcagaatctgtaccacccaggggccctgacaggcacgccgccctctctgccaccgggaccttctgcccagtcccctcagagcagcttcccccagccagccgctgtgtatgccatccaccaccagcagctgccccacggcttcaccaacatggcccatgttacccaggcccatgtccaaactggaatcacagcagccccgccccctcaccctggggctccccacccgccccaggtgatgctgctgcacccaccccagagtcatggggggcccccccaaggcgcggtgccccagagtggggtgcctgcactctcagcttccacaccctcaccctacccctacatcggacacccccaagttcaatctcatccctcccagcagctccccttccaccccccggggaactgaagattgtcctggccgcgacctgagacctccatgagtggagggaagagtgatctatgtctcttcccccagcagctcggaccactcccagccccccatccccccgttccccaggggagctggggaattcctgccaagcaccttgaatgggaggggcctcacagagggcagggccagggtccagcaggggtggggggttcctgctctgcccctgcccgtccccacccagtcttgccctcccatcctctcatctattcccccgctggagacggaagatcttttattttctattatttataacttcagacttgggccccctgttctttctttcccattaacttgagtgacctgtgtgagagacagacagatgccccacgaggatggctggacaaggacttttactttttattacataaaaatattaaaaaataaataaaaaaaataaaattttaaactaacttaa

SEQ ID NO: 242345 - DNA, 3135 bp, Artificial Sequence
  derived and/or modified sequence
atgctgaagccccagcccctgcagcagcccagccagccccagcagcccccccccacccagcaggccgtggccagaagaccccccggcggcaccagcccccccaacggcggcctgcccggccccctggccaccagcgccgccccccccggcccccccgccgccgccagcccctgcctgggccccgtggccgccgccggcagcggcctgagaagaggcgccgagggcatcctggccccccagcccccccccccccagcagcaccaggagagacccggcgccgccgccatcggcagcgccagaggccagagcaccggcaagggccccccccagagccccgtgttcgagggcgtgtacaacaacagcagaatgctgcacttcctgaccgccgtggtgggcagcacctgcgacgtgaaggtgaagaacggcaccacctacgagggcatcttcaagaccctgagcagcaagttcgagctggccgtggacgccgtgcacagaaaggccagcgagcccgccggcggccccagaagagaggacatcgtggacaccatggtgttcaagcccagcgacgtgatgctggtgcacttcagaaacgtggacttcaactacgccaccaaggacaagttcaccgacagcgccatcgccatgaacagcaaggtgaacggcgagcacaaggagaaggtgctgcagagatgggagggcggcgacagcaacagcgacgactacgacctggagagcgacatgagcaacggctgggaccccaacgagatgttcaagttcaacgaggagaactacggcgtgaagaccacctacgacagcagcctgagcagctacaccgtgcccctggagaaggacaacagcgaggagttcagacagagagagctgagagccgcccagctggccagagagatcgagagcagcccccagtacagactgagaatcgccatggagaacgacgacggcagaaccgaggaggagaagcacagcgccgtgcagagacagggcagcggcagagagagccccagcctggccagcagagagggcaagtacatccccctgccccagagagtgagagagggccccagaggcggcgtgagatgcagcagcagcagaggcggcagacccggcctgagcagcctgccccccagaggcccccaccacctggacaacagcagccccggccccggcagcgaggccagaggcatcaacggcggccccagcagaatgagccccaaggcccagagacccctgagaggcgccaagaccctgagcagccccagcaacagacccagcggcgagaccagcgtgccccccccccccgccgtgggcagaatgtacccccccagaagccccaagagcgccgcccccgcccccatcagcgccagctgccccgagccccccatcggcagcgccgtgcccaccagcagcgccagcatccccgtgaccagcagcgtgagcgaccccggcgtgggcagcatcagccccgccagccccaagatcagcctggcccccaccgacgtgaaggagctgagcaccaaggagcccggcagaaccctggagccccaggagctggccagaatcgccggcaaggtgcccggcctgcagaacgagcagaagagattccagctggaggagctgagaaagttcggcgcccagttcaagctgcagcccagcagcagccccgagaacagcctggaccccttcccccccagaatcctgaaggaggagcccaagggcaaggagaaggaggtggacggcctgctgaccagcgagcccatgggcagccccgtgagcagcaagaccgagagcgtgagcgacaaggaggacaagccccccctggcccccagcggcggcaccgagggccccgagcagcccccccccccctgccccagccagaccggcagcccccccgtgggcctgatcaagggcgaggacaaggacgagggccccgtggccgagcaggtgaagaagagcaccctgaaccccaacgccaaggagttcaaccccaccaagcccctgctgagcgtgaacaagagcaccagcacccccaccagccccggccccagaacccacagcacccccagcatccccgtgctgaccgccggccagagcggcctgtacagcccccagtacatcagctacatcccccagatccacatgggccccgccgtgcaggccccccagatgtacccctaccccgtgagcaacagcgtgcccggccagcagggcaagtacagaggcgccaagggcagcctgcccccccagagaagcgaccagcaccagcccgccagcgccccccccatgatgcaggccgccgccgccgccggcccccccctggtggccgccaccccctacagcagctacatcccctacaacccccagcagttccccggccagcccgccatgatgcagcccatggcccactaccccagccagcccgtgttcgcccccatgctgcagagcaaccccagaatgctgaccagcggcagccacccccaggccatcgtgagcagcagcaccccccagtaccccagcgccgagcagcccaccccccaggccctgtacgccaccgtgcaccagagctacccccaccacgccacccagctgcacgcccaccagccccagcccgccaccacccccaccggcagccagccccagagccagcacgccgcccccagccccgtgcagcaccaggccggccaggccccccacctgggcagcggccagccccagcagaacctgtaccaccccggcgccctgaccggcaccccccccagcctgccccccggccccagcgcccagagcccccagagcagcttcccccagcccgccgccgtgtacgccatccaccaccagcagctgccccacggcttcaccaacatggcccacgtgacccaggcccacgtgcagaccggcatcaccgccgccccccccccccaccccggcgccccccaccccccccaggtgatgctgctgcaccccccccagagccacggcggccccccccagggcgccgtgccccagagcggcgtgcccgccctgagcgccagcacccccagcccctacccctacatcggccacccccaggtgcagagccaccccagccagcagctgcccttccacccccccggcaactag

SEQ ID NO: 242346 - protein, 400 aa, Artificial Sequence
  derived and/or modified sequence
MLKPQPLQQPSQPQQPPPTQQAVARRPPGGTSPPNGGLPGPLATSAAPPGPPAAASPCLGPVAAAGSGLRRGAEGILAPQPPPPQQHQERPGAAAIGSARGQSTGKGPPQSPVFEGVYNNSRMLHFLTAVVGSTCDVKVKNGTTYEGIFKTLSSKFELAVDAVHRKASEPAGGPRREDIVDTMVFKPSDVMLVHFRNVDFNYATKDKFTDSAIAMNSKVNGEHKEKVLQRWEGGDSNSDDYDLESDMSNGWDPNEMFKFNEENYGVKTTYDSSLSSYTVPLEKDNSEEFRQRELRAAQLAREIESSPQYRLRIAMENDDGRTEEEKHSAVQRQGSGRESPSLASREGKYIPLPPHRGQGQGPAGVGGSCSAPARPHPVLPSHPLIYSPAGDGRSFIFYYL

SEQ ID NO: 242347 - protein, 1044 aa, Artificial Sequence
  derived and/or modified sequence
MLKPQPLQQPSQPQQPPPTQQAVARRPPGGTSPPNGGLPGPLATSAAPPGPPAAASPCLGPVAAAGSGLRRGAEGILAPQPPPPQQHQERPGAAAIGSARGQSTGKGPPQSPVFEGVYNNSRMLHFLTAVVGSTCDVKVKNGTTYEGIFKTLSSKFELAVDAVHRKASEPAGGPRREDIVDTMVFKPSDVMLVHFRNVDFNYATKDKFTDSAIAMNSKVNGEHKEKVLQRWEGGDSNSDDYDLESDMSNGWDPNEMFKFNEENYGVKTTYDSSLSSYTVPLEKDNSEEFRQRELRAAQLAREIESSPQYRLRIAMENDDGRTEEEKHSAVQRQGSGRESPSLASREGKYIPLPQRVREGPRGGVRCSSSRGGRPGLSSLPPRGPHHLDNSSPGPGSEARGINGGPSRMSPKAQRPLRGAKTLSSPSNRPSGETSVPPPPAVGRMYPPRSPKSAAPAPISASCPEPPIGSAVPTSSASIPVTSSVSDPGVGSISPASPKISLAPTDVKELSTKEPGRTLEPQELARIAGKVPGLQNEQKRFQLEELRKFGAQFKLQPSSSPENSLDPFPPRILKEEPKGKEKEVDGLLTSEPMGSPVSSKTESVSDKEDKPPLAPSGGTEGPEQPPPPCPSQTGSPPVGLIKGEDKDEGPVAEQVKKSTLNPNAKEFNPTKPLLSVNKSTSTPTSPGPRTHSTPSIPVLTAGQSGLYSPQYISYIPQIHMGPAVQAPQMYPYPVSNSVPGQQGKYRGAKGSLPPQRSDQHQPASAPPMMQAAAAAGPPLVAATPYSSYIPYNPQQFPGQPAMMQPMAHYPSQPVFAPMLQSNPRMLTSGSHPQAIVSSSTPQYPSAEQPTPQALYATVHQSYPHHATQLHAHQPQPATTPTGSQPQSQHAAPSPVQHQAGQAPHLGSGQPQQNLYHPGALTGTPPSLPPGPSAQSPQSSFPQPAAVYAIHHQQLPHGFTNMAHVTQAHVQTGITAAPPPHPGAPHPPQVMLLHPPQSHGGPPQGAVPQSGVPALSASTPSPYPYIGHPQAPLPPPGELKIVLAAT

SEQ ID NO: 242348 - DNA, 267 bp, Artificial Sequence
  derived and/or modified sequence
atggccagctgcaccaacagaggaggcctgcctgagaagcacagcagcagcaaggtgagcagccacgcccagatgatccagaaggctgtggacttcctggacctgctgattggccacctgagcaagttcagccctgtgctgattgtgttccagttcagccccctgggcttcctggtgcggcagagcagcgctgacaacgtgcagttcctgagctttgcccccagcctcatcctgcccagcggcaccggcaactggctggtgtggtag

SEQ ID NO: 242349 - DNA, 1203 bp, Artificial Sequence
  derived and/or modified sequence
atgctaaagccgcagccccttcagcaaccaagccagccccagcagcctccacctacgcaacaggctgtcgctagaaggccgcccgggggtaccagcccacccaacggagggctgcctgggccactcgccacctcagctgcacctcctggccccccagccgcggcttccccatgcctgggtcctgtagcagccgctggtagcggacttagacgaggggctgaaggtatcttggcccctcagccgcccccaccccagcaacatcaagagcgaccaggggccgccgccatcgggtctgcccgtggtcagagcacaggcaaaggtcctccccagtcacccgtctttgagggcgtctacaataatagtagaatgctgcacttcctcactgccgttgtaggctccacatgtgatgttaaggtcaagaatggaaccacttacgagggcatatttaaaactctctcgagtaagtttgaactggcagtggatgccgtgcaccgtaaggcttcagagcccgctggagggcctcgtcgtgaagatattgtcgatactatggtctttaaaccaagcgatgtgatgctggtgcacttccgaaacgttgacttcaattacgccacaaaagataaattcacagacagcgctatcgcgatgaatagcaaggttaatggggagcacaaggagaaagtgctccagcgctgggagggcggcgacagcaattcagacgactacgaccttgagagcgacatgagcaatggctgggaccccaacgagatgttcaagtttaacgaagaaaactacggcgtgaagactacttacgacagttcactttcttcatacacagtaccactggagaaggataattcagaagaatttcggcagcgggagctccgggcagcacaactagctcgggaaatagagtccagtccccagtataggctccgcatcgccatggaaaatgacgatggtcgcacagaggaggaaaaacacagtgccgttcagcggcagggctccggaagagaaagccccagcctagcttctcgggagggtaagtacatccccctgcctccacatagaggccagggccagggccctgctggcgtcgggggcagctgtagcgctcctgcccgtccacaccccgtgttgccctcgcatccactgatctattctccagcgggagacgggcgttcttttatattttactatctctag

SEQ ID NO: 242350 - DNA, 3135 bp, Artificial Sequence
  derived and/or modified sequence
atgttaaagcctcagccactgcagcagcctagtcagcctcagcagccaccacccacacaacaagctgtggcccggcgccctcccggcggtacttcccctcccaatggaggtttgccaggtccccttgctacttcagcagctccccccggaccccccgccgccgcctctccatgtttaggtccagtggctgctgctggctccgggctcaggaggggcgctgagggaatcctggccccacagcctccgcccccccagcaacatcaggagagacccggagctgccgccatcggctcagctagaggccagtccaccggcaaggggccaccccaatcacccgtcttcgagggagtgtacaataactcacgcatgcttcacttcctcacagccgtggtgggctccacctgtgatgtgaaggtgaaaaatgggaccacatatgaaggtatctttaaaactctgagttccaaatttgagctggccgtcgacgcagtccataggaaagccagcgaaccagcagggggtccccggcgcgaagacattgtcgatactatggtgtttaagccttctgacgttatgctggtgcacttccgtaacgtggacttcaattatgcaaccaaagacaaattcactgacagtgccatcgctatgaactctaaggtaaacggggagcacaaggagaaagtgctgcaacggtgggaaggaggtgattcgaacagtgacgattacgatcttgaatccgatatgtctaatggctgggatccaaacgaaatgtttaaattcaatgaggagaactatggcgtgaaaaccacctatgatagctcgctttcatcctatactgtgccgcttgaaaaggacaattctgaggaatttcgccagagagaactgagagcggcgcagctggccagggaaattgagagctctcctcagtaccgcctcaggatcgccatggaaaatgatgatggccgtactgaagaggaaaagcattctgctgtacagagacaagggtccgggcgagagtcaccttccctggctagtagggaaggtaagtacattcctttgccccagcgcgttagagaaggacctaggggaggggtgaggtgttcctcaagccgcggaggtaggcctgggctgagcagcctaccacctagaggtcctcatcacctcgacaattcctcccccgggcccgggtccgaagctagaggaatcaacggcggcccatctaggatgtctcccaaggcacagcgaccccttcgaggcgctaagaccctgagttcaccctctaacaggccatccggggaaacaagcgtgccccctccgcccgccgtggggcggatgtatccacctcgcagtccaaagtcagccgctccggcacccatttccgcgagctgtcccgaaccccctatagggtccgcagtgcctacatccagcgcttcaattcccgtgactagttccgtgtccgatccaggtgtcggcagcatcagcccagcgtcacccaagatctcactggcgcccacggatgtgaaagagctgtctactaaggagccaggacggacactggagcctcaggagctagcccgaatcgcagggaaagtgccagggctgcaaaatgaacagaagcgattccaactggaggagcttagaaaattcggagcccagttcaaacttcagccctcttcttcacccgagaattctctcgacccctttccacctcggattctaaaagaggaaccaaaaggaaaggagaaggaggtcgacggcctgttaacaagcgagcccatgggttcgcccgtgtcctctaaaacagagtctgtgtctgataaggaagataagccccctttagccccttcaggtggcactgaggggcccgaacagccgccccctccgtgtccatcacaaactggcagtccacctgtaggactgatcaaaggagaggacaaggacgaggggccagttgccgaacaggtcaagaagtccacgctgaacccgaatgctaaagaatttaacccgactaaacctttattgtcagtaaataagtccacctcaacaccaacaagcccagggcccagaactcactccacccccagcatcccggtccttactgccggacagagtggcctatatagtccacagtatatctcttacattccacagatccacatgggccctgccgtgcaggctccccagatgtatccctaccctgtatcaaattctgtgccaggacagcaagggaaatacagaggcgctaaaggctcattacccccccagcggtcagatcagcatcagccggcttcagcgccgccaatgatgcaagcagccgccgcggctggcccgcctctggtggccgctaccccgtatagctcctatatcccttataacccgcagcaatttcctgggcagccagccatgatgcagcctatggcacattaccccagtcagcccgtgttcgcccctatgctgcaatctaacccccggatgctgacctctggatcacatccccaggctatcgttagctcctcaactcctcagtacccctcggccgagcagcccacgccacaggctctgtacgccacggtccatcagtcatatccccaccacgccactcagctgcacgcacatcagcctcagccggctactacccccactgggagtcagccccagtcccaacacgctgctccgtcaccagtgcagcaccaagcggggcaggccccacacctgggaagtgggcaaccgcagcaaaatctgtaccaccccggggcactcaccggcaccccacccagccttccccctggccctagcgcccagtctccacagtcctcttttccgcagcccgccgcggtgtatgctattcatcatcaacagctacctcacgggttcacaaacatggcccacgtcactcaagcacacgttcagacaggcatcaccgccgccccgccgcctcaccctggcgctccccaccccccccaagtgatgctccttcatcccccacagagccacggaggccccccacaaggggctgtcccacagtctggagttcctgctttatctgcctcgactcccagtccctacccctacatcgggcacccgcaagcccctctcccccctcctggcgagttgaagattgtactcgccgccacgtag

SEQ ID NO: 242351 - DNA, 456 bp, Artificial Sequence
  derived and/or modified sequence
atgcttccattcagtaccgccaccactttaaccaccgcagcctcgcccctcgccgccagggcccttcactggcatgtgggcgaactgcagacgggcctgagggggcatcgcgtgcttggccccggccgacatctgcctttgttagtcgatcatcagcgcgctcactgccctttggggaggggggagctctgggcttttagccagtactatccccaccccggggaggagaccggggcttcgagcggccagcctccgtaccccgtgtccgtactggcatccctgcaggttgatacattccccgatcccactctgtggaattccctacaccatctgcaactgccggcacggcaatgttggcctggtcatccgcccccaccaggagcaggaacgggatttctgcctggcctgcattgctgccaccccttgcttctgccacagcccaggggtgaggattag

SEQ ID NO: 242352 - DNA, 1203 bp, Artificial Sequence
  derived and/or modified sequence
atgctgaagccccagcccctgcagcagcccagccagccccagcagcccccacccacccagcaggccgtggcccggcggcccccaggcggcaccagccccccaaatggaggcctgcccggccccctggccaccagcgctgcccctcctggccccccagctgctgccagcccctgcctgggccctgtggccgctgctggcagcggcctgcggagaggagctgagggcatcctggccccccagcccccaccaccccagcagcaccaggagaggcctggagctgctgccatcggcagcgcccggggccagagcacaggcaagggccccccccagagccctgtgtttgagggcgtgtacaacaacagcaggatgctgcacttcctgacagctgtggtgggcagcacctgtgatgtgaaggtgaagaatggcaccacctatgagggcatcttcaagaccctgagcagcaagtttgagctggccgtggatgctgtgcacaggaaggccagcgagcctgctgggggccccaggagagaagatattgtggacaccatggtgttcaagcccagtgatgtgatgctggtgcacttcagaaatgtggacttcaactatgccaccaaggacaagttcacagattctgccatcgccatgaacagcaaggtgaatggagagcacaaggagaaggtgctgcagcgctgggagggcggggacagcaacagtgatgattatgacctggagagtgacatgagcaatggctgggaccccaatgagatgttcaagttcaatgaggagaactacggcgtgaagaccacctatgacagcagcctgagcagctacacagtgcccctggagaaggacaacagcgaggagttccggcagcgggagctgcgggccgcccagctggcccgggagattgagagcagcccccagtaccgcctgagaattgccatggagaatgatgatggccgcacagaggaggagaagcacagcgctgtgcagaggcagggcagcggccgggagagccccagcctggccagccgggagggcaagtacatccccctgcccccccaccggggccagggccagggccctgctggggtgggcggcagctgcagcgccccagcccggccccaccctgtgctgcccagccaccccctcatctacagccctgctggagatggccgctccttcatcttctactacctgtag

SEQ ID NO: 242353 - DNA, 3135 bp, Artificial Sequence
  derived and/or modified sequence
atgctgaagccccagcccctgcagcagcccagccagccccagcagcccccacccacccagcaggccgtggcccggcggcccccaggcggcaccagccccccaaatggaggcctgcccggccccctggccaccagcgctgcccctcctggccccccagctgctgccagcccctgcctgggccctgtggccgctgctggcagcggcctgcggagaggagctgagggcatcctggccccccagcccccaccaccccagcagcaccaggagaggcctggagctgctgccatcggcagcgcccggggccagagcacaggcaagggccccccccagagccctgtgtttgagggcgtgtacaacaacagcaggatgctgcacttcctgacagctgtggtgggcagcacctgtgatgtgaaggtgaagaatggcaccacctatgagggcatcttcaagaccctgagcagcaagtttgagctggccgtggatgctgtgcacaggaaggccagcgagcctgctgggggccccaggagagaagatattgtggacaccatggtgttcaagcccagtgatgtgatgctggtgcacttcagaaatgtggacttcaactatgccaccaaggacaagttcacagattctgccatcgccatgaacagcaaggtgaatggagagcacaaggagaaggtgctgcagcgctgggagggcggggacagcaacagtgatgattatgacctggagagtgacatgagcaatggctgggaccccaatgagatgttcaagttcaatgaggagaactacggcgtgaagaccacctatgacagcagcctgagcagctacacagtgcccctggagaaggacaacagcgaggagttccggcagcgggagctgcgggccgcccagctggcccgggagattgagagcagcccccagtaccgcctgagaattgccatggagaatgatgatggccgcacagaggaggagaagcacagcgctgtgcagaggcagggcagcggccgggagagccccagcctggccagccgggagggcaagtacatccccctgccccagagggtgcgggagggcccccggggcggcgtgcgctgcagcagcagcagaggaggccggcccggcctgagcagcctgcccccccggggcccccaccacctggacaacagcagccctggccctggcagcgaggcccggggcatcaatggaggccccagcaggatgagccccaaggcccagaggcccctgcggggggccaagaccctgagcagccccagcaaccggcccagcggggagacctctgtgcccccacctcctgctgtgggccgcatgtacccacccaggagccccaagtctgctgccccagcccccatcagcgccagctgcccagagccccccatcggcagcgctgtgcccaccagcagcgccagcatccctgtgaccagctctgtgtctgaccccggggtgggcagcatcagccctgccagccccaagatcagcctggcccccacagatgtgaaggagctgagcaccaaggagcccggccgcaccctggagccccaggagctggccagaattgctgggaaggtgcccggcctgcagaatgagcagaagcgcttccagctggaggagctgaggaagtttggagcccagttcaagctgcagcccagcagcagccctgagaacagcctggaccccttccccccacgcatcctgaaggaggagcccaagggcaaggagaaggaggtggatggcctgctgaccagcgagcccatgggcagccctgtgagcagcaagacagagagcgtgtctgacaaggaggacaagccacccctggcccccagcggcggcacagagggccctgagcagcccccaccaccctgccccagccagacaggcagcccccctgtgggcctcatcaagggggaggacaaggatgagggccctgtggccgagcaggtgaagaagagcaccctgaaccccaatgccaaggagttcaaccccaccaagcccctgctgtctgtgaacaagagcaccagcacccccaccagccctggccccaggacccacagcacccccagcatccctgtgctgacagctggccagagcggcctgtacagcccccagtacatctcctacatcccccagatccacatgggccctgctgtgcaggccccccagatgtacccctaccctgtgagcaacagcgtgcccggccagcagggcaagtacagaggagccaagggcagcctgcccccccagaggagtgaccagcaccagcctgccagcgccccacccatgatgcaggccgctgctgctgctggcccccccctggtggccgccaccccctacagcagctacatcccctacaacccccagcagtttcctggccagcctgccatgatgcagcccatggcccactaccccagccagcctgtgtttgcccccatgctgcagagcaaccccaggatgctgaccagcggcagccacccccaggccatcgtgagcagcagcaccccccagtaccccagcgctgagcagcccaccccccaggccctgtatgccaccgtgcaccagagctacccccaccacgccacccagctgcacgcccaccagccccagcctgccaccacccccaccggcagccagccccagagccagcacgccgcccccagccctgtgcagcaccaggccggccaggccccccacctgggcagcggccagccccagcagaacctgtaccaccctggggccctgaccggcaccccacccagcctgcccccaggccccagcgcccagagcccccagagcagcttcccccagcctgctgctgtgtatgccatccaccaccagcagctgccccacggcttcaccaacatggcccacgtgacccaggcccacgtgcagacaggcatcacagctgcccccccaccccaccctggggccccccaccccccccaggtgatgctgctgcaccccccccagagccatggaggccccccccagggcgctgtgccccagagcggcgtgcctgccctgagcgccagcacccccagcccctacccctacatcggccacccccaggcccccctgcccccacctggagagctgaagatcgtgctggccgccacctag

SEQ ID NO: 242354 - DNA, 1203 bp, Artificial Sequence
  derived and/or modified sequence
atgctgaagccccagcccctgcagcagcccagccagccccagcagccaccgccaactcagcaggcggttgccaggcgtcctcctggcggcacatctcctcctaatggcgggttgccaggccccttggcaactagcgcagcaccccccggcccacctgctgccgcttctccttgcctaggcccggttgcggctgccgggtcagggttacggcgcggagcggaaggaattttggctccgcagcctccaccccctcagcagcatcaggaaagacccggggccgccgctataggcagtgctcgaggacagagcaccggaaaaggcccaccccagtccccagttttcgagggagtgtacaataacagccgcatgttacacttccttactgccgtggtaggctctacatgcgacgttaaggttaagaacgggacaacatacgaaggcatttttaaaactttgagttccaaattcgagttagccgtagacgccgttcaccggaaggcgtctgagccagccggcggccctcgccgggaagatattgttgatacgatggtctttaagccttcagacgtgatgttggtgcacttcagaaacgtggacttcaattacgcaaccaaagataagttcactgactcggccatcgccatgaattccaaagtgaacggtgagcataaagagaaggtcctgcagcgatgggagggaggggacagtaattcggatgactacgatctggaaagcgacatgtctaatggttgggacccgaatgagatgttcaagttcaatgaagaaaactacggggtgaagacgacatacgactcctctctgagtagttacacagttcccctcgagaaagataatagcgaggaattcaggcagcgggagttgagggcagcccagttggcacgagaaatagagtcttctcctcagtatcgcctgcggatcgccatggaaaatgatgacgggcggaccgaagaggagaagcacagcgcagtccagaggcaggggagtggaagggaatcaccttcccttgcttcgcgagagggcaagtatatccccctgccccctcaccgcggccagggacagggaccagccggtgtgggagggtcctgctcagcccctgcccgaccccaccctgttcttccatcccatccactcatctactcacccgcaggtgatggaagaagtttcatcttttattacctgtag

SEQ ID NO: 242355 - DNA, 3135 bp, Artificial Sequence
  derived and/or modified sequence
atgctgaagccccagcccctgcagcagcccagccagccccagcagcctccacccacccagcaagccgtggcacgccggccacctgggggaacaagccccccgaacggtggacttcctgggccactagctacgtccgctgctcccccaggaccgccagcagccgcttccccctgcctcgggccagtggctgccgctggctccgggttacgtcgtggggccgagggtatcctggcgccccagcccccccctcctcagcagcatcaggagcgccctggggctgcagcaatcggaagcgccagaggtcagagtaccggaaaagggcctcctcagtcccccgtgtttgaaggagtgtacaacaactctagaatgctgcactttctcacagcggtcgtcggtagcacatgcgacgtcaaagtgaagaatggcaccacttatgagggaatttttaaaacactctcatcgaaattcgagctggccgtagacgctgtgcatcgtaaggccagtgagccagctggcggacccagaagagaagacatcgttgacacaatggttttcaaaccctctgatgtgatgctcgtgcacttccgaaacgttgattttaactatgccactaaggacaagtttaccgacagcgctattgcgatgaactccaaagtcaacggagagcacaaagaaaaggtgctccagcgatgggaggggggcgattctaactcagatgattatgacctggaatcggatatgagtaatggttgggatccaaatgagatgtttaagtttaacgaggaaaactacggtgttaaaacgacctatgatagctctctcagcagttatactgtgccgctggaaaaagataactccgaagaattcagacagagggaattacgcgccgcgcagctggcgcgagagatagaaagttccccccaatatcgccttcggatagcaatggagaacgacgacgggcgcacggaagaagagaagcacagtgcagtacagcggcaggggagcggccgggagagtccatctctggcctcccgcgaaggcaaatacattccgctgccacagagagtgcgggaggggcctagagggggcgtgcgctgcagcagttccagagggggtcgccccgggttaagttcattacccccccgcggacctcaccacctcgataattcaagtcccgggcctggttcagaggctcggggcataaatggcgggccctcccggatgtcacctaaggcgcaaaggccattgagaggggctaagaccctcagcagccctagtaaccggccctctggcgagacatcagttcccccgccccccgcagtcgggagaatgtatcctccccgttccccgaagtccgcggcaccagcccccatttccgcctcgtgtccagaacctcctattgggtccgctgttccgaccagtagtgccagtatccctgtgaccagttctgttagtgatcccggggtggggtccattagccccgcctcccccaagatcagtctggctcccaccgacgtgaaagagctatctacaaaggaacctggccgcaccttagagccccaagaactagcgcgcatcgccggcaaagtccccggtctgcaaaacgagcagaagcggtttcagcttgaagagttgaggaaattcggggcccagttcaagctacagccttcatcatcacccgaaaatagtcttgatcctttccccccaagaatcctgaaggaggagcctaagggaaaggagaaggaagttgatgggttgttgacatccgagcccatggggtcccccgtttcttcaaaaactgaaagtgtctccgataaggaggacaaaccgccactagcaccatctgggggcaccgaggggccggagcagccaccccccccatgcccaagtcagactggatccccacccgttggcctgataaaaggtgaagataaagacgaaggtccagtcgccgaacaggtaaagaaatctacactgaatcccaatgccaaggaatttaacccaaccaaacctttattaagcgtcaataagtctacttctacacctacttccccaggaccccggacccacagcaccccgtctatccccgtgcttactgccggtcagtccggcctttactctccccaatacatttcgtacattcctcagatacatatgggcccagccgttcaggcgcctcagatgtacccatatcccgtaagcaatagtgtgccaggccagcagggcaaatatcgcggggcaaagggctctttgccaccgcaacgtagcgatcagcatcaaccggcctctgccccacccatgatgcaggccgcagcagctgccggaccaccgcttgttgcagccacgccctacagctcttacattccttataaccctcagcaattcccagggcagcctgctatgatgcagcctatggcccattatccctcacagcctgtgtttgcaccaatgttgcagtctaaccccaggatgctgacgtccggatctcatcctcaggcaattgtctcatcatcaaccccacagtatccttccgctgagcagcctacaccacaggctctctatgcaacagtacaccagtcttatccacaccatgccacccagttacacgcacatcaaccacagccagccacaacacctactggctcccaaccccagagtcaacacgccgctcctagtcctgtccagcaccaggcgggtcaggctccccacctgggatctggccagccgcagcagaatttgtatcacccaggggctctgaccggcaccccccccagtctgcctcccggcccttcagcgcagtccccccaatcttcctttccacaaccggcagcggtgtacgctatacatcaccaacagctgccacatggcttcactaatatggcccacgtcactcaggcgcacgtgcagacgggcatcactgccgcaccgcctcctcatcccggcgctccccacccaccacaggtcatgttactccatccgccgcaaagccacggcggcccaccacaaggggccgtgccacaatcaggagtaccagcactgagcgcatcaactcccagcccctacccttatatcggacatccacaggcaccactccctccaccaggcgagctgaaaattgtcctggctgccacttag

SEQ ID NO: 242356 - DNA, 1203 bp, Artificial Sequence
  derived and/or modified sequence
atgctgaaaccacaacctcttcagcagccatcccagccccagcaaccacctccaacacagcaggccgtggcaaggagaccacccggaggaactagccctccaaatgggggtctgcccggtcccctggccacgagcgcagccccacctggcccacccgctgcagcttctccatgcctcggccctgtggctgcagctggcagcggtctgcggaggggggcagagggcattctggcgcctcagcctcccccaccacagcagcatcaagagcggcctggggcagccgcaatcggttcagctagagggcaatcgactggcaagggtcccccacagagtcctgtctttgagggtgtttacaataattcccggatgctccacttcctcacagctgttgtgggtagcacatgcgacgttaaggtgaaaaatggtaccacctacgaagggatcttcaagaccctgagttccaaattcgaactggccgtggacgcagttcaccgtaaggcgtcggagcccgctggcggtcccaggcgtgaagacatcgtggacacaatggtatttaagccatccgacgtcatgttagtgcattttcgtaatgtagacttcaattatgccaccaaggataagtttactgattccgccattgccatgaactcaaaagtgaatggggaacacaaggagaaagtgttgcagcgttgggagggaggcgactctaattcagatgattatgatctggagtctgatatgtctaacggttgggatcctaatgagatgttcaagttcaatgaggaaaactacggagtcaaaactacatacgattcttcactgagtagttacacagttcctcttgaaaaggataactctgaggaattccgccaacgggagctacgcgcagcccagctcgcccgtgaaatcgagagctccccgcaataccggttgagaattgcaatggagaacgatgatggccgaaccgaggaggagaagcattcagccgtgcagagacaaggcagcggcagagagagtcccagtctggcctcgagagaaggcaaatacataccgctccccccacaccggggtcaggggcaggggccagcaggcgtggggggatcctgcagtgctccagcacggcctcatcctgtgctgccttctcatccactgatctacagtcctgcgggtgacggacggtctttcatattctactatctctag

SEQ ID NO: 242357 - DNA, 3135 bp, Artificial Sequence
  derived and/or modified sequence
atgctcaagccacagccgttgcagcagccctcacagccacagcaaccaccgcctacccaacaggccgttgccagacgtcctcccggaggaacatcaccgcctaatggtgggttgccgggaccactagcgacttctgccgcaccgccaggaccccctgcggcagcctcgccttgtctagggccagttgcagccgctggctccggactgcggcgaggagctgagggcatcctggctccccagccgcctcctccacagcaacatcaggagaggccaggagcagcagcaatcggaagcgcgagggggcagtccaccggaaagggacccccacaatcccctgtgttcgaaggggtctacaataatagtagaatgctgcactttttgactgccgtcgtcggctcgacatgtgacgtaaaagtgaagaacggaacaacttatgagggaatcttcaagactctgagctctaagttcgaactggctgtcgacgctgttcaccgaaaggccagcgagcccgctggcggtcccagaagggaggatatcgtcgatacgatggtgttcaaacccagcgatgtgatgcttgtccattttcgaaatgtggacttcaactatgctaccaaggataagttcaccgacagcgctatagccatgaacagcaaggtgaacggggaacataaagagaaggttctccagcgctgggaaggtggtgatagtaactctgatgattatgacctggaatccgatatgtctaacggatgggatccaaatgaaatgtttaagtttaacgaggaaaactatggcgtgaagactacttacgactcctcacttagcagctatacggtgcccttggagaaagacaacagtgaggagttccgccagcgggaactgagggccgctcaattggctagagaaatcgagtcctccccacagtatcgactccgtattgccatggaaaatgacgacggcaggactgaggaggaaaagcacagcgccgtgcagcgccaagggagtggacgagaatcacctagtttggctagccgagaaggcaagtatatccctctgccccaaagggtcagggaaggtcccagaggtggggtaagatgtagtagctcacggggtggcaggccaggactgagtagtttgcctccacgtgggccacaccacctggacaacagcagccccggacccggaagcgaggcgagggggatcaacggagggccttccagaatgagcccgaaagcacagcgacctctgcgcggagctaagacactctctagcccatctaatcggccatctggagaaacttctgtgcctccccctccagcggtgggaagaatgtaccccccaagatctccaaagtccgccgcaccagcgcctatctccgccagttgccctgagcccccaatcggttcagcggtgccgacaagttctgcttctatccccgtgacatcctcggtgagcgaccccggtgtggggtcgattagccctgcaagcccgaaaatcagcctcgcccctactgacgttaaagaactgtcgacaaaagaaccgggtcggactcttgagcctcaggaattggcacgaatcgcaggtaaagtccctggtttgcagaacgagcagaagaggttccagctcgaggagctacggaaattcggcgctcagttcaaactgcagccttcctctagccccgagaactcacttgacccattccccccacgcatcctgaaggaggaacctaaagggaaggagaaggaagttgacggcctactcacctctgagcctatgggatctccagtctccagcaaaacagagtctgtctctgataaggaagataagcctccccttgccccatccggcggaaccgagggtcccgagcagcccccaccaccttgcccctctcagactggcagtccacctgtgggcctgattaagggtgaagataaagatgaaggaccagtggcagagcaggtcaagaagagcaccttgaatccgaatgctaaggaatttaatcctacaaagccactgctttccgtgaacaaatcaaccagtacgcccacttcgccagggcctagaacgcattccactccttccatccctgtgctgaccgctggtcagtcaggcctgtacagcccgcagtacatctcctatatcccccaaatccacatgggccctgctgtccaggcgcctcaaatgtatccctaccccgtgtcgaactccgttccaggacagcaaggcaaataccgcggtgccaagggatcgctgccaccacagcggtctgaccaacaccagccagcatccgcccctcccatgatgcaggccgctgcggctgccggtccaccactggtggcagccacaccatactcatcatatatcccctataatcctcagcaattccccggacagccagcaatgatgcaacccatggcccattacccctcacaacctgtgttcgcccctatgcttcagtccaatcccaggatgctcacttctgggagtcatcctcaagccattgtgagtagcagtaccccgcaatatccttcggcagagcaaccaactcctcaggcattgtacgctaccgtccaccagtcatacccccaccacgcaacacagctgcatgctcaccagccacagcccgcaacaacaccaaccggatcccagccccagagtcagcacgccgcaccgtctcccgtccagcaccaggccggacaggctccccacctgggctcaggacagccacagcagaatctctaccaccccggagcgctcactggaactccaccgtctctaccacctgggccatcagctcagtccccccagagcagtttcccccagccagcagccgtgtacgccatccatcatcaacaacttcctcacggttttaccaacatggcacacgtcacacaggcccatgttcagacagggattacggctgcgccaccccctcatcccggagcccctcacccacctcaggtgatgttactccatcccccacagtcgcacggtgggcctccacagggggcagtgccccagagtggcgttcctgctctctctgcatcgacaccgagtccatacccatatatcggccaccctcaggctcctctccctcctcccggagagttaaaaattgttcttgcggctacttag

SEQ ID NO: 242358 - DNA, 1370 bp, Artificial Sequence
  derived and/or modified sequence
ccgcggtcttctctctccacccccgacaccgcggggctccccccgcccgcccacggcgggccccggctgcccgatccccctcgcttcccgcgctctccagcggggccccagccccggccccctctctccctcccttctctctaattccccttccggacgctgccatcatgttgaagcctcagccgctacaacagccctcccagccccagcagccgccccccacgcaacaggccgtggcccgtcggccccccgggggcaccagccctcccaacggcggcctcccggggccgctggccacctctgcggctcctcccgggcctccagcggccgcctccccctgcctggggcctgtggccgctgccgggagcgggctccgccggggagccgaaggcatcttggcgccgcagccgccgccgccgcagcaacaccaggagaggccgggggcagccgccatcggcagcgccaggggacagagcacaggaaagggacccccacagtcacctgtgtttgaaggcgtctacaacaattccagaatgctgcatttccttacagctgttgtgggctccacttgtgatgtaaaggtgaaaaatggtaccacttatgagggtatcttcaagacgctaagctcaaagtttgaactagccgtggatgctgtgcaccggaaagcatctgagccagcaggtggccctcgtcgggaggacattgtggacaccatggtgtttaagccaagtgatgtcatgcttgttcacttccgaaatgttgacttcaactatgctactaaagacaagttcaccgattcagccattgccatgaactcgaaagtgaatggggaacacaaagagaaggtgcttcagcgctgggaggggggtgacagcaacagcgacgactatgacctcgagtctgacatgtccaatggatgggaccccaatgaaatgttcaagttcaatgaggagaactacggtgtgaagactacctatgatagcagtctttcttcttatacggtgcccttagaaaaggacaactcagaagagtttcgtcagcgagagctgcgtgcggcccagttggctcgagagattgaatcaagcccccagtaccgcctacggatcgccatggagaacgacgatgggcgcactgaagaggagaagcacagtgcagtccagcggcagggctcagggcgggagagccccagcttggcatccagggaggggaagtatatccctctgcctcctcacagagggcagggccagggtccagcaggggtggggggttcctgctctgcccctgcccgtccccacccagtcttgccctcccatcctctcatctattcccccgctggagacggaagatcttttattttctattatttataa

SEQ ID NO: 242359 - DNA, 3737 bp, Artificial Sequence
  derived and/or modified sequence
ccgcggtcttctctctccacccccgacaccgcggggctccccccgcccgcccacggcgggccccggctgcccgatccccctcgcttcccgcgctctccagcggggccccagccccggccccctctctccctcccttctctctaattccccttccggacgctgccatcatgttgaagcctcagccgctacaacagccctcccagccccagcagccgccccccacgcaacaggccgtggcccgtcggccccccgggggcaccagccctcccaacggcggcctcccggggccgctggccacctctgcggctcctcccgggcctccagcggccgcctccccctgcctggggcctgtggccgctgccgggagcgggctccgccggggagccgaaggcatcttggcgccgcagccgccgccgccgcagcaacaccaggagaggccgggggcagccgccatcggcagcgccaggggacagagcacaggaaagggacccccacagtcacctgtgtttgaaggcgtctacaacaattccagaatgctgcatttccttacagctgttgtgggctccacttgtgatgtaaaggtgaaaaatggtaccacttatgagggtatcttcaagacgctaagctcaaagtttgaactagccgtggatgctgtgcaccggaaagcatctgagccagcaggtggccctcgtcgggaggacattgtggacaccatggtgtttaagccaagtgatgtcatgcttgttcacttccgaaatgttgacttcaactatgctactaaagacaagttcaccgattcagccattgccatgaactcgaaagtgaatggggaacacaaagagaaggtgcttcagcgctgggaggggggtgacagcaacagcgacgactatgacctcgagtctgacatgtccaatggatgggaccccaatgaaatgttcaagttcaatgaggagaactacggtgtgaagactacctatgatagcagtctttcttcttatacggtgcccttagaaaaggacaactcagaagagtttcgtcagcgagagctgcgtgcggcccagttggctcgagagattgaatcaagcccccagtaccgcctacggatcgccatggagaacgacgatgggcgcactgaagaggagaagcacagtgcagtccagcggcagggctcagggcgggagagccccagcttggcatccagggaggggaagtatatccctctgcctcaacgagtccgggaaggtccccggggaggagttcgatgcagcagctctcggggcggtcggcctggccttagctctttgccacctcgtggccctcaccatctggacaacagcagccctggcccaggttctgaggcccgtggtatcaatggaggcccttcccgcatgtccccaaaggcacaacggcctctgagaggtgccaagactctgtcttcgcccagtaataggccttctggagaaacttctgttccacctcctcctgcagtgggccggatgtatcccccgcgttctcccaagtctgctgcccctgccccaatctcagcttcctgtccagagcctcccatcggctcggcagtgccaacctcttcagcctccatccctgtgacctcatcagtctcagatcctggagtgggctccatttctccagcttctccaaagatctccctggcccccacagatgtaaaagaactctctaccaaggaacctgggagaactctggagccccaggagctggctcggatagctgggaaagtccctggtcttcagaatgaacagaaacgattccaactggaagaactgagaaagtttggggcccagtttaagcttcagcccagtagctcccctgagaacagcctggatccttttcctccccggatcttaaaggaggagcccaaaggaaaggagaaagaggttgatggtctgttgacttcagagcccatggggtctcccgtctcctccaagacagagtccgtatcggataaggaggacaaaccacccctggcaccatcaggaggcactgaggggccagagcagcccccaccaccttgtccaagccaaactggcagccccccggtgggcctcatcaagggagaagacaaagatgagggccctgttgctgaacaagtaaagaaatcaacgttgaaccctaatgctaaggagttcaatcctacaaagcctctgctgtctgtgaataaatccaccagtaccccaacttctccggggccccggactcattcaactccctccatcccggtgctgacagcaggccagagtgggctatacagcccccagtacatctcctacatacctcagatccacatgggaccagctgtgcaggcacctcagatgtatccatatcctgtatccaattcagtgcctgggcagcagggcaagtaccggggagcaaaaggctcccttcctccgcagcgctcggaccaacaccagccagcctcagccccgccgatgatgcaggccgccgcggctgctggcccgcctctggtggctgccacgccctattcttcctacatcccctacaaccctcagcagttcccaggccagccagccatgatgcagcccatggcccactacccctcacagccggtgtttgcccccatgcttcagagcaacccacgcatgctgacgtcgggcagccatccccaggccatcgtgtcatcctctacccctcagtacccttctgcagagcagcctaccccccaagccctttatgccactgttcaccagtcctacccacaccatgccacacagctccatgcccaccagccgcagccggctaccacgcctactggaagccagccgcagtcccagcatgcggcccccagtcctgtccagcatcaggcggggcaggccccacacttgggcagtggacagccacagcagaatctgtaccacccaggggccctgacaggcacgccgccctctctgccaccgggaccttctgcccagtcccctcagagcagcttcccccagccagccgctgtgtatgccatccaccaccagcagctgccccacggcttcaccaacatggcccatgttacccaggcccatgtccaaactggaatcacagcagccccgccccctcaccctggggctccccacccgccccaggtgatgctgctgcacccaccccagagtcatggggggcccccccaaggcgcggtgccccagagtggggtgcctgcactctcagcttccacaccctcaccctacccctacatcggacacccccaagctccccttccaccccccggggaactgaagattgtcctggccgcgacctgagacctccatgagtggagggaagagtgatctatgtctcttcccccagcagctcggaccactcccagccccccatccccccgttccccaggggagctggggaattcctgccaagcaccttgaatgggaggggcctcacagagggcagggccagggtccagcaggggtggggggttcctgctctgcccctgcccgtccccacccagtcttgccctcccatcctctcatctattcccccgctggagacggaagatcttttattttctattatttataacttcagacttgggccccctgttctttctttcccattaacttgagtgacctgtgtgagagacagacagatgccccacgaggatggctggacaaggacttttactttttattacataaaaatattaaaaaataaataaaaaaaataaaattttaaactaactt

SEQ ID NO: 242360 - DNA, 1203 bp, Artificial Sequence
  derived and/or modified sequence
atgctgaagccccagcccctgcagcagcccagccagccccagcagcccccccccacccagcaggccgtggccagaagaccccccggcggcaccagcccccccaacggcggcctgcccggccccctggccaccagcgccgccccccccggcccccccgccgccgccagcccctgcctgggccccgtggccgccgccggcagcggcctgagaagaggcgccgagggcatcctggccccccagcccccccccccccagcagcaccaggagagacccggcgccgccgccatcggcagcgccagaggccagagcaccggcaagggccccccccagagccccgtgttcgagggcgtgtacaacaacagcagaatgctgcacttcctgaccgccgtggtgggcagcacctgcgacgtgaaggtgaagaacggcaccacctacgagggcatcttcaagaccctgagcagcaagttcgagctggccgtggacgccgtgcacagaaaggccagcgagcccgccggcggccccagaagagaggacatcgtggacaccatggtgttcaagcccagcgacgtgatgctggtgcacttcagaaacgtggacttcaactacgccaccaaggacaagttcaccgacagcgccatcgccatgaacagcaaggtgaacggcgagcacaaggagaaggtgctgcagagatgggagggcggcgacagcaacagcgacgactacgacctggagagcgacatgagcaacggctgggaccccaacgagatgttcaagttcaacgaggagaactacggcgtgaagaccacctacgacagcagcctgagcagctacaccgtgcccctggagaaggacaacagcgaggagttcagacagagagagctgagagccgcccagctggccagagagatcgagagcagcccccagtacagactgagaatcgccatggagaacgacgacggcagaaccgaggaggagaagcacagcgccgtgcagagacagggcagcggcagagagagccccagcctggccagcagagagggcaagtacatccccctgcccccccacagaggccagggccagggccccgccggcgtgggcggcagctgcagcgcccccgccagaccccaccccgtgctgcccagccaccccctgatctacagccccgccggcgacggcagaagcttcatcttctactacctgtag

SEQ ID NO: 242361 - DNA, 3135 bp, Artificial Sequence
  derived and/or modified sequence
atgctgaagccccagcccctgcagcagcccagccagccccagcagcccccccccacccagcaggccgtggccagaagaccccccggcggcaccagcccccccaacggcggcctgcccggccccctggccaccagcgccgccccccccggcccccccgccgccgccagcccctgcctgggccccgtggccgccgccggcagcggcctgagaagaggcgccgagggcatcctggccccccagcccccccccccccagcagcaccaggagagacccggcgccgccgccatcggcagcgccagaggccagagcaccggcaagggccccccccagagccccgtgttcgagggcgtgtacaacaacagcagaatgctgcacttcctgaccgccgtggtgggcagcacctgcgacgtgaaggtgaagaacggcaccacctacgagggcatcttcaagaccctgagcagcaagttcgagctggccgtggacgccgtgcacagaaaggccagcgagcccgccggcggccccagaagagaggacatcgtggacaccatggtgttcaagcccagcgacgtgatgctggtgcacttcagaaacgtggacttcaactacgccaccaaggacaagttcaccgacagcgccatcgccatgaacagcaaggtgaacggcgagcacaaggagaaggtgctgcagagatgggagggcggcgacagcaacagcgacgactacgacctggagagcgacatgagcaacggctgggaccccaacgagatgttcaagttcaacgaggagaactacggcgtgaagaccacctacgacagcagcctgagcagctacaccgtgcccctggagaaggacaacagcgaggagttcagacagagagagctgagagccgcccagctggccagagagatcgagagcagcccccagtacagactgagaatcgccatggagaacgacgacggcagaaccgaggaggagaagcacagcgccgtgcagagacagggcagcggcagagagagccccagcctggccagcagagagggcaagtacatccccctgccccagagagtgagagagggccccagaggcggcgtgagatgcagcagcagcagaggcggcagacccggcctgagcagcctgccccccagaggcccccaccacctggacaacagcagccccggccccggcagcgaggccagaggcatcaacggcggccccagcagaatgagccccaaggcccagagacccctgagaggcgccaagaccctgagcagccccagcaacagacccagcggcgagaccagcgtgccccccccccccgccgtgggcagaatgtacccccccagaagccccaagagcgccgcccccgcccccatcagcgccagctgccccgagccccccatcggcagcgccgtgcccaccagcagcgccagcatccccgtgaccagcagcgtgagcgaccccggcgtgggcagcatcagccccgccagccccaagatcagcctggcccccaccgacgtgaaggagctgagcaccaaggagcccggcagaaccctggagccccaggagctggccagaatcgccggcaaggtgcccggcctgcagaacgagcagaagagattccagctggaggagctgagaaagttcggcgcccagttcaagctgcagcccagcagcagccccgagaacagcctggaccccttcccccccagaatcctgaaggaggagcccaagggcaaggagaaggaggtggacggcctgctgaccagcgagcccatgggcagccccgtgagcagcaagaccgagagcgtgagcgacaaggaggacaagccccccctggcccccagcggcggcaccgagggccccgagcagcccccccccccctgccccagccagaccggcagcccccccgtgggcctgatcaagggcgaggacaaggacgagggccccgtggccgagcaggtgaagaagagcaccctgaaccccaacgccaaggagttcaaccccaccaagcccctgctgagcgtgaacaagagcaccagcacccccaccagccccggccccagaacccacagcacccccagcatccccgtgctgaccgccggccagagcggcctgtacagcccccagtacatcagctacatcccccagatccacatgggccccgccgtgcaggccccccagatgtacccctaccccgtgagcaacagcgtgcccggccagcagggcaagtacagaggcgccaagggcagcctgcccccccagagaagcgaccagcaccagcccgccagcgccccccccatgatgcaggccgccgccgccgccggcccccccctggtggccgccaccccctacagcagctacatcccctacaacccccagcagttccccggccagcccgccatgatgcagcccatggcccactaccccagccagcccgtgttcgcccccatgctgcagagcaaccccagaatgctgaccagcggcagccacccccaggccatcgtgagcagcagcaccccccagtaccccagcgccgagcagcccaccccccaggccctgtacgccaccgtgcaccagagctacccccaccacgccacccagctgcacgcccaccagccccagcccgccaccacccccaccggcagccagccccagagccagcacgccgcccccagccccgtgcagcaccaggccggccaggccccccacctgggcagcggccagccccagcagaacctgtaccaccccggcgccctgaccggcaccccccccagcctgccccccggccccagcgcccagagcccccagagcagcttcccccagcccgccgccgtgtacgccatccaccaccagcagctgccccacggcttcaccaacatggcccacgtgacccaggcccacgtgcagaccggcatcaccgccgccccccccccccaccccggcgccccccaccccccccaggtgatgctgctgcaccccccccagagccacggcggccccccccagggcgccgtgccccagagcggcgtgcccgccctgagcgccagcacccccagcccctacccctacatcggccacccccaggcccccctgcccccccccggcgagctgaagatcgtgctggccgccacctag

SEQ ID NO: 242362 - protein, 1235 aa, Artificial Sequence
  derived and/or modified sequence
MAHLELLLVENFKSWRGRQVIGPFRRFTCIIGPNGSGKSNVMDALSFVMGEKIANLRVKNIQELIHGAHIGKPISSSASVKIIYVEESGEEKTFARIIRGGCSEFRFNDNLVSRSVYIAELEKIGIIVKAQNCLVFQGTVESISVKKPKERTQFFEEISTSGELIGEYEEKKRKLQKAEEDAQFNFNKKKNIAAERRQAKLEKEEAERYQSLLEELKMNKIQLQLFQLYHNEKKIHLLNTKLEHVNRDLSVKRESLSHHENIVKARKKEHGMLTRQLQQTEKELKSVETLLNQKRPQYIKAKENTSHHLKKLDVAKKSIKDSEKQCSKQEDDIKALETELADLDAAWRSFEKQIEEEILHKKRDIELEASQLDRYKELKEQVRKKVATMTQQLEKLQWEQKTDEERLAFEKRRHGEVQGNLKQIKEQIEDHKKRIEKLEEYTKTCMDCLKEKKQQEETLVDEIEKTKSRMSEFNEELNLIRSELQNAGIDTHEGKRQQKRAEVLEHLKRLYPDSVFGRLFDLCHPIHKKYQLAVTKVFGRFITAIVVASEKVAKDCIRFLKEERAEPETFLALDYLDIKPINERLRELKGCKMVIDVIKTQFPQLKKVIQFVCGNGLVCETMEEARHIALSGPERQKTVALDGTLFLKSGVISGGSSDLKYKARCWDEKELKNLRDRRSQKIQELKGLMKTLRKETDLKQIQTLIQGTQTRLKYSQNELEMIKKKHLVAFYQEQSQLQSELLNIESQCIMLSEGIKERQRRIKEFQEKIDKVEDDIFQHFCEEIGVENIREFENKHVKRQQEIDQKRLEFEKQKTRLNVQLEYSRSHLKKKLNKINTLKETIQKGSEDIDHLKKAEENCLQTVNELMAKQQQLKDIRVTQNSSAEKVQTQIEEERKKFLAVDREVGKLQKEVVSIQTSLEQKRLEKHNLLLDCKVQDIEIILLSGSLDDIIEVEMGTEAESTQATIDIYEKEEAFEIDYSSLKEDLKALQSDQEIEAHLRLLLQQVASQEDILLKTAAPNLRALENLKTVRDKFQESTDAFEASRKEARLCRQEFEQVKKRRYDLFTQCFEHVSISIDQIYKKLCRNNSAQAFLSPENPEEPYLEGISYNCVAPGKRFMPMDNLSGGEKCVAALALLFAVHSFRPAPFFVLDEVDAALDNTNIGKVSSYIKEQTQDQFQMIVISLKEEFYSRADALIGIYPEYDDCMFSRVLTLDLSQYPDTEGQESSKRHGESR

SEQ ID NO: 242363 - DNA, 3708 bp, Artificial Sequence
  derived and/or modified sequence
atggcacatctcgagcttctgctggtcgagaatttcaaatcctggcggggcaggcaggtgatcggtccatttagacggtttacctgcattatcgggccaaatgggtcggggaagtctaacgtaatggatgccctgagctttgttatgggagagaaaattgccaacctgagagttaagaacatccaggaacttattcatggcgcccatattggcaagccgatctcctccagtgcctctgttaagatcatctacgtggaggagtccggcgaggagaagacattcgctagaatcatcaggggaggctgctccgagttccgcttcaatgataatttagtcagccgcagcgtctatatcgccgagcttgaaaagatcggcattattgttaaggctcagaattgcttggtctttcaggggactgttgaatctatcagtgtaaagaagcctaaggaaaggacccagttcttcgaggaaattagcaccagcggagaactgatcggagagtatgaggagaaaaagcgcaagctccagaaagcagaagaggatgctcagttcaatttcaataaaaaaaagaacatcgccgcagaacgacgccaggccaagctggaaaaagaggaagctgagcgttatcagtcattgttggaggagctaaaaatgaataaaattcaactgcaactgttccagctgtaccacaatgagaagaagatccacctcctcaacactaagctggagcacgtgaaccgtgatttgagcgttaaacgggaatctctgtcccatcacgagaatatcgtgaaagcccgtaagaaggagcacgggatgctcacccgtcagctccagcagacagaaaaggaactgaagagcgtggagacacttctgaaccagaaacgtccacagtacatcaaggctaaagagaacacatcacatcatttgaaaaaactggatgtcgccaagaagtccatcaaagatagcgagaagcaatgcagcaaacaggaggacgacatcaaggcgctcgaaactgaactggccgacctcgatgcagcatggaggtcctttgaaaaacagatcgaggaagagatactccacaaaaagcgggacatcgaactggaggctagccagctggaccgttataaagagcttaaagagcaggtcaggaaaaaagtcgccaccatgactcagcagttagaaaaactgcagtgggaacagaaaaccgatgaagagcgtttggcctttgagaagcggagacacggggaagtccagggaaatctcaagcagatcaaggagcagatcgaagatcataagaaacgaatcgagaagcttgaagaatatacgaagacgtgcatggactgtctcaaggaaaaaaaacaacaggaggagaccctggtcgacgagatcgagaagaccaagtccagaatgtcagaattcaacgaggagctgaacttaataaggagcgagttgcaaaacgctgggatcgatacccacgaggggaaaaggcagcagaaaagggccgaggtcttggaacacctgaaacgactctatccagactcagtctttggccggctcttcgatctgtgtcaccccatacataagaaataccagttggcagtaacgaaggtttttgggcgcttcataactgctatcgtagtggcttccgagaaggtggccaaggattgtatccgcttcctgaaggaagaaagagctgagcctgagaccttccttgccctggactacttggatattaaacctataaatgaacggctccgcgagctgaagggctgcaaaatggtgatcgacgtcatcaagactcagttccctcaactcaaaaaggtgatccagttcgtttgcgggaacgggttagtgtgcgaaactatggaagaggctagacacattgccctgtccggacccgagcggcagaagactgttgccctcgacggaacactatttctaaagtccggcgtcatcagcggcgggagttcagacctgaaatacaaggccaggtgctgggacgaaaaagagctgaaaaacctacgcgacagacgcagtcagaaaatccaagaactgaagggattgatgaaaacgttacggaaagagacagacttaaagcagatccagactttaatacaaggaacccagaccagattgaaatattcccaaaatgagttagaaatgataaagaagaagcatctggttgcattctaccaagaacagagtcaactgcagtccgaacttctgaatattgaaagtcagtgcattatgctgagcgagggtattaaagaacgtcagcgccgcatcaaggaattccaggagaaaatcgataaagtggaggacgatatctttcagcacttctgtgaggagatcggcgtggagaacataagggagtttgagaataaacacgtcaagagacagcaggagatagatcagaaacggcttgaattcgagaaacaaaaaaccaggcttaacgtgcagttggaatacagcagatcacacttgaagaaaaagctgaataaaataaatacactaaaagagactatccagaaaggatctgaagacattgaccacctgaaaaaagcagaggagaattgcctccaaacggtcaatgagctcatggccaagcagcagcagcttaaggacataagggtgacccagaactcgagcgcagagaaggtacagacacaaattgaagaggagagaaagaaattcctcgctgtggaccgagaggtcggaaaattgcagaaagaagttgtcagtattcagactagccttgaacaaaaaagactggaaaagcataatcttcttcttgactgcaaagttcaggacatcgagattatcctgctaagcgggtccctggatgacatcatcgaagtcgagatgggcacagaagctgagtctacacaggcaacaatcgacatctatgaaaaggaggaagccttcgaaatcgactacagctctttgaaggaggacctgaaggctctccagagtgaccaggagatcgaggcccacttgcggctattgctgcaacaagtggctagccaggaggatatcctcctgaagactgctgcccccaacctgcgcgctctggaaaatctaaagactgtccgcgataagttccaggaaagcaccgacgctttcgaggcgtctagaaaggaagcgcgcctctgtcgtcaggagtttgagcaagtgaagaagcggagatacgacctatttactcaatgctttgagcatgtctcgatctcaattgaccagatttacaaaaaattgtgtaggaacaactctgctcaggcatttctcagtcccgagaatcccgaagagccttacctggaaggaatcagttacaactgtgtggccccaggaaaaagattcatgccaatggataacctgtctgggggtgagaaatgtgtggccgcattagcattgctgtttgctgttcactccttcagaccagcaccattcttcgtgctggatgaggtggacgctgccttggataataccaacattggaaaggttagttcctacatcaaggagcagactcaggatcagtttcagatgattgttatttcgttgaaggaggaattctacagtagagccgacgctttaattgggatttaccctgaatacgacgactgtatgttcagtcgagtgttgaccttagatttgtctcagtacccagataccgagggacaggaatcctccaagaggcatggagaatctagatag

SEQ ID NO: 242364 - DNA, 3708 bp, Artificial Sequence
  derived and/or modified sequence
atggcccacctggagctgctgctggtggagaacttcaagtcctggaggggccggcaggtgattggccccttccgccgcttcacctgcatcatcggccccaacggcagcggcaagagcaatgtgatggatgccctgagctttgtgatgggagagaagatcgccaacctgcgggtgaagaacatccaggagctgatccacggggcccacatcggcaagcccatcagcagcagcgcctctgtgaagatcatctacgtggaggagagcggggaggagaagacctttgcccgcatcatccggggcggctgcagcgagttccgcttcaatgacaacctggtgagccgctctgtgtacatcgccgagctggagaagattggcatcatcgtgaaggcccagaactgcctggtgttccagggcaccgtggagagcatctctgtgaagaagcccaaggagaggacccagttctttgaggagatcagcaccagcggggagctgattggagaatatgaggagaagaagaggaagctgcagaaggccgaggaggatgcccagttcaacttcaacaagaagaagaacattgctgctgagcggcggcaggccaagctggagaaggaggaggccgagcgctaccagagcctgctggaggagctgaagatgaacaagatccagctgcagctgttccagctgtaccacaatgagaagaagatccacctgctgaacaccaagctggagcacgtgaacagagacctgtctgtgaagcgggagagcctgagccaccacgagaacatcgtgaaggccaggaagaaggagcacggcatgctgacccggcagctgcagcagacagagaaggagctgaagtctgtggagaccctgctgaaccagaagaggccccagtacatcaaggccaaggagaacaccagccaccacctgaagaagctggatgtggccaagaagagcatcaaggacagcgagaagcagtgcagcaagcaggaggatgacatcaaggccctggagacagagctggccgacctggatgctgcctggaggagctttgagaagcagatcgaggaggagatcctgcacaagaagagggacatcgagctggaggccagccagctggaccgctacaaggagctgaaggagcaggtgaggaagaaggtggccaccatgacccagcagctggagaagctgcagtgggagcagaagacagatgaggagcggctggcctttgagaagagaagacatggagaggtgcagggcaacctgaagcagatcaaggagcagatcgaggaccacaagaagagaattgagaagctggaggagtacaccaagacctgcatggactgcctgaaggagaagaagcagcaggaggagaccctggtggatgaaattgagaagaccaagagcaggatgtctgagttcaatgaggagctgaacctgatccgctctgagctgcagaatgccggcatcgacacccatgagggcaagaggcagcagaagagagctgaggtgctggagcacctgaagaggctgtacccagacagcgtgtttggccgcctgtttgacctgtgccaccccatccacaagaagtaccagctggccgtgaccaaggtgtttggccgcttcatcacagccatcgtggtggccagcgagaaggtggccaaggactgcatccgcttcctgaaggaggagagagctgagcctgagaccttcctggccctggactacctggacatcaagcccatcaatgaaaggctgcgggagctgaagggctgcaagatggtgattgatgtgatcaagacccagttcccccagctgaagaaggtgatccagtttgtgtgtggaaatggcctggtgtgtgagaccatggaggaggcccggcacatcgccctgagcggccctgagcggcagaagacagtggccctggatggcaccctcttcctgaagtctggagtcatcagcggcggcagcagtgacctgaagtacaaggcccgctgctgggatgagaaggagctgaagaacctgcgggacagaagaagccagaagatccaggagctgaagggcctgatgaagaccctgaggaaggagacagacctgaagcagatccagaccctcatccagggcacccagacccggctgaagtacagccagaatgagctggagatgatcaagaagaagcacctggtggccttctaccaggagcagagccagctgcagagcgagctgctgaacatcgagagccagtgcatcatgctgtctgagggcatcaaggagcggcagaggcgcatcaaggagttccaggagaagattgacaaggtggaggatgacatcttccagcacttctgtgaggagattggagtggagaacatccgggagtttgagaacaagcacgtgaagaggcagcaggagattgaccagaagaggctggagtttgagaagcagaagacccggctgaatgtgcagctggagtacagccgcagccacctgaagaagaagctgaacaagatcaacaccctgaaggagaccatccagaagggctctgaagatattgaccacctgaagaaggccgaggagaactgcctgcagacagtgaatgagctgatggccaagcagcagcagctgaaggacatccgggtgacccagaacagcagcgctgagaaggtgcagacccagatcgaggaggagaggaagaagttcctggccgtggaccgggaggtgggcaagctgcagaaggaggtggtgtccatccagaccagcctggagcagaagaggctggagaagcacaacctgctgctggactgcaaggtgcaggacatcgagatcatcctgctgagcggcagcctggatgacatcatcgaggtggagatgggcacagaagctgagagcacccaggccaccatcgacatctatgagaaggaggaggcctttgaaattgactacagcagcctgaaggaggacctgaaggccctgcagagcgaccaggagattgaggcccacctgcggctgctgctgcagcaggtggccagccaggaggacatcctgctgaagacagctgcccccaacctgcgggccctggagaacctgaagacagtgcgggacaagttccaggagagcacagatgcctttgaggccagcaggaaggaggcccggctgtgccggcaggagtttgagcaggtgaagaagagaagatatgacctcttcacccagtgctttgagcacgtgtccatcagcattgaccagatctacaagaagctgtgcaggaacaacagcgcccaggccttcctgagcccagaaaatcctgaggagccctacctggagggcatctcctacaactgtgtggcccctgggaagcgcttcatgcccatggacaacctgtctggaggagagaagtgtgtggccgccctggccctgctgtttgctgtgcacagcttccggcctgcccccttctttgtgctggatgaggtggatgctgccctggacaacaccaacatcggcaaggtgagcagctacatcaaggagcagacccaggaccagttccagatgatcgtcatcagcctgaaggaggagttctacagcagagcagatgccctgattggcatctacccagaatatgatgactgcatgttcagccgggtgctgaccctggacctgagccagtacccagacacagagggccaggagagcagcaagagacatggagagagcaggtag

SEQ ID NO: 242365 - DNA, 3708 bp, Artificial Sequence
  derived and/or modified sequence
atggcccacctggagctgctgctggtggagaacttcaagagctggcgtggcagacaagtcataggcccctttagaagatttacatgcatcattggcccaaatgggtcggggaagtctaatgttatggatgctctcagtttcgtgatgggggaaaaaattgccaacctccgagttaagaatatccaggaactgattcacggcgctcatataggaaagccgattagtagctccgctagcgtgaaaattatctacgtggaagaatctggggaagaaaaaaccttcgccagaatcatccgcggcggctgtagcgaatttcgctttaacgacaatctggtgtcacggagcgtttatatcgcggagctggagaaaattggcattattgttaaggcccagaattgtctggtctttcagggcaccgtcgagagcatctctgtcaagaagcccaaggaacggacgcagttcttcgaagagatctctactagcggggagctcattggagagtacgaggagaagaagaggaaactccaaaaggctgaagaagatgcccagtttaacttcaataaaaagaaaaacattgccgccgaacggcgccaggccaagctcgaaaaggaagaggccgagcgctatcaatctctgctggaagagcttaagatgaacaaaattcagctgcagttattccagctctatcacaacgagaagaaaatccatcttctcaacaccaaactagaacacgtaaatagagacctcagtgttaagcgagaatctctctcccatcacgagaacatcgtcaaggcaaggaaaaaggaacacggtatgctgacacggcagctgcagcaaacagagaaggaactgaaaagcgtggagaccttgctcaaccaaaagagaccacaatacatcaaagctaaagagaacacttcgcatcacctaaaaaaattggacgtggccaagaagtcgattaaagacagcgagaaacagtgtagcaagcaggaggatgatataaaagccctggagacagagcttgctgatctggatgctgcatggagaagcttcgaaaagcagatcgaagaggagattctccataagaagagagatattgagttggaagcttctcagctggaccgctacaaggagttaaaggagcaggtgcggaaaaaagtcgccactatgactcagcagcttgagaagttgcagtgggaacaaaaaaccgacgaggaacggctcgccttcgagaagaggagacacggagaggtgcaggggaatctgaagcagattaaggagcaaatagaagaccataaaaagagaattgagaagctggaagaatatactaagacatgcatggactgcctgaaggaaaagaagcagcaggaggaaacgttggtggacgaaattgagaagacaaagtcacgaatgtcagagttcaatgaggaactgaacctcattagatcggaattgcaaaacgctggaatagacacccacgaaggaaagcggcagcagaaacgggccgaggtactggagcatctcaagcgcctgtatcctgattctgttttcggacggctgttcgacttatgccatcccatccataaaaagtaccaactggcagtcacgaaggttttcgggagatttattacagctattgttgtggcttccgagaaagtcgctaaggactgcatccggtttctgaaggaggaacgcgccgaaccagaaacgttcctggctctggattatctggacatcaaacctatcaatgaaaggctgcgggagcttaaggggtgtaagatggtgatagatgtcataaagacacaatttccccagctgaaaaaggtcatccagtttgtctgcggaaatggactggtgtgcgaaacgatggaggaggcgaggcacatcgccctgtccggacctgagcgccagaaaactgtggctctggatggcacccttttcctgaagagcggcgtgatcagcggcggaagctcggatttgaagtacaaagcgaggtgctgggatgagaaggagctgaagaacttgagggatcggcgttcacagaagatccaggagttaaagggcctgatgaaaacactcagaaaggagacagaccttaaacagatccagactctgatccaagggacccagacgagactcaaatactctcagaatgaactcgagatgatcaagaaaaaacacctcgttgccttctaccaggagcaaagtcagttacagagcgaactcttaaatattgagtcccagtgcatcatgctcagtgaagggatcaaagaaaggcagcgcaggattaaagagtttcaggaaaagatagacaaggtggaagacgacatctttcagcacttctgcgaagagatcggcgtggagaatattagggagtttgagaataagcacgtgaagaggcagcaggaaatcgaccagaaaaggcttgagtttgagaagcagaaaaccaggttaaacgttcagctcgagtattcacgctcgcatcttaaaaagaagctcaacaaaatcaacaccctaaaggaaacaatccagaaagggtccgaggatatcgatcaccttaaaaaagctgaagagaattgtctccagacagtcaacgagctcatggcaaagcagcagcagttgaaagacattcgggtgacccagaatagcagtgctgagaaggtgcagactcagattgaagaggaacgaaagaagttcctggccgtcgatcgagaggtcggcaagctgcaaaaggaggtggtgagcattcagacttctctggagcagaagagattagaaaagcacaatcttctacttgattgcaaggtccaagacattgagataatcctgttaagcggctccttagatgatattatcgaggtcgaaatggggacagaagctgagtccacacaggcaacaatcgatatatacgaaaaagaagaagcttttgaaattgactactctagcctaaaggaagacctcaaagcactccaatctgaccaagagattgaggcgcacttacgtctcctgctgcagcaagtcgcatcacaagaggacatcttgctgaagaccgccgcccccaatctgcgggcactagaaaaccttaaaacagttagggacaagtttcaggaatcaactgacgcttttgaagcgtcacgaaaggaagcccgcttgtgtcgacaggagttcgaacaggtaaaaaagagacggtacgatctatttacccagtgtttcgagcatgtttctatctcaattgaccagatttataagaagctgtgtagaaacaacagcgcacaagccttcctaagccctgagaatccagaggagccctatttggagggtatctcttacaattgcgtggctccagggaagagattcatgcctatggacaatctctccggcggtgagaaatgcgtggccgccttagcccttttgttcgccgtacactcattcagaccagcccctttttttgtgctggatgaggtggacgccgctctcgacaacacaaatatcggaaaagtgagctcctatataaaggaacaaactcaagaccagtttcagatgatcgttatcagcctgaaagaggagttctatagcagggccgatgctctcatcggcatctacccagaatatgacgattgtatgttctcacgcgtgctgacactcgatctttcccagtatcccgacacagaaggacaggagtcctccaagcgacacggcgagtctagatag

SEQ ID NO: 242366 - DNA, 4201 bp, Artificial Sequence
  derived and/or modified sequence
atggcccacctggagctgctgcttgtggaaaatttcaagtcgtggcggggccgccaggtcattggccccttccggaggttcacctgcatcatcggccccaacggctctggaaaatctaatgtaatggatgcacttagttttgtaatgggagagaaaatagctaatttaagagtgaaaaatattcaagaactcattcatggagcacatattggaaaacctatttcttcttctgcaagtgtaaaaattatatatgtggaggaaagtggcgaagagaaaacatttgcaaggattatccgagggggatgctcagaatttcgctttaatgataatcttgtgagtcgttctgtttacattgcagagttggaaaagataggcataatagtcaaagcacaaaattgtttggtttttcagggaactgtagagtcaatttcagtgaagaaacccaaagaaaggacccagttttttgaggaaatcagcacttcaggagagcttataggagaatatgaagaaaagaaaagaaagttacaaaaagccgaagaggatgcacagtttaactttaataagaaaaaaaatatagcggcagagcgcagacaagcaaaattagagaaggaagaggcagaacgttaccagagtctccttgaagaactgaaaatgaacaagatacaactgcagctttttcaactataccataatgagaaaaagattcatctcctgaacaccaagttagagcatgtgaatagggatttgagtgtcaaaagagagtctttgtctcatcatgaaaacatagttaaagccaggaaaaaggaacatggaatgctaactagacaactacaacaaacagaaaaagaattaaaatcggttgaaacccttttaaatcagaagaggcctcagtacattaaagccaaagaaaacacttctcaccaccttaagaaattagatgtggctaagaaatcaataaaggacagcgaaaaacaatgttctaaacaggaagatgatataaaagccctggagacagagctggctgatttagatgctgcatggagaagttttgaaaagcagattgaggaagaaattttacataaaaagcgagacattgaactggaagccagtcagctggatcgttataaagaacttaaggaacaagtaagaaagaaagtagctacaatgactcaacaactggaaaaactgcagtgggaacagaagacagatgaagaaagactggcatttgaaaagaggaggcatggagaagttcagggaaatctaaaacaaataaaagaacaaatagaagatcataaaaaacgaatagagaagttagaggagtatacaaagacatgcatggattgcttgaaagagaaaaaacagcaagaggaaaccctagtggatgaaattgaaaaaacaaaatcaagaatgtctgaatttaatgaagaattgaatcttattagaagtgaattgcagaatgctgggattgatacccatgagggaaaacgtcagcaaaagagagcagaggttctggaacaccttaaaagactgtacccagattctgtgtttggaagactatttgacctgtgtcatcctattcataagaaataccagctggctgttactaaggtttttggccggttcatcactgccattgttgtagcctctgaaaaggtagcaaaagattgtattcgatttctgaaggaggaaagagctgaacctgagacattcctcgctctagattaccttgatatcaagccaatcaatgaaagactaagggagcttaaaggctgtaaaatggtgattgatgtcataaagactcagtttcctcagctgaagaaagtgattcagtttgtgtgtggaaatggtcttgtttgtgagactatggaagaagcaaggcatattgcactcagtggacctgaaagacagaaaacagtagctcttgatggaacattatttttaaaatctggagtgatctctggagggtcaagtgacttaaaatacaaggctagatgctgggatgagaaagagttaaagaatctaagagacagacgaagccagaaaatccaagagctaaagggtttaatgaagacactccgcaaagaaacagatttgaaacaaatacagaccctgatacagggaactcaaacacgactcaaatattcacaaaatgaactagagatgattaagaagaagcaccttgttgctttttaccaggaacaatctcagttacaaagtgaactactaaatattgagtctcaatgtattatgttgagtgaaggaatcaaggaacgacaacgaagaattaaagaatttcaagaaaagatagataaggtagaagacgatatcttccaacacttctgtgaagaaattggcgtggaaaatattcgtgaatttgagaacaaacatgttaaacggcaacaagaaattgatcaaaaaagattagaatttgaaaaacaaaaaactcggcttaatgttcaacttgagtatagtcgcagtcaccttaagaagaaactgaataagatcaacacattaaaagaaactatccagaaaggtagtgaagatattgatcacctaaagaaggctgaagaaaactgtctgcagacagtgaatgaactcatggcaaagcagcagcaacttaaggacatacgtgtcactcagaactccagtgccgagaaagttcaaactcaaattgaagaggaacggaagaagtttctggctgttgatagggaagtggggaaattgcaaaaagaagttgtaagtattcaaacttctctggaacagaaacgattagagaagcataacttgctgcttgattgcaaagtgcaagacattgagataatccttttgtcggggtcactggatgacatcattgaagtggagatgggaactgaagcagaaagtacccaggcaacaattgatatctatgaaaaagaagaagcctttgaaatagactacagctctctaaaagaggatttgaaggctctacagtctgatcaagaaatcgaggcccaccttaggctcttattgcagcaagtagcatcccaggaagatatcttactgaaaacagcagccccaaacctacgagcactggagaacttaaagactgtcagagacaagtttcaagagtccacagatgcttttgaggccagcagaaaggaagccagactgtgtaggcaagagttcgagcaagtgaaaaaaaggagatacgatcttttcacccagtgttttgagcatgtctcaatctcaattgatcaaatctacaagaagctctgcagaaacaacagcgcccaagcatttcttagcccagagaaccctgaagaaccttacttggagggaattagctataactgtgtggccccaggcaaacggtttatgccaatggacaatttgtcagggggagaaaagtgtgtggcagccttggctctcctgtttgctgtgcacagttttcgtcctgccccattctttgttttagatgaagtggatgcagccctagacaatactaacataggcaaagtgtcaagttacatcaaagagcaaactcaagaccagtttcagatgatagtcatctccctaaaagaagagttctattccagagccgacgcgctgatcggcatctatcctgagtacgatgactgcatgttcagccgagttttgaccctagatctttctcagtatccagacactgaaggccaagaaagcagcaagagacacggagagtcccgctaggggcagtcctgcagcagtcacctgatcactgttcagttcccactctaatactcacacagctcctccacaggagacttctggagcaagcaggaccagcctggtgcaccctttaagagaaaccttagtcgttctagccaaagaggctgtggctcactttagttgagtgttcagacctcattctagtagggaaagttttcagtgagagctggtgtcaaatgagtttttaaaaaacaaacaaaaggtacaattttgtactataattctaacttctattttgaaataagctagtttggttggaaaaattttgaattcagcttcatcttcactctgatcttgccttgcacccaagtaatcttgaagggaacttctcttggtttttaaacatactagttataagattgttaataaactgttgaacctggcttttgggaaattgtttcagagaaactatgttagtattgaaaatatcaataaaaaatgttctaatttcaaa

SEQ ID NO: 242367 - DNA, 3708 bp, Artificial Sequence
  derived and/or modified sequence
atggcccacctagaactgctcctcgttgaaaattttaaatcgtggcgtggaaggcaggtaatcggcccattccgcaggttcacttgtatcattgggcctaatgggagcggcaagagcaacgtgatggatgccctgagcttcgtaatgggcgagaaaatcgccaacctacgcgtaaagaatatccaggaattgattcatggggctcacattggaaagccgatcagcagttcagcatctgtaaaaattatttacgtggaagaaagtggcgaggaaaagacgttcgcccgaatcattagaggcggatgttctgaatttcggttcaacgataacctcgtgtctagaagcgtgtacattgcagagctcgagaagattgggatcatcgtcaaagcgcagaactgcctggtattccagggcacagtcgagagcatcagtgtcaaaaaacctaaggaacgtactcagttctttgaggagatcagcacttccggcgagctcataggcgaatacgaagaaaaaaagagaaagttacagaaggcagaggaggatgcccagttcaattttaacaagaaaaagaacatagccgcagagcgccgacaggcaaaactcgagaaggaggaggccgaacgataccagagccttcttgaagagctgaaaatgaataagatccagctgcagctttttcagttgtaccacaacgagaaaaagatacatctgcttaacaccaaacttgagcacgtcaatagggatctcagtgtgaaacgcgagagcctttcacaccatgaaaatatcgttaaagcaaggaagaaggagcatgggatgctgacaagacaactccagcagacagaaaaggaattgaagagcgtggagacccttctcaaccaaaagaggcctcagtatatcaaggctaaagaaaacacctcacatcacctgaaaaaactggacgtggcaaaaaagtccataaaagactctgagaagcaatgtagcaagcaggaggatgacattaaggcactggagaccgaactcgccgaccttgacgctgcctggcggtcatttgagaaacagatcgaggaggagatcctgcacaagaagcgcgatatcgaacttgaagcatcacagctggaccgctataaagaactcaaggagcaggtcagaaagaaggtggccaccatgacacagcaactggagaagctgcagtgggagcagaagacagacgaagagaggctcgctttcgagaaacgtaggcacggggaggtgcaaggcaacttgaagcaaatcaaagagcagatagaagaccataaaaaacgaatcgagaaacttgaggaatacaccaagacttgtatggactgcctcaaggaaaagaagcaacaagaagagacattagtcgacgaaatcgagaaaacaaagagccgcatgtccgagtttaacgaagagctgaatcttatcagaagtgaactgcagaatgcaggtatagatacccatgagggtaagcgccagcagaaaagagccgaagtgctcgaacacctgaagcgtttataccccgacagtgtgttcggccgtctctttgacctttgtcatcccatccacaaaaagtaccaattggcggtgacgaaggtttttgggaggtttattactgctattgttgtggcctctgaaaaagtggctaaggactgcatacgcttcctcaaagaagaacgtgccgagccggaaacatttctggctctggactatctcgacattaaaccaatcaatgagagacttcgggagcttaaggggtgtaagatggtcatcgacgttattaagacacagttccctcagcttaaaaaggtgattcagtttgtctgtggcaacggtctggtctgtgagacaatggaagaggcaagacacatagctctgagcgggcctgagcgccagaaaacagttgcattagatgggacgctgttccttaagagtggagttattagcggcggtagtagtgacctgaagtacaaagcccgttgctgggatgaaaaagagcttaagaacctccgggatagaaggagtcagaagatccaagagctcaagggcctcatgaaaacccttcgaaaggagacagacctgaaacagatccaaacacttatccagggaacccagacacgcttaaaatacagccaaaatgagctggaaatgataaaaaagaagcacctggtagcgttctaccaagaacaaagccagctccagtccgagctgcttaacattgaatctcagtgcattatgcttagcgaaggtatcaaggaaaggcagaggcgaataaaagaattccaagagaagatcgataaagtggaagatgatatcttccagcacttttgtgaagaaattggtgtggaaaacatcagggaatttgagaataagcacgtaaaaagacagcaggagattgatcagaagcgactggaattcgaaaaacagaaaactcgccttaacgtgcagctagagtacagcagaagtcatttgaaaaagaagctgaacaaaataaacactcttaaggagacgatccagaagggtagtgaggacattgatcacctgaaaaaagctgaggagaactgtctccagactgtgaacgagttgatggcaaaacagcaacaattaaaagacatccgggtgacccagaatagtagtgcagagaaggtccagactcaaatcgaggaggagcggaaaaagttcctcgcagtcgaccgggaggtaggaaagctccagaaggaggtggtgtctatccaaaccagccttgagcagaagcgtctggagaagcacaatctgttgttggactgcaaggtgcaagatattgagattatcctgctctccggcagcctggatgatatcatcgaagtcgaaatgggaaccgaggccgaatctactcaggctacaattgacatctacgaaaaggaagaggcgtttgaaattgattattcgtcgctgaaggaagacctgaaagccctacagtcagatcaggagatcgaggctcacctgcgccttttactgcagcaagtggccagccaagaggacatcctcctcaaaactgcagcccctaacctgagagcgctcgagaacctgaaaacggtccgagataaattccaagaatcaactgatgctttcgaggcatctagaaaagaggcccgtctctgtcgccaggagttcgagcaagttaagaagagacgctacgacttgttcacgcaatgcttcgagcacgtttctatatccatcgaccaaatctacaagaagctatgccggaataactcggcccaagcattcctgtccccagaaaacccggaagagccctatttggaggggatcagctacaattgtgtagccccaggcaagagattcatgccgatggacaacttgtcaggtggcgagaagtgtgtggctgccttagccctcctatttgctgttcatagctttcggccagctccttttttcgtcttagatgaagtggatgcagccctggacaacacaaacattggcaaggtgtcatcatacattaaggaacagacacaggatcagttccagatgattgtcataagccttaaggaggagttctattctcgtgcagatgcattgattggaatatacccggaatatgacgactgtatgtttagtcgggtcctgactttggatctttcccaatatccagacactgagggacaggaatcttcaaagcgacatggcgaaagccggtag

SEQ ID NO: 242368 - DNA, 3708 bp, Artificial Sequence
  derived and/or modified sequence
atggcccacctggagctgctgctggtggagaacttcaagagctggagaggcagacaggtgatcggccccttcagaagattcacctgcatcatcggccccaacggcagcggcaagagcaacgtgatggacgccctgagcttcgtgatgggcgagaagatcgccaacctgagagtgaagaacatccaggagctgatccacggcgcccacatcggcaagcccatcagcagcagcgccagcgtgaagatcatctacgtggaggagagcggcgaggagaagaccttcgccagaatcatcagaggcggctgcagcgagttcagattcaacgacaacctggtgagcagaagcgtgtacatcgccgagctggagaagatcggcatcatcgtgaaggcccagaactgcctggtgttccagggcaccgtggagagcatcagcgtgaagaagcccaaggagagaacccagttcttcgaggagatcagcaccagcggcgagctgatcggcgagtacgaggagaagaagagaaagctgcagaaggccgaggaggacgcccagttcaacttcaacaagaagaagaacatcgccgccgagagaagacaggccaagctggagaaggaggaggccgagagataccagagcctgctggaggagctgaagatgaacaagatccagctgcagctgttccagctgtaccacaacgagaagaagatccacctgctgaacaccaagctggagcacgtgaacagagacctgagcgtgaagagagagagcctgagccaccacgagaacatcgtgaaggccagaaagaaggagcacggcatgctgaccagacagctgcagcagaccgagaaggagctgaagagcgtggagaccctgctgaaccagaagagaccccagtacatcaaggccaaggagaacaccagccaccacctgaagaagctggacgtggccaagaagagcatcaaggacagcgagaagcagtgcagcaagcaggaggacgacatcaaggccctggagaccgagctggccgacctggacgccgcctggagaagcttcgagaagcagatcgaggaggagatcctgcacaagaagagagacatcgagctggaggccagccagctggacagatacaaggagctgaaggagcaggtgagaaagaaggtggccaccatgacccagcagctggagaagctgcagtgggagcagaagaccgacgaggagagactggccttcgagaagagaagacacggcgaggtgcagggcaacctgaagcagatcaaggagcagatcgaggaccacaagaagagaatcgagaagctggaggagtacaccaagacctgcatggactgcctgaaggagaagaagcagcaggaggagaccctggtggacgagatcgagaagaccaagagcagaatgagcgagttcaacgaggagctgaacctgatcagaagcgagctgcagaacgccggcatcgacacccacgagggcaagagacagcagaagagagccgaggtgctggagcacctgaagagactgtaccccgacagcgtgttcggcagactgttcgacctgtgccaccccatccacaagaagtaccagctggccgtgaccaaggtgttcggcagattcatcaccgccatcgtggtggccagcgagaaggtggccaaggactgcatcagattcctgaaggaggagagagccgagcccgagaccttcctggccctggactacctggacatcaagcccatcaacgagagactgagagagctgaagggctgcaagatggtgatcgacgtgatcaagacccagttcccccagctgaagaaggtgatccagttcgtgtgcggcaacggcctggtgtgcgagaccatggaggaggccagacacatcgccctgagcggccccgagagacagaagaccgtggccctggacggcaccctgttcctgaagagcggcgtgatcagcggcggcagcagcgacctgaagtacaaggccagatgctgggacgagaaggagctgaagaacctgagagacagaagaagccagaagatccaggagctgaagggcctgatgaagaccctgagaaaggagaccgacctgaagcagatccagaccctgatccagggcacccagaccagactgaagtacagccagaacgagctggagatgatcaagaagaagcacctggtggccttctaccaggagcagagccagctgcagagcgagctgctgaacatcgagagccagtgcatcatgctgagcgagggcatcaaggagagacagagaagaatcaaggagttccaggagaagatcgacaaggtggaggacgacatcttccagcacttctgcgaggagatcggcgtggagaacatcagagagttcgagaacaagcacgtgaagagacagcaggagatcgaccagaagagactggagttcgagaagcagaagaccagactgaacgtgcagctggagtacagcagaagccacctgaagaagaagctgaacaagatcaacaccctgaaggagaccatccagaagggcagcgaggacatcgaccacctgaagaaggccgaggagaactgcctgcagaccgtgaacgagctgatggccaagcagcagcagctgaaggacatcagagtgacccagaacagcagcgccgagaaggtgcagacccagatcgaggaggagagaaagaagttcctggccgtggacagagaggtgggcaagctgcagaaggaggtggtgagcatccagaccagcctggagcagaagagactggagaagcacaacctgctgctggactgcaaggtgcaggacatcgagatcatcctgctgagcggcagcctggacgacatcatcgaggtggagatgggcaccgaggccgagagcacccaggccaccatcgacatctacgagaaggaggaggccttcgagatcgactacagcagcctgaaggaggacctgaaggccctgcagagcgaccaggagatcgaggcccacctgagactgctgctgcagcaggtggccagccaggaggacatcctgctgaagaccgccgcccccaacctgagagccctggagaacctgaagaccgtgagagacaagttccaggagagcaccgacgccttcgaggccagcagaaaggaggccagactgtgcagacaggagttcgagcaggtgaagaagagaagatacgacctgttcacccagtgcttcgagcacgtgagcatcagcatcgaccagatctacaagaagctgtgcagaaacaacagcgcccaggccttcctgagccccgagaaccccgaggagccctacctggagggcatcagctacaactgcgtggcccccggcaagagattcatgcccatggacaacctgagcggcggcgagaagtgcgtggccgccctggccctgctgttcgccgtgcacagcttcagacccgcccccttcttcgtgctggacgaggtggacgccgccctggacaacaccaacatcggcaaggtgagcagctacatcaaggagcagacccaggaccagttccagatgatcgtgatcagcctgaaggaggagttctacagcagagccgacgccctgatcggcatctaccccgagtacgacgactgcatgttcagcagagtgctgaccctggacctgagccagtaccccgacaccgagggccaggagagcagcaagagacacggcgagagcagatag

SEQ ID NO: 242369 - protein, 271 aa, Artificial Sequence
  derived and/or modified sequence
MISAHCNLHLPGSSDSPASASQVAGITGRLPTLQTVRYGSKAVTRHRRVMHFQRQKLMAVTEYIPPKPAIHPSCLPSPPSPPQEEIGLIRLLRREIAAVFQDNRMIAVCQNVALSAEDKLLMRHQLRKHKILMKVFPNQVLKPFLEDSKYQNLLPLFVGHNMLLVSEEPKVKEMVRILRTVPFLPLLGGCIDDTILSRQGFINYSKLPSLPLVQGELVGGLTCLTAQTHSLLQHQPLQLTTLLDQYIREQREKDSVMSANGKPDPDTVPDS

SEQ ID NO: 242370 - DNA, 816 bp, Artificial Sequence
  derived and/or modified sequence
atgatttcagcacactgcaacctccatttaccaggttcatccgacagccctgccagcgcaagccaggttgctgggatcaccggcaggctcccgacacttcagactgtccggtacggctccaaagctgtcacgcgacacaggagggtgatgcatttccagcgacagaaactgatggctgtgacagaatatatcccacccaaaccagccatacaccccagctgtttacccagcccacccagtcctccacaggaagaaattggtctcatcaggctgttgcgcagggagatagcagcggtgtttcaggataataggatgattgccgtctgtcaaaatgtcgccctgtctgccgaggataaactcctgatgcgccatcagttgcgtaaacataaaatcctgatgaaagtgttcccaaatcaggtgctaaagcccttcttggaagactcgaaatatcaaaacctgctccccttgttcgtgggtcataatatgctactagtctccgaggagcctaaggtcaaggaaatggtgcggatccttagaactgtccccttcctgccgctgctgggcgggtgcatagatgacacaatattatccaggcaaggctttataaactatagcaagctaccttctctccctctagttcagggcgagctcgtgggcggtctgacatgtctaaccgctcagacccatagtctgcttcagcatcaaccgctgcagctcacaaccctgctagaccagtacatccgggagcagcgagaaaaagacagtgttatgagtgcgaatggtaagccggaccctgatacggtcccggactcatag

SEQ ID NO: 242371 - DNA, 816 bp, Artificial Sequence
  derived and/or modified sequence
atgatttcagcacattgcaacctgcacctcccggggtcttcagacagccccgcttccgcctcacaggtagccggtatcactggacgcctacccaccctccagaccgttcggtacgggtccaaggctgtgacacgccatagaagggtgatgcactttcagcggcaaaaattgatggcagttactgagtatattcccccaaagccagccattcatccgtcatgtctgcccagtcccccgagtccaccccaggaggaaattggactcattcggttgctgaggagggagatcgcagccgtctttcaggacaacagaatgatcgcagtctgtcaaaatgtggccttgtctgctgaggacaaacttcttatgagacatcagctgcgtaaacacaagatcctgatgaaggtattcccgaatcaagttctgaagccgttcctggaggattcaaagtatcaaaatctgttgcccctcttcgtcgggcataacatgctgctcgttagcgaagagccaaaggtcaaagaaatggtgcgcatcctcaggaccgtgccattcctgccgcttctcggcggctgcatagacgacaccattctctcccgccagggcttcattaattacagcaagctgccctcattgccactcgtccagggagagctagtgggaggcttgacatgcttaactgcgcagacacatagcctccttcagcatcagccactgcagttgacgacactattagatcagtacatccgggagcagagagagaaggatagcgtgatgtctgctaacggaaagccagatccagataccgtcccggactcctag

SEQ ID NO: 242372 - DNA, 816 bp, Artificial Sequence
  derived and/or modified sequence
atgatcagcgcccactgcaacctgcacctgcccggcagcagtgacagccctgccagcgccagccaggtggccggcatcaccggccgcctgcccaccctgcagacagtgcgctatggcagcaaggctgtgaccaggcacagaagagtgatgcacttccagaggcagaagctgatggctgtgacagagtacatcccccccaagccagccatccaccccagctgcctgcccagcccccccagccccccccaggaggagatcggcctcatccggctgctgcggcgggagattgctgctgtgttccaggacaacaggatgattgctgtgtgccagaatgtggccctgtctgctgaggacaagctgctgatgaggcaccagctgaggaagcacaagatcctgatgaaggtgttccccaaccaggtgctgaagcccttcctggaggacagcaagtaccagaacctgctgcccctgtttgtgggccacaacatgctgctggtgtctgaggagcccaaggtgaaggagatggtgcgcatcctgaggacagtgcccttcctgcccctgctgggcggctgcattgatgacaccatcctgagccggcagggcttcatcaactacagcaagctgcccagcctgcccctggtgcagggcgagctggtgggcggcctgacctgcctgacagcccagacccacagcctgctgcagcaccagcccctgcagctgaccaccctgctggaccagtacatccgggagcagcgggagaaggacagcgtgatgtctgccaacgggaagccagaccctgacacagtgcctgacagctag

SEQ ID NO: 242373 - DNA, 2013 bp, Artificial Sequence
  derived and/or modified sequence
caagtgagctgcccaccttggcctcccaaagtgttgggattacaggcgtgagccaccacacccagcaaaatttctaacaagctctcaaatgatgctgatgttgctggttggggtggaggtggggcataccttgagagccactagattagaccaggggttggcgtattatggcagggccagtcactgtgttttataaaattctattggtacatagtttctgctgtctctttaaatattgtctgtggctgcttttggcagagttgagcattagagacagattacatgggccccaaacttaaaatatttactgtttgaccattttaagaaaaagtttatttaaccttatcccctttttctttctctctctctctctctctttccttccttccttccttccttctttttttttctgagacggagtcttactctgtgcccaggctagagtgcagtggcatgatctcggctcactgcaacctccacctcccgggttcaagcgattctcctgcctcagcctctcaagtagctgggattacaggccggctgcctaccctccagactgtccgctatggctccaaggctgttacccgccaccgtcgtgtgatgcactttcagcggcagaagctgatggctgtgactgaatatatccccccgaaaccagccatccacccatcatgcctgccatctcctcccagccccccacaggaggagataggcctcatcaggcttctccgccgggagatagcagcagttttccaggacaaccgaatgatagccgtctgccagaatgtggctctgagtgcagaggacaagcttcttatgcgacaccagctgcggaaacacaagatcctgatgaaggtcttccccaaccaggtcctgaagcccttcctggaggattccaagtaccaaaatctgctgcccctttttgtggggcacaacatgctgctggtcagtgaagagcccaaggtcaaggagatggtacggatcttaaggactgtgccattcctgccgctgctaggtggctgcattgatgacaccatcctcagcaggcagggctttatcaactactccaagctccccagcctgcccctggtgcagggggagcttgtaggaggcctcacctgcctcacagcccagacccactccctgctccagcaccagcccctccagctgaccaccctgttggaccagtacatcagagagcaacgcgagaaggattctgtcatgtcggccaatgggaagccagatcctgacactgttccggactcgtagccagcctgtttagccagccctgcgcataaatacactctgcgttattggctgtgctctcctcaatgggacatgtggaagaacttggggtcggggagtgtgtttgtcacttggttttcactagtaatgatattgtcaggtatagggccacttggagatgcagaggattccatttcagatgtcagtcaccggcttcgtccttagttttcccaacttgggacgtgataggagcaaagtctctccattctccaggtccaaggcagagatcctgaaaagatagggctattgtcccctgcctccttggtcactgcctcttgctgcacgggctcctgagcccacccccttggggcacaacctgccactgccacagtagctcaaccaagcagttgtgctgagaatggcacctggtgagagcctgctgtgtgccaggctttgtgctgagtgctgtacatgtattagttcctttactgctgaccacattgtacccatttcacagagaaggagcagagaaattaagtggcttgctcaaggtcatgcagttagtaagtggcagaacagggacttgaaccaagccctctgctctgaagaccgcgtcctgaatttcttcactagagcttcctcatcaggttacccagaagtgggtcccatccaccatccaggtgtgcttggatgttagttctccaccctcgaggtgtacgctgtgaaaagtttgggagcactgctttataataaaatgaaatatattct

SEQ ID NO: 242374 - DNA, 1622 bp, Artificial Sequence
  derived and/or modified sequence
ttccgtccattcttccggtggagatggctgcggccgtggcggggatgctgcgagggggtctcctgccccaggcgggctagagtgcagtggcatgatctcggctcactgcaacctccacctcccgggttcaagcgattctcctgcctcagcctctcaagtagctgggattacaggccggctgcctaccctccagactgtccgctatggctccaaggctgttacccgccaccgtcgtgtgatgcactttcagcggcagaagctgatggctgtgactgaatatatccccccgaaaccagccatccacccatcatgcctgccatctcctcccagccccccacaggaggagataggcctcatcaggcttctccgccgggagatagcagcagttttccaggacaaccgaatgatagccgtctgccagaatgtggctctgagtgcagaggacaagcttcttatgcgacaccagctgcggaaacacaagatcctgatgaaggtcttccccaaccaggtcctgaagcccttcctggaggattccaagtaccaaaatctgctgcccctttttgtggggcacaacatgctgctggtcagtgaagagcccaaggtcaaggagatggtacggatcttaaggactgtgccattcctgccgctgctaggtggctgcattgatgacaccatcctcagcaggcagggctttatcaactactccaagctccccagcctgcccctggtgcagggggagcttgtaggaggcctcacctgcctcacagcccagacccactccctgctccagcaccagcccctccagctgaccaccctgttggaccagtacatcagagagcaacgcgagaaggattctgtcatgtcggccaatgggaagccagatcctgacactgttccggactcgtagccagcctgtttagccagccctgcgcataaatacactctgcgttattggctgtgctctcctcaatgggacatgtggaagaacttggggtcggggagtgtgtttgtcacttggttttcactagtaatgatattgtcaggtatagggccacttggagatgcagaggattccatttcagatgtcagtcaccggcttcgtccttagttttcccaacttgggacgtgataggagcaaagtctctccattctccaggtccaaggcagagatcctgaaaagatagggctattgtcccctgcctccttggtcactgcctcttgctgcacgggctcctgagcccacccccttggggcacaacctgccactgccacagtagctcaaccaagcagttgtgctgagaatggcacctggtgagagcctgctgtgtgccaggctttgtgctgagtgctgtacatgtattagttcctttactgctgaccacattgtacccatttcacagagaaggagcagagaaattaagtggcttgctcaaggtcatgcagttagtaagtggcagaacagggacttgaaccaagccctctgctctgaagaccgcgtcctgaatttcttcactagagcttcctcatcaggttacccagaagtgggtcccatccaccatccaggtgtgcttggatgttagttctccaccctcgaggtgtacgctgtgaaaagtttgggagca

SEQ ID NO: 242375 - DNA, 816 bp, Artificial Sequence
  derived and/or modified sequence
atgatcagcgcccactgcaacctgcacctgcccggcagcagcgactctcccgcctccgccagtcaggtagcaggaatcacggggaggctgcccaccctccagactgtccgatacggatcgaaggctgtgacacgccatcggcgcgttatgcattttcagcggcaaaaactgatggccgtcactgaatacatccctccgaaacctgccatccatccctcttgtttgccttcgcccccaagtcctccacaagaagagattggcttgattaggctgctgcgccgggagattgccgcggtttttcaagacaacaggatgattgctgtgtgtcagaacgtggctctgtctgcggaagacaaactcctgatgcgccaccagctccgcaagcacaagattcttatgaaggtgtttccaaaccaggtgctgaaacccttcctggaggactctaagtaccaaaatctactccccctgtttgttgggcataacatgctgcttgtgtctgaggagccaaaagtgaaagaaatggtgcgaatcctacgcacggtgcccttcctgccgctcctgggcggatgtattgatgacactatcctttcgaggcagggttttattaattattccaaactgccttccttaccgctggttcagggcgagctggtgggaggattaacctgcttgacagcccagactcatagtctcctgcagcaccagccgctgcagctcactaccctcctggatcagtacatccgagaacagcgagagaaggacagcgtcatgagcgccaatggaaagcccgacccagacaccgtgccggactcatag

SEQ ID NO: 242376 - DNA, 816 bp, Artificial Sequence
  derived and/or modified sequence
atgatcagcgcccactgcaacctgcacctgcccggcagcagcgacagtccagcctccgcgtcccaggtggcagggataaccggcagactgccaaccctgcagacggtgagatatggtagcaaagccgtaaccagacacaggagggtgatgcatttccagcgtcaaaagctgatggcagtgaccgagtatattccccctaagcccgccattcacccatcttgcctgccaagccccccatcaccaccccaagaggaaataggccttattcggttactcaggagggagatcgccgctgtgttccaggacaatcgcatgattgccgtttgccagaacgtagctttatcagccgaagacaagctgttgatgaggcaccagttgagaaagcacaagattttgatgaaggtcttccccaaccaggtgctgaagccattcctggaagattccaagtaccagaacctcctgcccctttttgtgggacacaacatgctcctcgtgagtgaagaaccaaaagtgaaagagatggtcaggatcctcaggactgtcccgtttttgcccttgctgggcggttgtatcgacgatacgatcctgtcccgtcaaggcttcattaactacagtaaactcccatccctgccattggtccagggggagttggtgggtggattaacctgtttaaccgcacagacacacagcctattgcagcaccagcccctgcagctgactacactcctggatcagtacatccgggagcaacgggagaaagacagcgtcatgtcagccaacggcaaacctgatcctgatactgtgccggattcctag

SEQ ID NO: 242377 - DNA, 816 bp, Artificial Sequence
  derived and/or modified sequence
atgatcagcgctcattgcaacctccacttgcctgggtccagtgacagtcccgcttctgcttcacaggtggccggtatcaccggaaggttgcctacgctccagactgtacgctatggcagcaaagccgtcacgagacaccgcagagtcatgcactttcaaagacaaaagcttatggctgttactgagtatatccccccaaaacccgctattcacccatcttgcttacccagccctccttccccacctcaagaagagataggacttatccggctactgaggagggagatcgccgcagtatttcaggataataggatgatagccgtctgtcaaaacgttgctttgtcagccgaagacaaattgttgatgaggcaccaacttagaaagcataagatactgatgaaggtgttccctaaccaggtcctgaaaccctttctagaagattctaaatatcagaatctgctaccgctcttcgtgggccataatatgttgctggtgtccgaggaacccaaggttaaggaaatggtgcggattctaaggaccgtcccattcctgccgttgttaggaggttgtattgatgataccatcctcagcaggcagggatttattaactattctaaactccctagtttacccctcgtccagggcgagctggtcggtggactcacatgtctgacagctcagacgcactctttactgcagcaccagcctctgcaattgaccacactccttgatcagtatattagagaacaacgggaaaaggacagcgtgatgtctgccaatggtaagcctgatcccgacactgtgcccgacagctag

SEQ ID NO: 242378 - DNA, 816 bp, Artificial Sequence
  derived and/or modified sequence
atgatcagcgctcactgtaatctccatttaccgggatcctctgacagtcctgcatcagctagccaggtcgctggcattactggcaggctcccaacactccagactgtccggtacgggtcaaaggcggtcacgcgtcaccgcagggtaatgcactttcagcgccagaagttaatggcagtaactgagtatattccacccaagccagcaattcacccctcatgcttgccgtctccacccagcccaccgcaggaagagataggccttatcagactgcttaggagggaaatcgcggcagtctttcaggataatcggatgatcgcggtgtgccaaaacgtcgccctatcggcagaagacaaattgttgatgcgccaccagctccgtaagcacaaaattttaatgaaggtctttcctaatcaagtgctgaaaccttttctggaggacagtaagtaccagaatttactcccactgtttgtggggcacaatatgcttttggtgtctgaggagcctaaggtcaaagaaatggtgcgaatcctgcggacagtcccctttctaccactcctggggggttgcatagatgatacaatcctaagcaggcagggcttcatcaattattcaaagctgccatccctgcctttagtccagggcgagctggtcggaggactgacctgccttacagctcagacacatagcctgcttcagcaccagcccttacagcttacaactctcctggaccaatacattcgggagcagagggagaaagactccgtcatgagcgccaacggtaaacccgacccggatactgtgcctgatagttag

SEQ ID NO: 242379 - DNA, 816 bp, Artificial Sequence
  derived and/or modified sequence
atgatcagcgcccactgcaacctgcacctgcccggcagcagcgacagccccgccagcgccagccaggtggccggcatcaccggcagactgcccaccctgcagaccgtgagatacggcagcaaggccgtgaccagacacagaagagtgatgcacttccagagacagaagctgatggccgtgaccgagtacatcccccccaagcccgccatccaccccagctgcctgcccagcccccccagccccccccaggaggagatcggcctgatcagactgctgagaagagagatcgccgccgtgttccaggacaacagaatgatcgccgtgtgccagaacgtggccctgagcgccgaggacaagctgctgatgagacaccagctgagaaagcacaagatcctgatgaaggtgttccccaaccaggtgctgaagcccttcctggaggacagcaagtaccagaacctgctgcccctgttcgtgggccacaacatgctgctggtgagcgaggagcccaaggtgaaggagatggtgagaatcctgagaaccgtgcccttcctgcccctgctgggcggctgcatcgacgacaccatcctgagcagacagggcttcatcaactacagcaagctgcccagcctgcccctggtgcagggcgagctggtgggcggcctgacctgcctgaccgcccagacccacagcctgctgcagcaccagcccctgcagctgaccaccctgctggaccagtacatcagagagcagagagagaaggacagcgtgatgagcgccaacggcaagcccgaccccgacaccgtgcccgacagctag

SEQ ID NO: 242380 - protein, 77 aa, Artificial Sequence
  derived and/or modified sequence
MGLCFPCPGESAPPTPDLEEKRAKLAEAAERRQKEAASRGILDVQSVQEKRKKKEKIEKQIATSGPPPEGGLRWTVS

SEQ ID NO: 242381 - DNA, 234 bp, Artificial Sequence
  derived and/or modified sequence
atgggcctgtgcttcccctgccccggcgagagcgccccccccacccccgacctggaggagaagagagccaagctggccgaggccgccgagagaagacagaaggaggccgccagcagaggcatcctggacgtgcagagcgtgcaggagaagagaaagaagaaggagaagatcgagaagcagatcgccaccagcggccccccccccgagggcggcctgagatggaccgtgagctag

SEQ ID NO: 242382 - DNA, 234 bp, Artificial Sequence
  derived and/or modified sequence
atgggtttgtgttttccctgccctggcgagtccgcgcctccgactcccgatctggaggaaaaacgtgctaaactcgctgaggcggctgagcgacgccagaaagaggccgcctcccgcgggattctagatgtgcaatcagtacaggagaaaaggaaaaaaaaagaaaaaattgagaagcagattgctactagcggtccacctcctgagggaggactcagatggaccgtctcttag

SEQ ID NO: 242383 - DNA, 234 bp, Artificial Sequence
  derived and/or modified sequence
atgggcctgtgcttcccctgccctggagagagcgccccacccaccccagacctggaggagaagagggccaagctggccgaggccgctgagcggcggcagaaggaggccgccagccggggcatcctggatgtgcagagcgtgcaggagaagaggaagaagaaggagaagattgagaagcagatcgccaccagcggccccccacctgagggcggcctgcgctggacagtgtcctag

SEQ ID NO: 242384 - DNA, 234 bp, Artificial Sequence
  derived and/or modified sequence
atgggcctgtgcttcccctgccccggcgagagcgccccccccacccccgacctggaggaaaagcgggctaaactagctgaggctgccgaacgaagacaaaaggaggctgctagccggggcattctggatgttcagtccgtacaggagaagcggaaaaagaaagagaagatcgaaaagcagatagccacctctggtcctcctcctgagggcgggctacgctggaccgtctcttag

SEQ ID NO: 242385 - DNA, 234 bp, Artificial Sequence
  derived and/or modified sequence
atgggtttgtgctttccctgtccgggtgaatcggcccctcctactccagacctggaggaaaaaagggccaagctggccgaggcagcagaaaggaggcagaaggaggccgcttctcggggaatcctggatgtgcaaagtgtccaggaaaagaggaagaagaaggagaagattgaaaaacaaatcgctaccagcgggcctccgcctgaggggggactgagatggacggtatcatag

SEQ ID NO: 242386 - protein, 125 aa, Artificial Sequence
  derived and/or modified sequence
MARSATLAAAALALCLLLAPPGLAWYKPAAGHSSYSVGRAAGLLSGLRRSPYARRSQPYRGAEPPGGAGASPELQLHPRLRSLAVCVQDVAPNLQRCERLPDGRGTYQCKANVFLSLRAADCLAA

SEQ ID NO: 242387 - DNA, 378 bp, Artificial Sequence
  derived and/or modified sequence
atggcccgaagtgccaccctggccgctgctgcgctggcactgtgcctgctgcttgcccctcccggactcgcctggtataaaccagctgctgggcattcatcctactcagtcggcagagcggcaggactgctctccggactgcggaggagtccgtacgccagaaggtcccagccctatcgcggagccgaacctccgggtggtgccggagcgtcgcctgagctgcaactacatccaagattacggtctctcgccgtgtgcgtgcaggacgtcgccccaaatctccagaggtgcgaacggctgccggacggccgaggcacctatcagtgcaaggccaacgtctttctgtctctccgggcagctgactgtctggctgcatag

SEQ ID NO: 242388 - DNA, 378 bp, Artificial Sequence
  derived and/or modified sequence
atggcccgatcagctacactggccgcggcggccctagcgctttgtctgctcctggcacctcccggactggcatggtataaaccagccgcaggccacagttcctacagcgtaggtagagccgccggactgctgtctggacttcgtcgttccccatacgcccgcaggagtcaaccgtaccgcggagcagaaccacctgggggcgccggcgcttcccctgaattacagctgcacccacgattacgctctctcgctgtgtgcgttcaggacgtggcgcctaatcttcaaagatgcgagcgactgcccgatggccgtggtacttatcaatgcaaagccaacgttttcctgtcactgagagcagcagattgcctagccgcctag

SEQ ID NO: 242389 - DNA, 378 bp, Artificial Sequence
  derived and/or modified sequence
atggccagaagcgccaccctggccgccgccgccctggccctgtgcctgctgctggccccccccggcctggcctggtacaagcccgccgccggccacagcagctacagcgtgggcagagccgccggcctgctgagcggcctgagaagaagcccctacgccagaagaagccagccctacagaggcgccgagccccccggcggcgccggcgccagccccgagctgcagctgcaccccagactgagaagcctggccgtgtgcgtgcaggacgtggcccccaacctgcagagatgcgagagactgcccgacggcagaggcacctaccagtgcaaggccaacgtgttcctgagcctgagagccgccgactgcctggccgcctag

SEQ ID NO: 242390 - DNA, 616 bp, Artificial Sequence
  derived and/or modified sequence
ccctcgccgcagatataaggcggcccaggcggtggctgctccgagcccggacgccgccgcccaccagtcagccggcgtccccatggcccggtccgcgacactggcggccgccgccctggcgctgtgcctgctgctggcgccgcctggcctcgcgtggtacaagccagcggcggggcacagctcctactcggtgggccgcgccgcggggctgctgtccggcctccgcaggtccccgtacgcgcggcgctcccagccctacagaggggcggaacccccgggcggggccggcgcctccccggagctgcaactgcaccccaggctgcggagcctcgctgtgtgcgtccaggacgtcgccccaaacctgcagaggtgcgagcggctccccgacggccgcgggacctaccagtgcaaggcgaacgtcttcctgtccctgcgcgcagccgactgcctcgccgcctgagcccggacctctcctggcaccgctgggggccccccgcccccaccgtcccactcggtgaccccaggcccctccggcgcgggatggcgccccaggtctcccctactccgctcaccccgcagttaatggcaaacgaataaataaatgaggcggcctcgg

SEQ ID NO: 242391 - DNA, 378 bp, Artificial Sequence
  derived and/or modified sequence
atggcccggtctgctacccttgccgctgctgccctcgccctgtgtttgctgctagctccaccaggactggcctggtacaagccagcagccgggcatagttcttatagcgttggccgcgcggccggcctgctcagcgggctgagaagaagcccttacgctcggcgctctcaaccatatagaggcgccgaaccacccggcggagcgggagcaagccccgagctgcaactgcatccacggctgcgctctctggccgtatgtgttcaggatgtggcacccaacctgcagaggtgcgagcggctccctgacggccggggcacataccagtgcaaagccaatgtgttcctgagcctcagagccgctgattgcctggccgcatag

SEQ ID NO: 242392 - DNA, 378 bp, Artificial Sequence
  derived and/or modified sequence
atggcccggagcgccaccctggccgccgccgccctggccctgtgcctgctgctggcccctcctggcctggcctggtacaagccagctgctggccacagcagctacagcgtgggccgggctgctggcctgctgagcggcctgcggcgcagcccctatgcccggcgcagccagccctacagaggagctgagcccccaggaggagctggggccagccctgagctgcagctgcacccccggctgcggagcctggccgtgtgtgtgcaggatgtggcccccaacctgcagagatgtgagcggctgcctgatggccggggcacctaccagtgcaaggccaacgtgttcctgagcctgcgggctgctgactgcctggccgcctag

SEQ ID NO: 242393 - DNA, 378 bp, Artificial Sequence
  derived and/or modified sequence
atggcccggagcgccaccctggccgccgccgccctggccctgtgccttttgcttgccccacccggactggcatggtataagcccgcagctggacacagcagctactcagtgggccgcgcagcaggcctgctatcaggattgcggcggtccccctatgcacggaggtctcagccatacagaggagctgagccccccggcggcgcaggggcctcccctgaattgcagctccatcccagactcaggagtttagcagtgtgcgtccaggatgtggcccctaatcttcagaggtgtgaaaggttgccggacggcaggggaacatatcagtgcaaagctaatgtgttcctgtcactgcgggccgccgattgcctagcagcctag

SEQ ID NO: 242394 - RNA, 378 nt, Artificial Sequence
  derived and/or modified sequence
auggcccgaucagcuacacuggccgcggcggcccuagcgcuuugucugcuccuggcaccucccggacuggcaugguauaaaccagccgcaggccacaguuccuacagcguagguagagccgccggacugcugucuggacuucgucguuccccauacgcccgcaggagucaaccguaccgcggagcagaaccaccugggggcgccggcgcuuccccugaauuacagcugcacccacgauuacgcucucucgcugugugcguucaggacguggcgccuaaucuucaaagaugcgagcgacugcccgauggccgugguacuuaucaaugcaaagccaacguuuuccugucacugagagcagcagauugccuagccgccuag

SEQ ID NO: 242395 - protein, 313 aa, Artificial Sequence
  derived and/or modified sequence
MAALTDLSFMYRWFKNCNLVGNLSEKYVFITGCDSGFGNLLAKQLVDRGMQVLAACFTEEGSQKLQRDTSYRLQTTLLDVTKSESIKAAAQWVRDKVGEQGLWALVNNAGVGLPSGPNEWLTKDDFVKVINVNLVGLIEVTLHMLPMVKRARGRVVNMSSSGGRVAVIGGGYCVSKFGVEAFSDSIRRELYYFGVKVCIIEPGNYRTAILGKENLESRMRKLWERLPQETRDSYGEDYFRIYTDKLKNIMQVAEPRVRDVINSMEHAIVSRSPRIRYNPGLDAKLLYIPLAKLPTPVTDFILSRYLPRPADSV

SEQ ID NO: 242396 - DNA, 942 bp, Artificial Sequence
  derived and/or modified sequence
atggctgcccttaccgacctttccttcatgtaccggtggtttaaaaactgcaacctggtcggcaacctgtctgagaaatatgtcttcatcaccggatgtgactctggctttggaaatctgctggctaagcagctcgtagacagaggaatgcaggtcttggccgcgtgcttcacagaggaaggcagtcagaagttgcagcgcgacactagctaccgcctgcagaccacactactcgacgttaccaagtcagagtccataaaggctgcagcacagtgggtgcgtgacaaagtcggggaacaaggcttgtgggccctagtgaacaacgccggagttgggctccctagtgggcctaatgagtggctgacaaaggatgatttcgtgaaagtgatcaacgttaatctcgtgggcttaattgaggtcactttgcacatgttgcccatggtgaagagggccagaggccgggttgtaaacatgagctcttcagggggacgggttgccgtgattggcggaggctattgcgtcagcaagtttggtgtggaagcttttagcgattcgatccgaagggaactgtactacttcggcgtcaaggtttgcattattgagcctggaaattacaggaccgccatcctcggaaaggagaatctggaatccagaatgcgtaagctgtgggagcgcctccctcaggagactagggactcatatggcgaggattacttcagaatctatacggacaagctgaaaaacataatgcaggtcgcagagcctagagtcagggacgtgattaactcgatggaacacgcaatagtgtcacgctcgcctcggattagatacaacccagggttggatgccaagctgctgtacattcctctggccaagctgccgactcccgttaccgattttattctctccagatacctgccgaggcccgccgacagcgtatag

SEQ ID NO: 242397 - DNA, 942 bp, Artificial Sequence
  derived and/or modified sequence
atggccgccctgacagacctgtccttcatgtaccgctggttcaagaactgcaacctggtgggcaacctgtctgagaagtatgtgttcatcaccggctgtgacagcggctttggaaacctgctggccaagcagctggtggaccggggcatgcaggtgctggccgcctgcttcacagaggagggcagccagaagctgcagagggacaccagctaccgcctgcagaccaccctgctggatgtgaccaagtctgagagcatcaaggctgctgcccagtgggtgcgggacaaggtgggggagcagggcctgtgggccctggtgaacaatgccggcgtgggcctgcccagcggccccaatgagtggctgaccaaggatgactttgtgaaggtgatcaacgtgaacctggtgggcctcatcgaggtgaccctgcacatgctgcccatggtgaagagggcccggggccgggtggtgaacatgagcagcagcggcggccgggtggccgtcatcggcggcggctactgtgtgtccaagtttggagtggaggccttcagtgacagcatcagaagagagctgtactactttggagtgaaggtgtgcatcatcgagcccggcaactacagaacagccatcctgggcaaggagaacctggagagcaggatgaggaagctgtgggagcggctgccccaggagacccgggacagctatggagaggactacttccgcatctacacagacaagctgaagaacatcatgcaggtggccgagccccgggtgagagatgtgatcaacagcatggagcacgccatcgtgagccgcagcccccgcatccgctacaaccctggcctggatgccaagctgctgtacatccccctggccaagctgcccacccctgtgacagacttcatcctgagccgctacctgcccaggcctgctgacagcgtgtag

SEQ ID NO: 242398 - DNA, 942 bp, Artificial Sequence
  derived and/or modified sequence
atggccgccctgaccgacctgagcttcatgtaccggtggttcaagaactgcaacttggtagggaacctgtctgagaaatatgtgttcattactgggtgtgattccggcttcggcaacttgctggccaaacaacttgtggaccggggaatgcaggtactcgcggcatgctttactgaagaggggtcccagaagctgcagcgcgatacctcttacaggctgcaaacaacgcttctggacgtgacaaagtcagagtccattaaggccgcagcccaatgggtcagggacaaagttggcgagcaggggctttgggctcttgtgaacaacgccggggtgggtctcccctcaggtcccaatgagtggcttacgaaagatgacttcgtgaaggtgattaacgtcaaccttgtgggactaatcgaagtgacactacacatgttacccatggtcaagcgcgcccgtggacgcgtcgtgaatatgtcatctagcggggggcgggtggccgtgatagggggcggctactgcgtttcaaagtttggtgttgaggcatttagcgattctattcggcgcgagttgtactacttcggagttaaagtttgcatcattgaacctggcaattatcgtacagcaatcttgggcaaggagaatttggaaagcagaatgcgcaagctttgggagagattgccgcaggagacccgcgatagctacggcgaggattacttcagaatttataccgataagctaaaaaacatcatgcaagtcgccgaacctagggtccgggatgtgataaacagtatggagcatgcaattgtctcaaggtctccccgcatcaggtacaacccaggcctggacgcaaaactgttatatattcctctcgccaagctccctacgcccgtgactgacttcatactatctcggtacctgccccgtcccgcggacagtgtatag

SEQ ID NO: 242399 - DNA, 942 bp, Artificial Sequence
  derived and/or modified sequence
atggcggctttaacagatttgtctttcatgtatcggtggtttaaaaactgtaacctggtgggcaatctgtcagagaaatatgtcttcatcactggttgtgactctggattcggcaatctccttgccaagcagttagtagatcggggaatgcaagtgcttgcagcttgctttaccgaggaagggtcccagaagcttcagcgcgatacttcataccgactgcagactactctgttagacgttacaaagtctgaaagcattaaggccgctgctcagtgggtaagagacaaagtgggagagcagggcttatgggcactcgtgaacaacgcaggcgtgggcctgccaagtggaccaaatgagtggctgactaaagacgattttgtgaaagttattaatgtcaatttggtaggcctgatagaagtgaccttgcacatgctccctatggtgaaaagagccagagggagagtggtgaatatgtcttccagtgggggaagggtcgccgtcattggcggaggctattgtgtgtctaagttcggggttgaagccttttcagattcaattcgtagggagctgtattatttcggcgtcaaggtctgcattatcgaacctggcaattacaggactgccatactcggaaaagaaaacttagaaagccgtatgagaaagctttgggaacgcctgcctcaggaaactcgggattcttacggcgaggactatttcagaatctataccgacaagcttaaaaatattatgcaggtggccgaaccaagggtccgagatgtgattaattctatggaacacgccatagtatcccgtagccccagaatacgctataatccaggtttggacgcaaaattgctctacatcccacttgctaaactgcctactcctgtcactgattttatattatcaagatatctgcctcgacctgcagactccgtttag

SEQ ID NO: 242400 - DNA, 1765 bp, Artificial Sequence
  derived and/or modified sequence
agatttgttgcaagctgtgggaggaaggagagttcttcttccaggtggtttcctgcagactgcctgctagggctcagaggaccagcttcttccctgctgtctcctgagcccagtccctcttggccatcacattccccttgccctatggcggccctcacagacctctcatttatgtatcgctggttcaagaactgcaatctggttggcaacctctcagagaagtacgtcttcatcacaggctgtgactctggcttcgggaacctgctggccaaacagctggttgatcggggcatgcaggtgctggctgcttgcttcactgaggagggatcccagaaacttcagcgggatacctcctatcggctgcagaccaccctactggatgtcaccaagagcgaaagcatcaaggcggcggcccagtgggtgagggacaaagtgggcgaacaaggcctctgggccctggtgaacaatgctggtgtgggcctgcccagtggtcccaacgaatggctgaccaaggatgactttgtgaaggtgattaatgtgaacctggtgggactgatcgaagtgacccttcacatgctgcccatggtcaagagagcccggggcagggttgtcaacatgtccagctctggtggtcgtgtggctgtcattggtggtggctactgcgtctccaagtttggcgttgaggccttctctgacagcataaggcgtgagctctactactttggggtgaaagtctgcatcattgagccagggaactatcggacagccattctcggcaaggagaacctggagtcacgcatgcgaaagctttgggagaggctgcctcaggagacccgggacagctacggagaggattatttccgcatctatactgacaagttaaaaaacataatgcaggtggcagagcccagagtcagagatgtcatcaacagcatggagcatgctattgtttcccggagccctcgcatccgctacaaccctggcctggatgccaaactcctctacatccctctggctaagttgcccacccctgtgacagatttcatcctaagccggtaccttccaaggccagcggacagtgtctaaactggggaggatcaatgggtcagtggagcctagaagtgggggaggaaggaaggaccgtggggtcacaaaaggtggtatcggttatcctgggggcattggctgcaaaggaagcttggctcagctgacacccactgctgtcgaatttaccagtaacttctaacagaaggtgaatgcctcttcccaccctctgggaccccacagaaacctgaggtggtctttgcaggttcagcgatctgcagcaatagctccaaggacgtctgtcacccaatcaggatacagctttttctggtcctggaaaagtcatggagaagaaaaccagctcctgtggaatcatgagcccctttcagttatcactgccactgagaaatactgtgggataatcttgcctccaggagaatctaaccaccttcctaatgggtccctcaatatgcataacttcattcacataacccattactgaagtatgcggtagggcagatagggagtgcaagattaaatcagacaaaagtttaaaatattttctttctttttagattcttctatctataggttattgggatccacatgaaataacattcatttatttaatcaccattaatttttcaaatatttattgagtgcctactacctaccgggcactttgtaggtgctgggggaatataaagatgattaaatcatg

SEQ ID NO: 242401 - DNA, 942 bp, Artificial Sequence
  derived and/or modified sequence
atggccgccctgaccgacctgagcttcatgtacagatggttcaagaactgcaacctggtgggcaacctgagcgagaagtacgtgttcatcaccggctgcgacagcggcttcggcaacctgctggccaagcagctggtggacagaggcatgcaggtgctggccgcctgcttcaccgaggagggcagccagaagctgcagagagacaccagctacagactgcagaccaccctgctggacgtgaccaagagcgagagcatcaaggccgccgcccagtgggtgagagacaaggtgggcgagcagggcctgtgggccctggtgaacaacgccggcgtgggcctgcccagcggccccaacgagtggctgaccaaggacgacttcgtgaaggtgatcaacgtgaacctggtgggcctgatcgaggtgaccctgcacatgctgcccatggtgaagagagccagaggcagagtggtgaacatgagcagcagcggcggcagagtggccgtgatcggcggcggctactgcgtgagcaagttcggcgtggaggccttcagcgacagcatcagaagagagctgtactacttcggcgtgaaggtgtgcatcatcgagcccggcaactacagaaccgccatcctgggcaaggagaacctggagagcagaatgagaaagctgtgggagagactgccccaggagaccagagacagctacggcgaggactacttcagaatctacaccgacaagctgaagaacatcatgcaggtggccgagcccagagtgagagacgtgatcaacagcatggagcacgccatcgtgagcagaagccccagaatcagatacaaccccggcctggacgccaagctgctgtacatccccctggccaagctgcccacccccgtgaccgacttcatcctgagcagatacctgcccagacccgccgacagcgtgtag

SEQ ID NO: 242402 - protein, 740 aa, Artificial Sequence
  derived and/or modified sequence
MMQESATETISNSSMNQNGMSTLSSQLDAGSRDGRSSGDTSSEVSTVELLHLQQQQALQAARQLLLQQQTSGLKSPKSSDKQRPLQELLPETKLCICGHSSGDGHPHNTFAVPVSVAMMTPQVITPQQMQQILQQQVLSPQQLQALLQQQQAVMLQQQQLQEFYKKQQEQLHLQLLQQQQQQQQQQQQQQQQQQQQQQQQQQQQQQQQQQQQQQQQHPGKQAKEQQQQQQQQQQLAAQQLVFQQQLLQMQQLQQQQHLLSLQRQGLISIPPGQAALPVQSLPQAGLSPAEIQQLWKEVTGVHSMEDNGIKHGGLDLTTNNSSSTTSSNTSKASPPITHHSIVNGQSSVLSARRDSSSHEETGASHTLYGHGVCKWPGCESICEDFGQFLKHLNNEHALDDRSTAQCRVQMQVVQQLEIQLSKERERLQAMMTHLHMRPSEPKPSPKPLNLVSSVTMSKNMLETSPQSLPQTPTTPTAPVTPITQGPSVITPASVPNVGAIRRRHSDKYNIPMSSEIAPNYEFYKNADVRPPFTYATLIRQAIMESSDRQLTLNEIYSWFTRTFAYFRRNAATWKNAVRHNLSLHKCFVRVENVKGAVWTVDEVEYQKRRSQKITGSPTLVKNIPTSLGYGAALNASLQAALAESSLPLLSNPGLINNASSGLLQAVHEDLNGSLDHIDSNGNSSPGCSPQPHIHSIHVKEEPVIAEDEDCPMSLVTTANHSPELEDDREIEEEPLSEDLE

SEQ ID NO: 242403 - protein, 432 aa, Artificial Sequence
  derived and/or modified sequence
MMQESATETISNSSMNQNGMSTLSSQLDAGSRDGRSSGDTSSEVSTVELLHLQQQQALQAARQLLLQQQTSGLKSPKSSDKQRPLQVPVSVAMMTPQVITPQQMQQILQQQVLSPQQLQALLQQQQAVMLQQQQLQEFYKKQQEQLHLQLLQQQQQQQQQQQQQQQQQQQQQQQQQQQQQQQQQQQQQQQQHPGKQAKEQQQQQQQQQQLAAQQLVFQQQLLQMQQLQQQQHLLSLQRQGLISIPPGQAALPVQSLPQAGLSPAEIQQLWKEVTGVHSMEDNGIKHGGLDLTTNNSSSTTSSNTSKASPPITHHSIVNGQSSVLSARRDSSSHEETGASHTLYGHGVCKWPGCESICEDFGQFLKHLNNEHALDDRSTAQCRVQMQVVQQLEIQLSKERERLQAMMTHLHMRPSEPKPSPKPVSAYCFINSK

SEQ ID NO: 242404 - DNA, 942 bp, Artificial Sequence
  derived and/or modified sequence
atgcaggaggccgacgccagcatcaagaccgccgagaccaagggcagaacctggaagtaccagaacatcgagcccggcggcggcccccagaccagcggcaagggcggcttcggcagcctggtgctggtgttcctgggccagagagtgggctgcaacgagaccggcagcatgaacctggagaagctgcagaccagacccaacatgaccatcttcaccagaaacaacatcgccaccaacttcagcagcagcagcagcagcagctacttcagccccccccccccccccgtgctgctgcccctgctgctgctgctgccccagctgttcagcagcagcagcagcagcttcttcttcagcttcagccccagcaccagccccctggtgagcccctgcttcttcagcagcagcagcagcttctgcttcagcgtgagcctgctgcccagcagcagccccaccagcatgaccaagttccccaaggccgtgaccaccaagatcaagaccgacaagagagacctgatcaagctgaagggcttctgcaccgccaaggagaccatcaacagaaccaacagacagcccatcgagtgggagaagatcttcaccaactacgccagcaacaagggcctgatcagcagaatctacaaggagctgggccagagcgacaagcagagacccaacaaccccatcaagaagtgggccaaggacatgaacagacacttcagcaaggaggacatccaggtggccaacaagcacgagaagatgctgagcaccagcctgatcatcggcaagatgcagatcaagaccaccgtgagataccacctgatgcccgccagaaaggccaccatcaagaagagcgagaacaacagatgctggcagggctgcagaggcaagggcaccttcacccactgctggagcaagtgcaagctgaagtgcaagtgcaagatgtag

SEQ ID NO: 242405 - DNA, 530 bp, Artificial Sequence
  derived and/or modified sequence
gcttattgagagtagcttttgttgttgctattgttgtataaataagaaaggaatttaaagaattatttcttagcaaacgtgtggcagatgctttcttcggcagctgtcgttctagaggggaagtcgcctggttcagcgacgaggttcccgtgtcagtggctatgatgacacctcaagttatcactccccagcaaatgcagcagatcctccagcaacaagtgctgagccctcagcagctccaggttctcctccagcagcagcaggccctcatgcttcaacagcagcagcttcaagagttttataaaaaacaacaggaacagttgcagcttcaacttttacaacaacaacatgctggaaaacagcctaaagagcaacagcaggtggctacccagcagttggcttttcagcagcagcttttacagatgcagcagttacagcagcagcacctcctgtctttgcagcgccaaggccttctgacaattcagcccgggcagcctgcccttccccttcaacctcttgctcaaggtatg

SEQ ID NO: 242406 - DNA, 1016 bp, Artificial Sequence
  derived and/or modified sequence
atattaaaatccagtaagtttcttgatcttgaggattattcctggagtactcttcgctccctggtgggcaggctttggccatgcaaggtgcgctaggtggcctggatcaaacaaataatagaagtctgttgaagctttgtcctgacctatcctggaagtagaagaatactctggagaaaggagcattgtaagcacaaagaataagattcctcaatcctgagagagagaattaaagtctaactctccaaatgtctactctaatgtgatgctgggattgaattttcctaggactccgtttcaaggttaattcgaaagtcttgtggaagatctggaagaaacaggtattaagtcatgatgcaggaatctgcgacagagacaataagcaacagttcaatgaatcaaaatggaatgagcactctaagcagccaattagatgctggcagcagagatggaagatcaagtggtgacaccagctctgaagtaagcacagtagaactgctgcatctgcaacaacagcaggctctccaggcagcaagacaacttcttttacagcagcaaacaagtggattgaaatctcctaagagcagtgataaacagagaccactgcaggtgcctgtgtcagtggccatgatgactccccaggtgatcacccctcagcaaatgcagcagatccttcagcaacaagtcctgtctcctcagcagctacaagcccttctccaacaacagcaggctgtcatgctgcagcagcaacaactacaagagttttacaagaaacagcaagagcagttacatcttcagcttttgcagcagcagcagcaacagcagcagcagcaacaacagcagcaacaacagcagcagcaacaacaacaacaacagcagcaacaacagcagcagcagcagcaacagcagcagcagcagcaacagcatcctggaaagcaagcgaaagagcagcagcagcagcagcagcagcaacagcaattggcagcccagcagcttgtcttccagcagcagcttct

SEQ ID NO: 242407 - DNA, 1412 bp, Artificial Sequence
  derived and/or modified sequence
aggtattaagtcatgatgcaggaatctgcgacagagacaataagcaacagttcaatgaatcaaaatggaatgagcactctaagcagccaattagatgctggcagcagagatggaagatcaagtggtgacaccagctctgaagtaagcacagtagaactgctgcatctgcaacaacagcaggctctccaggcagcaagacaacttcttttacagcagcaaacaagtggattgaaatctcctaagagcagtgataaacagagaccactgcaggtgcctgtgtcagtggccatgatgactccccaggtgatcacccctcagcaaatgcagcagatccttcagcaacaagtcctgtctcctcagcagctacaagcccttctccaacaacagcaggctgtcatgctgcagcagcaacaactacaagagttttacaagaaacagcaagagcagttacatcttcagcttttgcagcagcagcagcaacagcagcagcagcaacaacagcagcaacaacagcagcagcaacaacaacaacaacagcagcaacaacagcagcagcagcagcaacagcagcagcagcagcaacagcatcctggaaagcaagcgaaagagcagcagcagcagcagcagcagcaacagcaattggcagcccagcagcttgtcttccagcagcagcttctccagatgcaacaactccagcagcagcagcatctgctcagccttcagcgtcagggactcatctccattccacctggccaggcagcacttcctgtccaatcgctgcctcaagctggcttaagtcctgctgagattcagcagttatggaaagaagtgactggagttcacagtatggaagacaatggcattaaacatggagggctagacctcactactaacaattcctcctcgactacctcctccaacacttccaaagcatcaccaccaataactcatcattccatagtgaatggacagtcttcagttctaagtgcaagacgagacagctcgtcacatgaggagactggggcctctcacactctctatggccatggagtttgcaaatggccaggctgtgaaagcatttgtgaagattttggacagtttttaaagcaccttaacaatgaacacgcattggatgaccgaagcactgctcagtgtcgagtgcaaatgcaggtggtgcaacagttagaaatacagctttctaaagaacgcgaacgtcttcaagcaatgatgacccacttgcacatgcgaccctcagagcccaaaccatctcccaaacctgtaagtgcatattgctttataaacagtaaatagctctaccaatgtaacagactaagaaaatgaacaatttagtgacagttagaaaacaatgagtgtgatgaaaaatacggcaataaaatgaaagtaaaatgtaa

SEQ ID NO: 242408 - DNA, 1472 bp, Artificial Sequence
  derived and/or modified sequence
atgcaggaatctgcgacagagacaataagcaacagttcaatgaatcaaaatggaatgagcactctaagcagccaattagatgctggcagcagagatggaagatcaagtggtgacaccagctctgaagtaagcacagtagaactgctgcatctgcaacaacagcaggctctccaggcagcaagacaacttcttttacagcagcaaacaagtggattgaaatctcctaagagcagtgataaacagagaccactgcaggaattgcttccagaaacaaaattatgtatctgtggccactcttctggtgatgggcatcctcacaacacatttgcagtgcctgtgtcagtggccatgatgactccccaggtgatcacccctcagcaaatgcagcagatccttcagcaacaagtcctgtctcctcagcagctacaagcccttctccaacaacagcaggctgtcatgctgcagcagcaacaactacaagagttttacaagaaacagcaagagcagttacatcttcagcttttgcagcagcagcagcaacagcagcagcagcaacaacagcagcaacaacagcagcagcaacaacaacaacaacagcagcaacaacagcagcagcagcagcaacagcagcagcagcagcaacagcatcctggaaagcaagcgaaagagcagcagcagcagcagcagcagcaacagcaattggcagcccagcagcttgtcttccagcagcagcttctccagatgcaacaactccagcagcagcagcatctgctcagccttcagcgtcagggactcatctccattccacctggccaggcagcacttcctgtccaatcgctgcctcaagctggcttaagtcctgctgagattcagcagttatggaaagaagtgactggagttcacagtatggaagacaatggcattaaacatggagggctagacctcactactaacaattcctcctcgactacctcctccaacacttccaaagcatcaccaccaataactcatcattccatagtgaatggacagtcttcagttctaagtgcaagacgagacagctcgtcacatgaggagactggggcctctcacactctctatggccatggagtttgcaaatggccaggctgtgaaagcatttgtgaagattttggacagtttttaaagcaccttaacaatgaacacgcattggatgaccgaagcactgctcagtgtcgagtgcaaatgcaggtggtgcaacagttagaaatacagctttctaaagaacgcgaacgtcttcaagcaatgatgacccacttgcacatgcgaccctcagagcccaaaccatctcccaaacctgtaagtgcatattgctttataaacagtaaatagctctaccaatgtaacagactaagaaaatgaacaatttagtgacagttagaaaacaatgagtgtgatgaaaaatacggcaataaaatgaaagtaaaatgtaa

SEQ ID NO: 242409 - DNA, 669 bp, Artificial Sequence
  derived and/or modified sequence
atgatgcaggagagtgcaacagaaaccatttccaacagcagcatgaaccagaatggtatgtctaccctgtcatcccagctagatgccggctcacgagacggtaggtcaagcggcgacacatccagcgaggtgtctacagttgaactccttcacctccagcaacaacaggcccttcaagctgctaggcagctcctcctgcagcagcagacatcgggcctaaaaagtcctaaaagcagcgacaagcaaagaccactacaagtcccagtttctgtggccatgatgaccccacaggtcatcacaccccagcagatgcagcagatactgcagcagcaagtgctgtcaccacagcagctacaggccctgctgcaacagcaacaggccgtaatgctgcagcaacagcaactgcaagaattttacaagaaacagcaggaacagttgcatttgcagttactacaacagcagcagcagcagcaacagcagcaacaacaacaacagcaacaacagcaacagcaacagcagcagcagcaacagcaacagcagcagcagcagcagcagcagcagcagcagcagcaacatcctggtaaacaggcaaaagaacagcagcaacaacaacaacagcagcaacaactcgctgcccaacagctagtttttcagcagcagctcctgtag

SEQ ID NO: 242410 - DNA, 1299 bp, Artificial Sequence
  derived and/or modified sequence
atgatgcaggagagcgccacggagactatcagcaacagcagtatgaaccagaacggaatgagcaccctcagtagtcagttagacgcaggatcgcgggacggtaggagctcaggggacacgtcatctgaggtgtccacagtcgaactcctgcacctccagcaacagcaggccctgcaggctgcgcggcaactgctgttacagcagcaaacatcaggactaaagagtccaaagagctccgacaaacagaggccgctacaggtgcctgtatctgtggctatgatgactccacaggtgatcacacctcagcagatgcagcaaatccttcagcagcaggtgctgtcaccccagcagctgcaggcgctgctccagcagcagcaagctgtaatgttgcagcagcagcagctgcaggagttttataagaaacaacaagaacagctgcacctgcagctgctgcaacagcagcagcagcaacagcagcagcagcaacagcagcagcagcagcagcagcaacagcaacagcagcagcaacagcagcaacagcagcagcagcagcagcagcagcagcaacaacaacaccctggtaagcaagccaaggaacaacagcagcagcagcaacaacagcaacagcttgcagcccagcagttagtcttccagcaacagctcctacagatgcaacaactccagcaacagcagcacctcttgagtctgcagcggcagggcctaatctcaatccctccggggcaggccgcccttcccgtccagagtctgccacaggcaggactgagccccgccgagatccagcagctctggaaagaggttacgggtgtgcactcgatggaggacaatggtatcaagcatggaggtcttgacttaaccacaaacaactcgtctagtaccaccagcagcaatacctctaaagcttcacccccgatcactcatcactccatcgtgaatggccaatcctctgtcctatctgctcggcgcgactcgagcagtcatgaggaaactggagcgagccacaccctatacggtcatggtgtctgtaaatggcctggctgtgagagcatatgtgaggacttcgggcagtttctcaagcatctcaacaatgagcacgcgttggacgaccggtccaccgctcaatgtcgcgtgcagatgcaggtagtccaacagctggagatccagctcagcaaagaaagggaaagattgcaagcgatgatgacccatctgcacatgagaccctcagaaccgaagccctcccccaaacccgttagcgcctactgtttcatcaactcaaagtag

SEQ ID NO: 242411 - DNA, 1371 bp, Artificial Sequence
  derived and/or modified sequence
atgcaggaaagcgccacagaaaccatctcaaattcatcaatgaatcagaatggaatgtctacactgtcctctcagctcgacgccggctcacgtgatggtagaagcagcggtgacacaagcagtgaagttagcactgtggagcttctgcatctgcagcagcagcaggccctccaggccgcaaggcagttacttcttcaacaacaaacaagtggactgaaatctccgaaatcatccgacaagcaacggcctctccaggagctccttcctgaaaccaaactttgtatttgtggacacagttcaggtgacggacatcctcacaacacctttgccgtaccagtgagtgtggcaatgatgaccccacaggtaatcacaccgcagcagatgcagcaaatcctccaacagcaagtgctctcaccccaacagcttcaagcactgctgcaacagcaacaggctgttatgctgcaacagcagcagcttcaagaattctacaagaaacaacaggaacagctgcatctgcagctactccaacagcaacagcaacagcagcagcagcagcagcagcagcagcaacagcagcagcaacaacagcagcaacagcaacagcagcaacagcagcaacagcagcaacagcaacaacagcagcagcatccgggcaagcaggccaaagagcagcagcagcagcaacagcagcagcagcagctcgctgcccagcagctagtctttcagcagcaattgctgcagatgcaacagcttcagcaacagcaacatctcctcagcctgcagcggcaggggttaatctctatcccacccggtcaagccgctctgcctgttcaaagcttacctcaagccggactgtccccagctgagatccaacagctctggaaggaggtaacaggtgtccatagcatggaggacaacggcataaagcacggaggcctggacctgaccactaacaacagttcaagtacaacgagcagtaacacttctaaggcctccccgcccatcacccatcactccatagttaatggtcagtcgtccgtcctcagtgcccgcagggattcatcttcgcacgaggagactggtgcgagtcacaccctatatgggcatggcgtttgtaagtggcctggttgcgaatccatatgcgaggattttggtcaattcttaaagcatctcaacaatgagcatgcactggacgatagatccaccgcccagtgcagagtccagatgcaggtagtgcagcagttagaaatccagttgtcaaaggagcgcgagagactccaggcaatgatgacgcaccttcatatgcgccccagtgagccaaagccctcccccaagcccgtgagtgcctactgttttatcaatagcaaatag

SEQ ID NO: 242412 - DNA, 1149 bp, Artificial Sequence
  derived and/or modified sequence
atgatgacgcctcaggtcattacccctcaacagatgcagcaaatccttcagcagcaggtcctctctccccagcaactgcaagctttattgcagcagcagcaggccgtaatgctgcaacaggatttccttgatagtgggttagaaaacttcagggctgcgctggaaaaaaatcaacaacttcaagaattctacaagaaacagcaggaacaactccatctgcagctactacagcagcagcagcaacagcagcagcaacagcagcagcagcagcagcaacaacagcaacagcagcagcaacaacagcaacagcagcaacagcagcagcagcagcagcagcagcagcagcaacatcccggaaagcaggccaaggaacagcagcagcagcaacagcagcagcagcagttggctgctcagcagctcgtgttccaacaacaactacttcagatgcaacaactccagcaacagcagcatctcctctctctacagagacaaggcttaattagcattcccccagggcaggcagccttacctgttcagagcctgcctcaggccggattaagtccagccgaaatacagcagctgtggaaggaagtcacgggggtccacagtatggaagacaatggtataaagcacggtggactggatctaacaaccaataatagctctagtaccactagttctaacacctcaaaggcgtcaccccccatcacacaccattcgattgtgaacggccagagctctgtcctgtctgccaggcgcgactcatccagtcacgaagaaaccggcgcctctcacactctgtacggccatggtgtatgcaaatggcctggctgcgaatccatctgcgaagatttcgggcaattcctgaaacatttgaataatgaacacgccttagatgataggtccaccgcacagtgccgcgtccagatgcaagtcgtacagcaacttgagattcagctgagtaaggaaagagaacggctccaggctatgatgacccacctacatatgcgccctagcgaaccgaaaccctctcccaaaccaaacatctgcaaagtcacataccgctgcatttggatgttcctgcgcttctcaaattatgccgaggtcctactgtacatccctgagaagctgacaccagtcgcactctag

SEQ ID NO: 242413 - DNA, 669 bp, Artificial Sequence
  derived and/or modified sequence
atgatgcaggagagcgccacagagaccatcagcaacagctccatgaaccagaatggcatgagcaccctgagcagccagctggatgctggcagcagagatggccgcagcagcggggacaccagcagcgaggtgtccacagtggagctgctgcacctgcagcagcagcaggccctgcaggccgcccggcagctgctgctgcagcagcagaccagcggcctgaagagccccaagagcagtgacaagcagaggcccctgcaggtgcctgtgtctgtggccatgatgaccccccaggtgatcaccccccagcagatgcagcagatcctgcagcagcaggtgctgagcccccagcagctgcaggccctgctgcagcagcagcaggccgtgatgctgcagcagcagcagctgcaggagttctacaagaagcagcaggagcagctgcacctgcagctgctgcagcagcagcagcagcagcagcagcagcagcagcagcagcagcagcagcagcagcagcagcagcagcagcagcagcagcagcagcagcagcagcagcagcagcagcagcagcagcagcagcaccctgggaagcaggccaaggagcagcagcagcagcagcagcagcagcagcagctggccgcccagcagctggtgttccagcagcagctgctgtag

SEQ ID NO: 242414 - DNA, 1299 bp, Artificial Sequence
  derived and/or modified sequence
atgatgcaggagagcgccacagagaccatcagcaacagctccatgaaccagaatggcatgagcaccctgagcagccagctggatgctggcagcagagatggccgcagcagcggggacaccagcagcgaggtgtccacagtggagctgctgcacctgcagcagcagcaggccctgcaggccgcccggcagctgctgctgcagcagcagaccagcggcctgaagagccccaagagcagtgacaagcagaggcccctgcaggtgcctgtgtctgtggccatgatgaccccccaggtgatcaccccccagcagatgcagcagatcctgcagcagcaggtgctgagcccccagcagctgcaggccctgctgcagcagcagcaggccgtgatgctgcagcagcagcagctgcaggagttctacaagaagcagcaggagcagctgcacctgcagctgctgcagcagcagcagcagcagcagcagcagcagcagcagcagcagcagcagcagcagcagcagcagcagcagcagcagcagcagcagcagcagcagcagcagcagcagcagcagcagcagcagcaccctgggaagcaggccaaggagcagcagcagcagcagcagcagcagcagcagctggccgcccagcagctggtgttccagcagcagctgctgcagatgcagcagctgcagcagcagcagcacctgctgagcctgcagaggcagggcctcatcagcatccccccaggccaggccgccctgcctgtgcagagcctgccccaggccggcctgagccctgctgagatccagcagctgtggaaggaggtgactggagtgcacagcatggaggacaatggcatcaagcacggcggcctggacctgaccaccaacaacagcagcagcaccaccagcagcaacaccagcaaggccagcccccccatcacccaccacagcatcgtgaatggccagagctctgtgctgagcgcccggcgggacagcagcagccatgaggagaccggggccagccacaccctgtatggccatggagtgtgcaagtggccaggctgtgagagcatctgtgaggactttggccagttcctgaagcacctgaacaatgaacatgccctggatgacaggagcacagcccagtgccgggtgcagatgcaggtggtgcagcagctggagatccagctgagcaaggagcgggagcggctgcaggccatgatgacccacctgcacatgaggcccagcgagcccaagcccagccccaagcctgtgtctgcctactgcttcatcaacagcaagtag

SEQ ID NO: 242415 - DNA, 1371 bp, Artificial Sequence
  derived and/or modified sequence
atgcaggagagcgccacagagaccatcagcaacagctccatgaaccagaatggcatgagcaccctgagcagccagctggatgctggcagcagagatggccgcagcagcggggacaccagcagcgaggtgtccacagtggagctgctgcacctgcagcagcagcaggccctgcaggccgcccggcagctgctgctgcagcagcagaccagcggcctgaagagccccaagagcagtgacaagcagaggcccctgcaggagctgctgcctgagaccaagctgtgcatctgtggccacagcagtggagatggccacccccacaacacctttgctgtgcctgtgtctgtggccatgatgaccccccaggtgatcaccccccagcagatgcagcagatcctgcagcagcaggtgctgagcccccagcagctgcaggccctgctgcagcagcagcaggccgtgatgctgcagcagcagcagctgcaggagttctacaagaagcagcaggagcagctgcacctgcagctgctgcagcagcagcagcagcagcagcagcagcagcagcagcagcagcagcagcagcagcagcagcagcagcagcagcagcagcagcagcagcagcagcagcagcagcagcagcagcagcagcagcaccctgggaagcaggccaaggagcagcagcagcagcagcagcagcagcagcagctggccgcccagcagctggtgttccagcagcagctgctgcagatgcagcagctgcagcagcagcagcacctgctgagcctgcagaggcagggcctcatcagcatccccccaggccaggccgccctgcctgtgcagagcctgccccaggccggcctgagccctgctgagatccagcagctgtggaaggaggtgactggagtgcacagcatggaggacaatggcatcaagcacggcggcctggacctgaccaccaacaacagcagcagcaccaccagcagcaacaccagcaaggccagcccccccatcacccaccacagcatcgtgaatggccagagctctgtgctgagcgcccggcgggacagcagcagccatgaggagaccggggccagccacaccctgtatggccatggagtgtgcaagtggccaggctgtgagagcatctgtgaggactttggccagttcctgaagcacctgaacaatgaacatgccctggatgacaggagcacagcccagtgccgggtgcagatgcaggtggtgcagcagctggagatccagctgagcaaggagcgggagcggctgcaggccatgatgacccacctgcacatgaggcccagcgagcccaagcccagccccaagcctgtgtctgcctactgcttcatcaacagcaagtag

SEQ ID NO: 242416 - DNA, 1149 bp, Artificial Sequence
  derived and/or modified sequence
atgatgaccccccaggtgatcaccccccagcagatgcagcagatcctgcagcagcaggtgctgagcccccagcagctgcaggccctgctgcagcagcagcaggccgtgatgctgcagcaggacttcctggacagcggcctggagaacttccgggccgccctggagaagaaccagcagctgcaggagttctacaagaagcagcaggagcagctgcacctgcagctgctgcagcagcagcagcagcagcagcagcagcagcagcagcagcagcagcagcagcagcagcagcagcagcagcagcagcagcagcagcagcagcagcagcagcagcagcagcagcagcagcagcaccctgggaagcaggccaaggagcagcagcagcagcagcagcagcagcagcagctggccgcccagcagctggtgttccagcagcagctgctgcagatgcagcagctgcagcagcagcagcacctgctgagcctgcagaggcagggcctcatcagcatccccccaggccaggccgccctgcctgtgcagagcctgccccaggccggcctgagccctgctgagatccagcagctgtggaaggaggtgactggagtgcacagcatggaggacaatggcatcaagcatggaggcctggacctgaccaccaacaacagcagcagcaccaccagcagcaacaccagcaaggccagcccccccatcacccaccacagcatcgtgaatggccagagctctgtgctgagcgcccggcgggacagcagcagccatgaggagactggagccagccacaccctgtatggccacggcgtgtgcaagtggccaggctgtgagagcatctgtgaagattttggccagttcctgaagcacctgaacaatgagcacgccctggatgacaggagcacagcccagtgccgggtgcagatgcaggtggtgcagcagctggagatccagctgagcaaggagcgggagcggctgcaggccatgatgacccacctgcacatgaggccttctgagcccaagcccagccccaagcccaacatctgcaaggtgacctaccgctgcatctggatgttcctgcgcttcagcaactatgcagaggtgctgctgtacatccctgagaagctgacccctgtggccctgtag

SEQ ID NO: 242417 - DNA, 669 bp, Artificial Sequence
  derived and/or modified sequence
atgatgcaggagagcgccaccgagaccatcagcaacagcagcatgaatcagaatgggatgagtacactgtcttctcaactggatgccggcagtagagacggacgatcctcaggtgacacctcgtctgaggtgagcaccgtggaacttctccaccttcagcaacagcaggcgcttcaggccgctcggcaacttctcttacagcagcagaccagtggtctaaaaagcccaaagtcttctgacaagcagcgccccttacaggtgcccgtctcagttgcaatgatgacccctcaggtgatcacaccgcagcagatgcagcagatcctgcagcaacaggtgttatctccccaacagctgcaagcactgctgcagcaacagcaagctgtgatgctgcagcagcagcaactacaggagttctataaaaaacaacaggagcagctgcatctgcagctcctacagcagcagcagcagcaacagcagcagcagcagcaacagcaacagcagcaacagcaacagcagcaacagcaacagcagcagcaacagcaacagcaacagcaacagcagcaacagcaacagcaccccggcaaacaggccaaggaacagcagcagcagcagcagcagcagcagcaacttgctgcgcagcagctggtgttccagcagcagctgctctag

SEQ ID NO: 242418 - DNA, 1299 bp, Artificial Sequence
  derived and/or modified sequence
atgatgcaggagagcgccaccgagaccatcagcaacagcagcatgaaccaaaatgggatgtctaccctcagcagtcagctggacgcaggctccagagatggccggagttctggagacacttcaagcgaggtgagcacagtcgaactcctgcatcttcagcagcagcaggctctgcaggccgctagacagctgctgctacagcagcagacctccggacttaaaagtcccaaatcttccgacaaacagcggcccttgcaagtcccagtgtctgtggcaatgatgacaccccaggttatcacgccacagcagatgcagcaaattctccagcagcaggtcctgtcaccccagcaactgcaggctctcctacagcaacagcaagctgtgatgctgcagcagcagcagttacaagagttctacaaaaagcagcaggaacagcttcatcttcaattactacagcagcagcagcagcagcagcaacagcaacagcagcaacaacaacagcaacagcaacagcagcagcagcagcagcagcaacaacagcagcaacagcagcagcagcaacagcagcagcagcacccaggcaagcaggcaaaggagcagcagcaacaacaacagcagcagcagcaactcgccgcgcagcagctcgttttccagcaacaattgttgcagatgcagcagttgcagcaacaacaacatcttctaagcctgcaacgccaaggactaatctccattccacctggccaggccgcactacccgtgcagagcctgccccaggcaggtctgtcccctgccgagatccaacagttgtggaaggaagtgaccggcgtgcatagcatggaggataacggaatcaagcacggtggactcgacttaaccacaaataacagtagcagtaccactagctcaaacaccagcaaggctagtcccccaatcacacatcactccatcgttaacggccaatcttctgtgctatcagcacggcgcgattcctccagccacgaggagacgggggcctcacacacactgtacggtcatggcgtttgcaagtggccgggctgcgagtccatctgtgaagattttggtcaatttctgaagcatctaaacaatgaacacgctctcgatgatcggtctacagcacagtgtagggtacagatgcaggtagtgcagcaactggaaatacaactgagcaaggaaagggagaggcttcaggccatgatgacacatctgcacatgcgcccatccgagccaaaaccttctcccaaacccgtgagcgcttactgcttcatcaattctaagtag

SEQ ID NO: 242419 - DNA, 1371 bp, Artificial Sequence
  derived and/or modified sequence
atgcaggagagcgccaccgagaccatcagcaacagcagcatgaaccagaatggaatgtctaccctttcgagccagttagatgcagggtctagagatggccgcagctcgggggatacgagcagcgaggtcagcaccgttgagttgttacacctgcaacagcaacaggccctgcaagctgcccgccaattgctgctgcagcagcaaacatctggacttaagtcaccgaagagtagcgacaaacagcgccccttgcaggaactactccctgagactaaattgtgcatctgcggccattcaagtggagacggtcacccacacaataccttcgccgtgcccgtgtctgtggctatgatgacaccacaagtgattactccgcagcagatgcagcagatcctgcagcagcaggtgctctcacctcagcagctgcaggccctgctccagcagcagcaggctgttatgctccaacagcagcagctgcaggagttttacaaaaagcaacaagaacaattgcacctccagctactgcagcagcagcagcagcaacagcagcaacagcaacagcagcaacaacagcagcaacaacagcagcaacagcagcagcagcaacaacagcagcagcagcaacagcagcagcagcagcagcagcatccaggaaagcaggcgaaagaacagcagcagcagcagcagcaacagcagcagctggccgcccaacaactggtgttccaacaacagctgctgcagatgcagcaactccagcagcagcaacacctgctttccctccaacgccaggggctcatatccataccccccgggcaagctgccctccccgtccagagcttaccacaggccggcctttctccagcggaaattcagcaactttggaaagaggtaacaggtgttcactcaatggaagataacggtattaagcacggtgggcttgacctgacaacaaacaattcctcctcaactacgtcttccaacaccagcaaagccagccctccaatcactcaccattctatcgtgaacgggcaatcctccgtgctatccgccaggcgggattctagttctcatgaagagacaggggcctctcacactctatatggtcatggggtatgtaagtggccaggttgtgagtctatttgcgaggacttcgggcagttcctgaaacacctcaataatgagcacgctcttgacgaccgcagcaccgctcaatgtcgcgtccagatgcaggtcgttcagcagctagaaatccagctcagcaaggagcgcgagaggcttcaagcaatgatgacacacctccacatgagaccctcagaacccaaaccttcgccaaaaccagtttcggcttattgcttcattaattcgaagtag

SEQ ID NO: 242420 - DNA, 1149 bp, Artificial Sequence
  derived and/or modified sequence
atgatgaccccccaggtgatcaccccccagcagatgcagcagatcctccagcaacaggttttgagcccacagcagttacaagccctgctgcaacagcagcaggcagtgatgctacagcaagactttctagactccgggcttgaaaatttcagggctgccttggaaaagaaccaacaattgcaggaattctacaagaagcagcaggaacagttacacctgcagctgttgcagcagcagcaacagcagcaacagcaacagcaacagcagcagcagcagcaacagcaacagcaacagcagcagcaacagcaacagcaacaacagcaacagcagcaacagcaacagcagcagcatcctggcaaacaggcaaaagaacagcagcaacagcaacagcaacagcagcagctcgcagctcaacagttggtctttcagcaacaacttcttcaaatgcagcaattacagcagcaacaacacctgctcagcctccagcggcagggtctgattagcattcctcccggccaggcagccctgcctgtgcagtctctcccacaggccggactatcccccgccgaaattcaacagctctggaaggaggtgacaggtgtccattcaatggaggacaatggcataaagcacgggggacttgacttgactacgaacaattcttccagcaccacgtcttcaaatacctccaaagcttcacctcctataactcaccacagcatcgtgaatggtcagagttccgtgcttagtgcccgaagagactcatccagccatgaagagacgggcgcgagtcacaccctgtatggccatggagtctgcaagtggcctggctgtgagtctatatgtgaggactttggtcagttcctcaaacatctgaataacgaacatgccctggacgataggtccaccgcccagtgtagagtgcagatgcaggttgtacagcagctcgagattcagctctcaaaggagcgcgagcgactgcaggctatgatgactcacctgcacatgcggccctcggagccgaagccatcccccaaacccaacatttgtaaagtgacttaccgctgcatctggatgttccttaggttttccaattacgccgaagtcctgctgtacattccagagaagctcaccccagtcgccctgtag

SEQ ID NO: 242421 - DNA, 669 bp, Artificial Sequence
  derived and/or modified sequence
atgatgcaggaatctgcaaccgagacgatcagtaacagttctatgaaccagaatggcatgtcaacactatcgagtcagctggatgccggatcacgcgatggcaggagctctggtgacactagtagcgaggtttccaccgttgaactcctgcatctccagcagcagcaagccctgcaggccgctaggcagttattattgcagcagcagacttctggactcaagtcaccgaagtcctccgataaacagagacccctgcaggtcccagtgtcagtggccatgatgaccccccaagtcatcactccccaacagatgcaacagatcctgcagcagcaggtgctctctccccagcagctgcaagccctacttcagcagcagcaagctgtgatgctccagcaacaacaacttcaggaattctataagaagcaacaggaacagctgcacctgcagctgttgcagcaacagcagcagcagcagcaacagcagcagcagcaacaacaacagcagcaacagcagcagcaacagcaacagcagcagcagcaacaacagcagcagcagcagcagcagcagcagcagcatcctggcaaacaggccaaggagcagcagcaacagcagcagcaacagcagcagctggcagcccaacagttggtgttccagcaacagctgctgtag

SEQ ID NO: 242422 - DNA, 1299 bp, Artificial Sequence
  derived and/or modified sequence
atgatgcaagaaagcgcaacggagacaatatccaactcgagcatgaaccagaacggcatgtctacactatcttctcagttggatgccggttcccgcgatggccgttcttctggtgacacctccagcgaggtctccacggttgagctcctacacctgcagcagcagcaggctcttcaggccgctcgccaacttctgctccagcagcaaacatctggactcaagtcccccaaaagtagcgataagcaacgacctctgcaggtgccagtgagtgtggcgatgatgacaccccaggtgataactccacagcagatgcagcagatcctacagcaacaggtcctctctccgcaacagctgcaggccctgttacaacaacaacaggccgtcatgttgcagcagcagcagcttcaagaattctacaagaaacaacaagaacagctgcacctgcagcttctgcagcagcagcaacagcagcagcagcagcagcaacaacagcagcagcagcagcagcagcagcagcagcagcagcagcagcagcagcagcaacagcagcaacagcagcagcagcagcaacagcatccaggtaagcaggctaaggaacagcagcagcagcaacagcagcagcaacagttggccgcacagcaactcgtgtttcagcagcaactgctgcaaatgcagcagctccaacagcagcagcacttgctgtctcttcagcgtcaaggactgatatccatcccgcctgggcaggcagctctgccagtgcagagccttccgcaagcgggactgtcccccgctgagatccagcaattatggaaggaggtgacgggtgtccatagcatggaggacaacggcattaagcatggcggacttgacctcaccactaacaattctagctctaccaccagctcgaacacctccaaggccagtccaccaataacccatcacagcatagtgaatggccagtcttcagtcctatcagccaggagagatagctcttcacatgaggagacgggcgctagccacacactgtacggccacggagtgtgcaaatggcccggatgcgaatctatttgcgaggactttggccaattcctcaagcacttgaacaacgagcacgccttagacgaccgttccactgcccagtgccgggtccagatgcaggttgtgcagcagctcgagatccagcttagcaaagagcgcgagcgcctgcaggccatgatgacccatctgcatatgaggcccagcgagccaaaaccctccccaaaaccagtgagcgcctattgtttcataaactccaagtag

SEQ ID NO: 242423 - DNA, 1371 bp, Artificial Sequence
  derived and/or modified sequence
atgcaggagtcagccactgagacgatctcaaactctagtatgaaccagaatggcatgtcgacactgagtagtcagttggatgctggcagccgggatggcagaagttctggcgacacctcttcggaggtgagcaccgtggaactgttgcacctgcagcagcagcaggccctccaggccgcacgacagctcctgctgcagcagcaaacgagcggcctcaaatctcccaaatcttctgataagcagaggcctctgcaagaactgctgcccgaaactaaactgtgcatatgtgggcactcgagcggggatggacacccccacaatacctttgctgtacccgtttccgtggctatgatgacgccacaggtaataacccctcaacagatgcagcaaatactccagcagcaggtgctttccccgcaacagctccaagcgctcctccagcagcagcaagcagtgatgcttcagcagcagcaactacaggagttttacaagaagcaacaggagcagttgcacttacagctcttgcagcaacagcaacagcagcagcagcagcaacagcaacagcagcagcagcaacagcaacaacagcagcagcagcagcagcaacagcagcagcaacaacagcaacagcaacagcagcaacagcaccctggaaaacaggctaaggaacagcaacagcagcagcagcagcagcagcaactcgccgctcagcaactcgtattccagcagcagctcctgcaaatgcaacagctgcagcagcagcaacacctcctctccctgcagaggcaaggacttatttcgattccacccggacaggctgcactgccagttcagtcccttcctcaggcgggtctgagtcccgcagaaattcagcaactctggaaggaggtgacaggtgttcacagtatggaagacaacgggattaaacacggaggacttgatcttaccacaaataactcttcaagcacaacatcctcaaatacatccaaagctagccctcccatcacccaccacagtattgtgaacggtcagagcagcgtcctgtcagccaggcgggacagctcttcgcatgaggagacgggcgcatcccacaccttgtacggacatggcgtatgtaaatggcccggttgcgagagtatttgtgaggacttcggccagttcctgaagcatcttaacaatgaacacgcactggatgatagatctacagcccaatgtcgggtccagatgcaggtggtgcagcagctggagatccagctgtccaaggagagagagcggttacaggcaatgatgacacacttacacatgagaccctccgagcccaagccctctcccaagccggtgagtgcttactgtttcattaattccaagtag

SEQ ID NO: 242424 - DNA, 1149 bp, Artificial Sequence
  derived and/or modified sequence
atgatgactccccaggtcatcaccccacaacaaatgcaacagattctccagcaacaggtgttgagcccacagcaattacaggccttgctgcagcagcagcaggccgtgatgctgcaacaggatttcctggattcaggtctggaaaactttagggccgctctggaaaagaaccaacaattgcaggaattttacaaaaaacaacaggagcaattgcaccttcaactgctccagcagcagcaacagcaacagcaacaacagcaacagcagcagcagcagcagcaacagcagcaacagcagcagcagcagcagcaacaacagcagcagcagcagcaacagcagcagcaacaacaccccggaaagcaggccaaggaacagcagcagcagcagcagcagcagcagcaactggccgctcaacagctggtgtttcaacagcaacttttacagatgcagcagctgcagcagcagcagcatctcctgtccctacagcgacagggcctcatctccattccacctgggcaggctgccctccccgtgcagtcactacctcaggcaggtttgtccccagctgagattcagcagttatggaaagaggtcactggggttcacagcatggaagacaacgggattaagcacggaggcctggatttgacgaccaataacagcagttcaactacctcaagcaacaccagcaaggcctccccccctatcacccaccactctatagtgaatggtcagtcttcagtcttatccgccagacgagacagtagctcacacgaagagaccggcgcttcccacactctgtatgggcatggcgtgtgtaaatggcctggatgcgagagtatctgtgaggattttggacaattcctgaagcacttaaataatgagcacgcccttgacgacaggtccaccgcccaatgtcgggtgcaaatgcaagtggtgcagcaattagagatccaattgtcaaaggaacgcgagcggcttcaggccatgatgacccatttgcatatgcgcccaagcgagccaaagcctagtcccaaaccgaacatttgcaaagttacctatcgatgcatttggatgttcctacgattcagcaactacgcagaggtcttgctctatattcctgaaaaactgacaccagtggcgctctag

SEQ ID NO: 242425 - DNA, 669 bp, Artificial Sequence
  derived and/or modified sequence
atgatgcaggagagcgccaccgagaccatcagcaacagcagcatgaaccagaacggcatgagcaccctgagcagccagctggacgccggcagcagagacggcagaagcagcggcgacaccagcagcgaggtgagcaccgtggagctgctgcacctgcagcagcagcaggccctgcaggccgccagacagctgctgctgcagcagcagaccagcggcctgaagagccccaagagcagcgacaagcagagacccctgcaggtgcccgtgagcgtggccatgatgaccccccaggtgatcaccccccagcagatgcagcagatcctgcagcagcaggtgctgagcccccagcagctgcaggccctgctgcagcagcagcaggccgtgatgctgcagcagcagcagctgcaggagttctacaagaagcagcaggagcagctgcacctgcagctgctgcagcagcagcagcagcagcagcagcagcagcagcagcagcagcagcagcagcagcagcagcagcagcagcagcagcagcagcagcagcagcagcagcagcagcagcagcagcagcagcagcaccccggcaagcaggccaaggagcagcagcagcagcagcagcagcagcagcagctggccgcccagcagctggtgttccagcagcagctgctgtag

SEQ ID NO: 242426 - DNA, 1299 bp, Artificial Sequence
  derived and/or modified sequence
atgatgcaggagagcgccaccgagaccatcagcaacagcagcatgaaccagaacggcatgagcaccctgagcagccagctggacgccggcagcagagacggcagaagcagcggcgacaccagcagcgaggtgagcaccgtggagctgctgcacctgcagcagcagcaggccctgcaggccgccagacagctgctgctgcagcagcagaccagcggcctgaagagccccaagagcagcgacaagcagagacccctgcaggtgcccgtgagcgtggccatgatgaccccccaggtgatcaccccccagcagatgcagcagatcctgcagcagcaggtgctgagcccccagcagctgcaggccctgctgcagcagcagcaggccgtgatgctgcagcagcagcagctgcaggagttctacaagaagcagcaggagcagctgcacctgcagctgctgcagcagcagcagcagcagcagcagcagcagcagcagcagcagcagcagcagcagcagcagcagcagcagcagcagcagcagcagcagcagcagcagcagcagcagcagcagcagcagcagcaccccggcaagcaggccaaggagcagcagcagcagcagcagcagcagcagcagctggccgcccagcagctggtgttccagcagcagctgctgcagatgcagcagctgcagcagcagcagcacctgctgagcctgcagagacagggcctgatcagcatcccccccggccaggccgccctgcccgtgcagagcctgccccaggccggcctgagccccgccgagatccagcagctgtggaaggaggtgaccggcgtgcacagcatggaggacaacggcatcaagcacggcggcctggacctgaccaccaacaacagcagcagcaccaccagcagcaacaccagcaaggccagcccccccatcacccaccacagcatcgtgaacggccagagcagcgtgctgagcgccagaagagacagcagcagccacgaggagaccggcgccagccacaccctgtacggccacggcgtgtgcaagtggcccggctgcgagagcatctgcgaggacttcggccagttcctgaagcacctgaacaacgagcacgccctggacgacagaagcaccgcccagtgcagagtgcagatgcaggtggtgcagcagctggagatccagctgagcaaggagagagagagactgcaggccatgatgacccacctgcacatgagacccagcgagcccaagcccagccccaagcccgtgagcgcctactgcttcatcaacagcaagtag

SEQ ID NO: 242427 - DNA, 1371 bp, Artificial Sequence
  derived and/or modified sequence
atgcaggagagcgccaccgagaccatcagcaacagcagcatgaaccagaacggcatgagcaccctgagcagccagctggacgccggcagcagagacggcagaagcagcggcgacaccagcagcgaggtgagcaccgtggagctgctgcacctgcagcagcagcaggccctgcaggccgccagacagctgctgctgcagcagcagaccagcggcctgaagagccccaagagcagcgacaagcagagacccctgcaggagctgctgcccgagaccaagctgtgcatctgcggccacagcagcggcgacggccacccccacaacaccttcgccgtgcccgtgagcgtggccatgatgaccccccaggtgatcaccccccagcagatgcagcagatcctgcagcagcaggtgctgagcccccagcagctgcaggccctgctgcagcagcagcaggccgtgatgctgcagcagcagcagctgcaggagttctacaagaagcagcaggagcagctgcacctgcagctgctgcagcagcagcagcagcagcagcagcagcagcagcagcagcagcagcagcagcagcagcagcagcagcagcagcagcagcagcagcagcagcagcagcagcagcagcagcagcagcagcagcaccccggcaagcaggccaaggagcagcagcagcagcagcagcagcagcagcagctggccgcccagcagctggtgttccagcagcagctgctgcagatgcagcagctgcagcagcagcagcacctgctgagcctgcagagacagggcctgatcagcatcccccccggccaggccgccctgcccgtgcagagcctgccccaggccggcctgagccccgccgagatccagcagctgtggaaggaggtgaccggcgtgcacagcatggaggacaacggcatcaagcacggcggcctggacctgaccaccaacaacagcagcagcaccaccagcagcaacaccagcaaggccagcccccccatcacccaccacagcatcgtgaacggccagagcagcgtgctgagcgccagaagagacagcagcagccacgaggagaccggcgccagccacaccctgtacggccacggcgtgtgcaagtggcccggctgcgagagcatctgcgaggacttcggccagttcctgaagcacctgaacaacgagcacgccctggacgacagaagcaccgcccagtgcagagtgcagatgcaggtggtgcagcagctggagatccagctgagcaaggagagagagagactgcaggccatgatgacccacctgcacatgagacccagcgagcccaagcccagccccaagcccgtgagcgcctactgcttcatcaacagcaagtag

SEQ ID NO: 242428 - DNA, 1149 bp, Artificial Sequence
  derived and/or modified sequence
atgatgaccccccaggtgatcaccccccagcagatgcagcagatcctgcagcagcaggtgctgagcccccagcagctgcaggccctgctgcagcagcagcaggccgtgatgctgcagcaggacttcctggacagcggcctggagaacttcagagccgccctggagaagaaccagcagctgcaggagttctacaagaagcagcaggagcagctgcacctgcagctgctgcagcagcagcagcagcagcagcagcagcagcagcagcagcagcagcagcagcagcagcagcagcagcagcagcagcagcagcagcagcagcagcagcagcagcagcagcagcagcagcagcaccccggcaagcaggccaaggagcagcagcagcagcagcagcagcagcagcagctggccgcccagcagctggtgttccagcagcagctgctgcagatgcagcagctgcagcagcagcagcacctgctgagcctgcagagacagggcctgatcagcatcccccccggccaggccgccctgcccgtgcagagcctgccccaggccggcctgagccccgccgagatccagcagctgtggaaggaggtgaccggcgtgcacagcatggaggacaacggcatcaagcacggcggcctggacctgaccaccaacaacagcagcagcaccaccagcagcaacaccagcaaggccagcccccccatcacccaccacagcatcgtgaacggccagagcagcgtgctgagcgccagaagagacagcagcagccacgaggagaccggcgccagccacaccctgtacggccacggcgtgtgcaagtggcccggctgcgagagcatctgcgaggacttcggccagttcctgaagcacctgaacaacgagcacgccctggacgacagaagcaccgcccagtgcagagtgcagatgcaggtggtgcagcagctggagatccagctgagcaaggagagagagagactgcaggccatgatgacccacctgcacatgagacccagcgagcccaagcccagccccaagcccaacatctgcaaggtgacctacagatgcatctggatgttcctgagattcagcaactacgccgaggtgctgctgtacatccccgagaagctgacccccgtggccctgtag

SEQ ID NO: 242429 - protein, 623 aa, Artificial Sequence
  derived and/or modified sequence
MMTPQVITPQQMQQILQQQVLSPQQLQALLQQQQAVMLQQQQLQEFYKKQQEQLHLQLLQQQQQQQQQQQQQQQQQQQQQQQQQQQQQQQQQQQQQQQQHPGKQAKEQQQQQQQQQQLAAQQLVFQQQLLQMQQLQQQQHLLSLQRQGLISIPPGQAALPVQSLPQAGLSPAEIQQLWKEVTGVHSMEDNGIKHGGLDLTTNNSSSTTSSNTSKASPPITHHSIVNGQSSVLSARRDSSSHEETGASHTLYGHGVCKWPGCESICEDFGQFLKHLNNEHALDDRSTAQCRVQMQVVQQLEIQLSKERERLQAMMTHLHMRPSEPKPSPKPLNLVSSVTMSKNMLETSPQSLPQTPTTPTAPVTPITQGPSVITPASVPNVGAIRRRHSDKYNIPMSSEIAPNYEFYKNADVRPPFTYATLIRQAIMESSDRQLTLNEIYSWFTRTFAYFRRNAATWKNAVRHNLSLHKCFVRVENVKGAVWTVDEVEYQKRRSQKITGSPTLVKNIPTSLGYGAALNASLQAALAESSLPLLSNPGLINNASSGLLQAVHEDLNGSLDHIDSNGNSSPGCSPQPHIHSIHVKEEPVIAEDEDCPMSLVTTANHSPELEDDREIEEEPLSEDLE

SEQ ID NO: 242430 - protein, 530 aa, Artificial Sequence
  derived and/or modified sequence
MMTPQVITPQQMQQILQQQVLSPQQLQALLQQQQAVMLQQQQLQEFYKKQQEQLHLQLLQQQQQQQQQQQQQQQQQQQQQQQQQQQQQQQQQQQQQQQQHPGKQAKEQQQQQQQQQQLAAQQLVFQQQLLQMQQLQQQQHLLSLQRQGLISIPPGQAALPVQSLPQAGLSPAEIQQLWKEVTGVHSMEDNGIKHGGLDLTTNNSSSTTSSNTSKASPPITHHSIVNGQSSVLSARRDSSSHEETGASHTLYGHGVCKWPGCESICEDFGQFLKHLNNEHALDDRSTAQCRVQMQVVQQLEIQLSKERERLQAMMTHLHMRPSEPKPSPKPAIMESSDRQLTLNEIYSWFTRTFAYFRRNAATWKNAVRHNLSLHKCFVRVENVKGAVWTVDEVEYQKRRSQKITGSPTLVKNIPTSLGYGAALNASLQAALAESSLPLLSNPGLINNASSGLLQAVHEDLNGSLDHIDSNGNSSPGCSPQPHIHSIHVKEEPVIAEDEDCPMSLVTTANHSPELEDDREIEEEPLSEDLE

SEQ ID NO: 242431 - protein, 382 aa, Artificial Sequence
  derived and/or modified sequence
MMTPQVITPQQMQQILQQQVLSPQQLQALLQQQQAVMLQQDFLDSGLENFRAALEKNQQLQEFYKKQQEQLHLQLLQQQQQQQQQQQQQQQQQQQQQQQQQQQQQQQQQQQQQQQQHPGKQAKEQQQQQQQQQQLAAQQLVFQQQLLQMQQLQQQQHLLSLQRQGLISIPPGQAALPVQSLPQAGLSPAEIQQLWKEVTGVHSMEDNGIKHGGLDLTTNNSSSTTSSNTSKASPPITHHSIVNGQSSVLSARRDSSSHEETGASHTLYGHGVCKWPGCESICEDFGQFLKHLNNEHALDDRSTAQCRVQMQVVQQLEIQLSKERERLQAMMTHLHMRPSEPKPSPKPNICKVTYRCIWMFLRFSNYAEVLLYIPEKLTPVAL

SEQ ID NO: 242432 - protein, 732 aa, Artificial Sequence
  derived and/or modified sequence
MMQESATETISNSSMNQNGMSTLSSQLDAGSRDGRSSGDTSSEVSTVELLHLQQQQALQAARQLLLQQQTSGLKSPKSSDKQRPLQVPVSVAMMTPQVITPQQMQQILQQQVLSPQQLQALLQQQQAVMLQQDFLDSGLENFRAALEKNQQLQEFYKKQQEQLHLQLLQQQQQQQQQQQQQQQQQQQQQQQQQQQQQQQQQQQQQQQQHPGKQAKEQQQQQQQQQQLAAQQLVFQQQLLQMQQLQQQQHLLSLQRQGLISIPPGQAALPVQSLPQAGLSPAEIQQLWKEVTGVHSMEDNGIKHGGLDLTTNNSSSTTSSNTSKASPPITHHSIVNGQSSVLSARRDSSSHEETGASHTLYGHGVCKWPGCESICEDFGQFLKHLNNEHALDDRSTAQCRVQMQVVQQLEIQLSKERERLQAMMTHLHMRPSEPKPSPKPLNLVSSVTMSKNMLETSPQSLPQTPTTPTAPVTPITQGPSVITPASVPNVGAIRRRHSDKYNIPMSSEIAPNYEFYKNADVRPPFTYATLIRQAIMESSDRQLTLNEIYSWFTRTFAYFRRNAATWKNAVRHNLSLHKCFVRVENVKGAVWTVDEVEYQKRRSQKITGSPTLVKNIPTSLGYGAALNASLQAALAESSLPLLSNPGLINNASSGLLQAVHEDLNGSLDHIDSNGNSSPGCSPQPHIHSIHVKEEPVIAEDEDCPMSLVTTANHSPELEDDREIEEEPLSEDLE

SEQ ID NO: 242433 - protein, 409 aa, Artificial Sequence
  derived and/or modified sequence
MGNSYAGQLKTTRFEEVLHNSIEASLRSNNLVPRPIFSQLYLEAEQQLAALEGGSRVDNEEEEEEGEGGLETNGPPNPFQLHPLPEGCCTTDGFCQAGKDLRLVSISNEPMDVPAGFLLVGVKSPSLPDHLLVCAVDKRFLPDDNGHNALLGFSGNCVGCGKKGFCYFTEFSNHINLKLTTQPKKQKHLKYYLVRNAQGTLTKGPLICWKGSEFRSRQIPASTCSSSLFPALESTAAFPSEPVPGTNPSILMGAQQAGPASDHPSLNAAMGPAVFNGKDSPKCQQLAKNNLLALPRPSALGILSNSGPPKKRHKGWSPESPSAPDGGCPQGGGNRAKYESAGMSCVPQVGLVGPASVTFPVVASGEPVSVPDNLLKICKAKPVIFKVFVNGATQMVALGPAEPASPRSL

SEQ ID NO: 242434 - DNA, 1230 bp, Artificial Sequence
  derived and/or modified sequence
atgggtaatagctacgccggccaactaaaaacgacgcgatttgaggaagtcctccacaacagcatcgaagcaagcttacgaagtaacaacctggtgcccaggcctattttttctcaattgtacttggaggcggagcagcaactcgcagcattagaaggcggctcccgggtcgacaacgaggaagaggaggaagagggagaaggcgggctggagactaacgggccaccgaacccctttcagctccaccccctccctgaaggatgctgtaccactgatgggttttgccaggcaggtaaagacctccgcttagtctccataagcaacgagcccatggacgtgcccgccggattcttactcgtcggtgtgaaaagcccttcccttccagaccacctgcttgtatgtgccgtagataagcgtttcttgcccgatgataatggccacaatgctctgctcggattttcaggcaattgtgtggggtgcggtaaaaaaggcttttgttacttcactgagttttcgaaccatattaacctgaagttaactacccaacccaaaaagcagaaacacctgaaatattacctcgtgcgaaacgcgcagggtacgctgactaagggaccgctgatctgttggaaaggtagtgaatttcgctcccgccagatccccgctagcacatgttctagctctctgttccctgcccttgagtcaaccgcagcattcccaagtgagccagttcctggaaccaatcccagcatcctcatgggggcccagcaggcaggtcctgcttctgatcatccttccctgaatgccgcaatgggccccgcagtgtttaatgggaaggattcccctaagtgtcagcagctagctaagaacaacctcctggctctcccacgccctagtgctcttgggattttgagcaacagtgggccacctaaaaaacgtcataagggttggtctcctgaatccccttccgcgcctgatgggggttgtcctcagggtggcggtaatcgtgctaagtacgagagtgctggcatgtcctgtgtcccacaagtgggattggtcggaccggcttcggtcacctttcccgtcgttgctagtggggagcctgtgtccgtgccggataacctgctgaagatttgtaaagcaaaacccgtcatctttaaagttttcgtgaatggagccacccagatggttgctctgggtcccgccgagccggccagccctcggagcctgtag

SEQ ID NO: 242435 - DNA, 2448 bp, Artificial Sequence
  derived and/or modified sequence
gatactagctctgaaacttttcccctggctggcttggctgcctctccctgccgggcaggggccaggaagcctgggtgtcaggcagacccgagccaggctctgcacagcagggcattacgcgccccacgcatcctcttccatccccaggcacagatcaaaggcgcagcccaggaggcgggagcccctgcacactttccacctctgctgggcttagcctcttggctggttggtctgtggagtgcctgaagtgaccagctttttgtaagtagctgcagctgaggacagccaccctttcttcgtctctgctgagcgaaggctacacggcccttcctccttgcagctgtttcaccttctaccttgcgtggagccaggcttttgcaccgaatctgagatgccattttaaacagaagactccatcctcttgaagatgggaaattcttacgctggacagctgaagacgacacgctttgaagaggtcttgcacaattccatcgaggcatccctgcggtccaacaacctggtgcccaggcccatcttttcccagctgtacctggaagctgagcagcagcttgccgctctagaaggtggtagccgagtggacaatgaggaagaggaagaagagggagaaggagggctggaaacaaatggccccccaaaccctttccagctgcaccctctgcctgaaggatgctgtaccacagacgggttttgccaggccgggaaggacctgcgccttgtctccatttccaacgagcccatggatgtccctgcgggctttctcctcgtgggggtcaagtcccccagcctgccggaccatctcctggtgtgcgccgttgacaagaggttcttgccagatgacaatggccacaatgctcttcttggtttctctgggaattgtgttggctgtggaaagaaaggcttctgttacttcacggaattctccaatcatataaatctgaaactgaccactcaacccaagaagcagaaacacttgaagtattacctggtccgtaatgcacaagggactctaaccaaaggacctttaatctgttggaaaggctcagagtttagaagccggcagatccccgccagtacttgttccagttccctcttcccagccctggagagcacggctgccttccccagcgagcccgttcctgggacgaaccccagcatcctgatgggagctcagcaggcaggaccagcttctgatcacccctcactaaacgcagcaatgggtccggctgttttcaacggcaaagattccccgaagtgccaacaactggcaaagaataacctgttggccctgccgcgaccatcggctttaggtatcttgtcaaactccgggccccccaaaaaacgccacaaagggtggtctccagaatctccatcagctccagatggtggctgcccccaaggtggtgggaacagagctaagtatgagagcgcaggcatgtcctgcgtgccgcaggttggcttggtgggaccagcttcagtcacctttccagtggtggcctctggagaaccagtgtctgttcctgacaacttgctgaaaatatgcaaggccaagccagtgatatttaaagtatttgtaaatggtgctacccaaatggtagcccttggtccggcagaacctgcatcgccccggagcttatgagaggcgtgaattcatggacccatcctggaatcagaatcaggccccacttctgcatcagaagccctgggtggcaccagcaagtgtttggcaagcccttgagaagcagtgtctttgagaacgtgacctgtgccccaggcaccagctttactccccgagcccagcaggacatctgcatataacacacagccgaagtcagaaaatatatttttggtgactaaatggagtacctggagtacaagataacacacacacacacacacacacacacacacacacacacacacacacacgccacctttgggagctcagcagccccgagaggatttgatagcttcaccgcttcacctggttttacaaatgcggagactgaggtttagggcagttaagcttcttgcttagcatcatgtaggtaaagaatggtggaaagatatttgaacccgacctgggcaattccacctctgagggctgtcctcagaatgaatcttctgatgggctgggcacggtggctcacgcctgtaatcccagaactttgagaggccgaggcgggtagatcactttaggtcagaagttcaagatcagcctgggcaacatggtgaaaccttgtctctactaaaaatacaaaaattggccgggtgtggtggtgatgcgcacctgtcatcccagctactcgggaggctgaggtgggagaatcacttgaacttgggaggcagaggttgtggtgagccgagatcacgccactgcactccagcccggggacagagcaagacactgtctcaaaaaaaaaaaaagaa

SEQ ID NO: 242436 - DNA, 1230 bp, Artificial Sequence
  derived and/or modified sequence
atgggcaacagctatgccggccagctgaagaccaccaggtttgaggaggtgctgcacaacagcattgaggccagcctgcggagcaacaacctggtgccccggcccatcttcagccagctgtacctggaggccgagcagcagctggccgccctggagggcggcagccgggtggacaatgaggaggaggaggaggagggggagggcggcctggagaccaatggaccacccaaccccttccagctgcaccccctgcctgagggctgctgcaccacagatggcttctgccaggccggcaaggacctgcggctggtgtccatcagcaatgagcccatggatgtgcctgctggcttcctgctggtgggcgtgaagagccccagcctgcctgaccacctgctggtgtgtgctgtggacaagcgcttcctgcctgatgacaatggccacaatgccctgctgggcttcagcggcaactgtgtgggctgtgggaagaagggcttctgctacttcacagagttcagcaaccacatcaacctgaagctgaccacccagcccaagaagcagaagcacctgaagtactacctggtgagaaatgcccagggcaccctgaccaagggccccctcatctgctggaagggcagcgagttccgcagccggcagatcccagccagcacctgcagcagcagcctcttccctgccctggagagcacagctgccttccccagcgagcctgtgcccggcaccaaccccagcatcctgatgggcgcccagcaggccggccctgccagtgaccaccccagcctgaatgctgccatgggccctgctgtgttcaacgggaaggacagccccaagtgccagcagctggccaagaacaacctgctggccctgccccggcccagcgccctgggcatcctgagcaacagcggcccccccaagaagaggcacaagggctggagccctgagagccccagcgccccagatggcggctgcccccagggcggcggcaacagagccaagtatgagagcgctggcatgagctgtgtgccccaggtgggcctggtgggccctgcctctgtgaccttccctgtggtggccagcggggagcctgtgtctgtgcctgacaacctgctgaagatctgcaaggccaagcctgtgatcttcaaggtgtttgtgaatggagccacccagatggtggccctgggccctgctgagcccgccagccccaggagcctgtag

SEQ ID NO: 242437 - DNA, 1230 bp, Artificial Sequence
  derived and/or modified sequence
atgggcaacagctacgccggccagctgaagaccacccggttcgaggaggtcctccacaattcaatagaggctagcctgaggagcaacaatctggtgcctcggccaattttttcgcagctatatctggaggctgagcaacaattagctgcgctggaaggaggatctagagtcgacaacgaagaggaagaggaggaaggagaagggggcttggagacgaacggcccgccaaacccattccagctccaccctctcccagaaggctgctgcacaactgatggattctgccaggcaggaaaagacctcagactggtatccatctcaaacgagccaatggatgttcccgccggctttctcctcgtgggcgtgaaaagcccctctctccctgaccaccttctggtgtgtgctgtagacaaacggttccttccagacgacaacggccacaacgccctgctgggcttcagtgggaactgtgtcggatgcggcaagaaggggttctgttactttacggagttcagcaatcacatcaacctgaagttaacaacccagcctaaaaagcaaaagcacctgaaatactatctggtgaggaatgctcagggtacactgaccaagggccccctcatctgttggaagggctccgaatttaggtccaggcagattccagcatcgacctgctccagtagtctgttcccagcactcgagagcacggctgcattcccatctgaacccgtgccgggtaccaatccctctattcttatgggcgcacagcaagcaggaccggctagcgaccatccatccctgaatgctgcgatgggtcccgccgtattcaacggcaaggattctcctaagtgccagcaactggccaagaataatctgttggccctgcctcggccttccgcactcggcatccttagcaacagtggtccccccaagaagcgccacaaaggctggtcaccggaaagcccttctgctcctgacggcgggtgcccccaaggagggggcaatagagcaaagtacgagtccgccggaatgagctgcgtgccccaagtagggctcgttgggcctgcttctgtcacgttcccagtggtggcttcaggcgagcccgtgtctgtacccgacaacctactgaaaatatgtaaggcaaagcccgttatcttcaaagtgttcgtcaacggtgccacgcaaatggtggccttgggccccgcggagccagcctctccccggtctctgtag

SEQ ID NO: 242438 - DNA, 1230 bp, Artificial Sequence
  derived and/or modified sequence
atgggcaacagctatgccggtcagctcaagaccacccgtttcgaagaggtgctgcataatagtatcgaagctagcctcaggtccaacaacctcgttcctcgccctatcttttcccagctgtatctggaagccgaacagcagcttgcggcactggagggaggatcccgcgtagacaacgaagaggaggaggaagagggtgagggtggtctggagacaaacggccctccaaatccatttcagctgcaccccctacctgaaggttgctgtacaacagatggtttttgccaggcaggcaaggacttacgcttagtttcgatcagtaatgaacccatggacgtgccagccggatttctccttgtgggcgttaagtctcccagcctgccagatcacctgctggtgtgcgcagttgacaagcggttccttcccgacgacaatggccataacgccctcctgggattcagtgggaactgcgtcggatgcggaaaaaaggggttttgctacttcactgagtttagtaaccatattaatctgaaactgaccacccagcccaagaaacagaagcatttgaagtactatctggtgcggaacgcacagggcactctcaccaagggacctctaatttgctggaaggggagtgagtttaggtccagacaaatccctgcctctacatgctcttcttccctctttcccgctctggagagcactgcagcctttccaagtgagccagttccagggaccaatccgtccattctcatgggtgcacagcaagccggacctgccagcgatcatccatcactaaatgcagcgatgggacccgctgtgttcaacggtaaagacagccctaagtgtcagcagttggccaaaaataacctgctcgccttgccccgaccttcggctcttgggatcttgagcaacagtggcccacctaaaaaaagacataaaggctggtctcctgagagtccgtcagccccagacggtggctgcccccaggggggtgggaacagagcaaagtacgagtcagcaggcatgagctgcgttccccaggttggcttggtcggcccagcatccgttacattccccgtggtagcatcaggcgagcctgtgtctgttcctgataacctgctgaagatatgcaaggctaaacccgtcatcttcaaagttttcgtgaatggagccacccagatggtcgccctgggccctgccgagccggcatccccacggtccttgtag

SEQ ID NO: 242439 - DNA, 1230 bp, Artificial Sequence
  derived and/or modified sequence
atgggcaacagctacgccggccagctgaagaccaccagattcgaggaggtgctgcacaacagcatcgaggccagcctgagaagcaacaacctggtgcccagacccatcttcagccagctgtacctggaggccgagcagcagctggccgccctggagggcggcagcagagtggacaacgaggaggaggaggaggagggcgagggcggcctggagaccaacggcccccccaaccccttccagctgcaccccctgcccgagggctgctgcaccaccgacggcttctgccaggccggcaaggacctgagactggtgagcatcagcaacgagcccatggacgtgcccgccggcttcctgctggtgggcgtgaagagccccagcctgcccgaccacctgctggtgtgcgccgtggacaagagattcctgcccgacgacaacggccacaacgccctgctgggcttcagcggcaactgcgtgggctgcggcaagaagggcttctgctacttcaccgagttcagcaaccacatcaacctgaagctgaccacccagcccaagaagcagaagcacctgaagtactacctggtgagaaacgcccagggcaccctgaccaagggccccctgatctgctggaagggcagcgagttcagaagcagacagatccccgccagcacctgcagcagcagcctgttccccgccctggagagcaccgccgccttccccagcgagcccgtgcccggcaccaaccccagcatcctgatgggcgcccagcaggccggccccgccagcgaccaccccagcctgaacgccgccatgggccccgccgtgttcaacggcaaggacagccccaagtgccagcagctggccaagaacaacctgctggccctgcccagacccagcgccctgggcatcctgagcaacagcggcccccccaagaagagacacaagggctggagccccgagagccccagcgcccccgacggcggctgcccccagggcggcggcaacagagccaagtacgagagcgccggcatgagctgcgtgccccaggtgggcctggtgggccccgccagcgtgaccttccccgtggtggccagcggcgagcccgtgagcgtgcccgacaacctgctgaagatctgcaaggccaagcccgtgatcttcaaggtgttcgtgaacggcgccacccagatggtggccctgggccccgccgagcccgccagccccagaagcctgtag

SEQ ID NO: 242440 - protein, 444 aa, Artificial Sequence
  derived and/or modified sequence
MTMPVNGAHKDADLWSSHDKMLAQPLKDSDVEVYNIIKKESNRQRVGLELIASENFASRAVLEALGSCLNNKYSEGYPGQRYYGGTEFIDELETLCQKRALQAYKLDPQCWGVNVQPYSGSPANFAVYTALVEPHGRIMGLDLPDGGHLTHGFMTDKKKISATSIFFESMPYKVNPDTGYINYDQLEENARLFHPKLIIAGTSCYSRNLEYARLRKIADENGAYLMADMAHISGLVAAGVVPSPFEHCHVVTTTTHKTLRGCRAGMIFYRKGVAVALKQAMTLEFKVYQHQVVANCRALSEALTELGYKIVTGGSDNHLILVDLRSKGTDGGRAEKVLEACSIACNKNTCPGDRSALRPSGLRLGTPALTSRGLLEKDFQKVAHFIHRGIELTLQIQSDTGVRATLKEFKERLAGDKYQAAVQALREEVESFASLFPLPGLPDF

SEQ ID NO: 242441 - DNA, 1335 bp, Artificial Sequence
  derived and/or modified sequence
atgactatgccggtaaacggagcacataaggatgccgacttatggtcctcccacgataagatgctggcccagcctctaaaggatagtgatgtggaggtgtacaacattattaagaaggaatccaacagacaaagagttggactggagctcatcgcaagtgagaattttgcctcacgcgcggtgctggaggctttggggtcatgtttgaataataaatatagcgagggctacccggggcagcggtactacggaggcaccgaattcattgatgagctggaaaccctctgtcagaaacgagcccttcaggcctataagctcgaccctcagtgttggggggtgaatgtgcagccttactccggatcacctgcaaactttgccgtgtatacagcgctggtagagccacatgggaggataatgggattggacttacctgacggaggacacttaacacacggcttcatgacagacaagaaaaaaatcagcgctactagtatattcttcgagtccatgccgtacaaggtaaaccccgataccgggtacataaactacgatcagctggaagagaatgctcgcctctttcatccgaaactcataattgctgggactagctgctattcgagaaacctggaatacgctcgtctgagaaaaatcgcagatgagaatggcgcctatctgatggccgacatggcccacatctccggactagtggccgctggcgttgtgccctccccattcgaacactgccacgtggtgaccacaaccacccacaaaacgctgagaggctgtagggcaggcatgatcttctatcgcaagggggtcgccgtggctctgaaacaggctatgaccctggagtttaaagtgtaccagcatcaggtcgtggctaactgtagagctttgtccgaagctctgactgagcttgggtacaagatcgttactggtgggagcgataatcatcttattctggtcgacctcagatcgaaagggactgatggaggcagggctgagaaggtcctggaagcatgttccatagcctgcaataaaaatacatgtcccggagaccgctccgctttaaggcccagcggcttacgtctgggtacccctgccctgaccagccgcgggcttctagaaaaagatttccagaaggtggcacacttcatccaccggggaatcgagcttactctacagatccagtccgatacgggcgtgagggcaactctgaaggagttcaaagagcgcttagctggcgacaagtaccaagctgctgtccaggccctcagggaggaggtggaaagctttgcatctctctttccgctgccaggactgcctgacttctag

SEQ ID NO: 242442 - DNA, 1335 bp, Artificial Sequence
  derived and/or modified sequence
atgaccatgcctgtgaatggagcccacaaggatgctgacctgtggagcagccatgacaagatgctggcccagcccctgaaggacagtgatgtggaggtgtacaacatcatcaagaaggagagcaaccggcagagggtgggcctggagctgattgccagcgagaactttgccagcagagctgtgctggaggccctgggcagctgcctgaacaacaagtacagcgagggctacccaggccagcgctactatggaggaacagagttcattgatgagctggagaccctgtgccagaagagggccctgcaggcctacaagctggacccccagtgctggggcgtgaatgtgcagccctacagcggcagccctgccaactttgctgtgtacacagccctggtggagccccacggccgcatcatgggcctggacctgcctgatggcggccacctgacccacggcttcatgacagacaagaagaagatcagcgccaccagcatcttctttgagagcatgccctacaaggtgaacccagacaccggctacatcaactatgaccagctggaggagaatgcccggctcttccaccccaagctgatcatcgccggcaccagctgctacagcaggaacctggagtatgcccggctgaggaagattgctgatgaaaatggagcctacctgatggctgacatggcccacatcagcggcctggtggccgccggcgtggtgcccagcccctttgagcactgccacgtggtgaccaccaccacccacaagaccctgcggggctgccgggccggcatgatcttctacagaaaaggagtggccgtggccctgaagcaggccatgaccctggagttcaaggtgtaccagcaccaggtggtggccaactgccgggccctgtctgaggccctgacagagctgggctacaagatcgtgactggaggcagtgacaaccacctgatcctggtggacctgcggagcaaaggaacagatggcggccgggcagagaaggtgctggaggcctgcagcatcgcctgcaacaagaacacctgccctggggacagaagtgccctgcggcccagcggcctgcggctgggcaccccagccctgaccagccggggcctgctggagaaggacttccagaaggtggcccacttcatccaccggggcatcgagctgaccctgcagatccagagcgacaccggggtgcgggccaccctgaaggagttcaaggagcggctggccggggacaagtaccaggccgctgtgcaggccctgcgggaggaggtggagagctttgccagcctcttccccctgcccggcctgcctgacttctag

SEQ ID NO: 242443 - DNA, 1335 bp, Artificial Sequence
  derived and/or modified sequence
atgaccatgcccgtgaacggcgcccacaaggacgccgacctgtggtcctcacatgataaaatgctggcccaacccctcaaagactctgatgttgaggtgtataacatcatcaagaaggagtctaaccggcagcgagtgggtttggagctgatcgccagtgaaaacttcgcgtcccgcgctgtacttgaggcacttggttcatgcctcaacaacaaatacagcgagggctaccccgggcagcgctactatggcggtacagaattcattgacgagctggaaactctatgccaaaagcgagccctgcaggcctacaagctggacccacaatgttggggcgtcaacgtgcagccctactcaggtagtcccgctaattttgctgtgtatacagcactcgtggagccccatggaagaattatgggtctagacctgccggacggtgggcatttgactcacggcttcatgactgacaaaaagaagatctctgcaaccagcatttttttcgagtcaatgccttataaagtcaacccggacaccggctatatcaattatgatcagctcgaagaaaacgctagattattccatcccaaactgataatagcaggaacaagttgctacagcaggaacttagagtacgcaagactacggaaaattgccgatgagaatggagcttatctgatggctgacatggcccatatctccggtctcgtcgccgctggtgtggttccttcgccatttgagcactgccacgttgtgaccactaccacccataagacccttcgcgggtgccgggctgggatgatcttttaccgcaaaggagtggccgtcgcactaaagcaggctatgactcttgaatttaaggtataccagcatcaggtggtcgcaaactgtagggcattgagcgaggcacttactgaactagggtataagattgtaacagggggctccgacaatcaccttattcttgtagacttgagaagcaaaggaacagatggaggacgagcagagaaggtccttgaggcctgttcaatcgcatgtaacaaaaatacctgccccggagacaggtccgcactgcgcccttcaggcttgaggctaggcacccctgctctcacctcccgtggcctcttggaaaaggacttccagaaggttgcccactttattcaccgtggtattgagctcactctgcagatccaatccgacaccggcgtgcgggccactctcaaggagttcaaagaacgcctggctggcgataaatatcaagccgccgtgcaagctctgagagaggaagtggagagcttcgcgagcctcttccccttacccggcttgccagacttctag

SEQ ID NO: 242444 - DNA, 1335 bp, Artificial Sequence
  derived and/or modified sequence
atgacaatgcccgtaaacggggctcataaggacgccgacctctggtctagtcacgataaaatgctcgcccagccactcaaagattctgacgtggaggtgtataatattattaaaaaagaatcaaaccgccagcgtgttggacttgaactgattgcatccgagaacttcgccagtcgcgcagttctcgaggccctgggctcttgcctgaacaataagtactctgagggctatcccggacaaaggtactacggaggtaccgagttcatcgacgagctcgaaacactctgccagaagagagctttgcaggcttacaagctcgacccccagtgttggggggtcaacgtacagccctactccgggtcaccggctaactttgccgtctatacagctttggtggagccgcacggccgaattatgggactggacttgcctgacggtggacacctgacccacggcttcatgaccgacaaaaaaaagataagtgctacctctattttctttgaaagtatgccatacaaagtaaaccccgacacagggtacatcaactatgatcagctggaggaaaacgcgagactctttcaccccaaactcatcatagcaggcaccagctgttacagcaggaatctcgagtacgccaggctgaggaaaattgccgatgagaacggcgcatacctgatggcagacatggctcacatctccggcctggtagcggctggagtcgtgccctcacccttcgagcattgtcatgtcgtgactactacaacgcacaagactcttcggggatgtagggccggtatgattttttaccgcaaaggagttgccgtggccctgaaacaggccatgacactggagtttaaagtgtatcagcatcaggtggtggccaattgtcgcgcattatccgaagcactgacagagctgggatacaaaatcgtgactggaggatccgataaccacctgatactggtggacctccgaagcaaagggacggatgggggtagagctgagaaagtgctggaggcctgcagcatagcctgcaataaaaatacatgtcctggcgatcgtagcgccctgcggccaagtgggctcagactgggcacacccgctctgacgagtcggggactgctggagaaggactttcagaaggtggctcattttatacatagggggatcgaactcacactgcaaatccaatctgatacaggcgtgagagcaactctgaaggagtttaaggagaggttagccggagataaataccaggccgctgtgcaggcgctgcgcgaagaagtagagtcctttgcctccctttttcctcttcccggactgcccgatttttag

SEQ ID NO: 242445 - DNA, 1656 bp, Artificial Sequence
  derived and/or modified sequence
cgcggcggtgcgcggggcgttgggtcagcgggtctgggactggtggcaccggcggcggcgtaggacggaggcgtcgctaggcagcttcgaaccagtgcaatgacgatgccagtcaacggggcccacaaggatgctgacctgtggtcctcacatgacaagatgctggcacaacccctcaaagacagtgatgttgaggtttacaacatcattaagaaggagagtaaccggcagagggttggattggagctgattgcctcggagaatttcgccagccgagcagttttggaggccctaggctcttgcttaaataacaaatactctgaggggtacccgggccagagatactatggcgggactgagtttattgatgaactggagaccctctgtcagaagcgagccctgcaggcctataagctggacccacagtgctggggggtcaacgtccagccctactcaggctcccctgcaaactttgctgtgtacactgccctggtggaaccccatgggcgcatcatgggcctggaccttccggatgggggccacctgacccatgggttcatgacagacaagaagaaaatctctgccacgtccatcttctttgaatctatgccctacaaggtgaacccagatactggctacatcaactatgaccagctggaggagaacgcacgcctcttccacccgaagctgatcatcgcaggaaccagctgctactcccgaaacctggaatatgcccggctacggaagattgcagatgagaacggggcgtatctcatggcggacatggctcacatcagcgggctggtggcggctggcgtggtgccctccccatttgaacactgccatgtggtgaccaccaccactcacaagaccctgcgaggctgccgagctggcatgatcttctacaggaaaggggttgctgtggcactgaagcaagctatgactctggaatttaaagtttatcaacaccaggtggtggccaactgcagggctctgtctgaggccctgacggagctgggctacaaaatagtcacaggtggttctgacaaccatttgatccttgtggatctccgttccaaaggcacagatggtggaagggctgagaaggtgctagaagcctgttctattgcctgcaacaagaacacctgtccaggtgacagaagcgctctgcggcccagtggactgcggctggggaccccagcactgacgtcccgtggacttttggaaaaagacttccaaaaagtagcccactttattcacagagggatagagctgaccctgcagatccagagcgacactggtgtcagagccaccctgaaagagttcaaggagagactggcaggggataagtaccaggcggccgtgcaggctctccgggaggaggttgagagcttcgcctctctcttccctctgcctggcctgcctgacttctaaaggagcgggcccactctggacccacctggcgccacagaggaagctgcctgccggaggacccccacctgagagatggatgagctgctccaaaggggaactgttgacactcgggccctttgagggggtttcttttggacttttttcatgttttcttcacaaatcaaaatttgtttaagtctcattgttagtaattctgggacaggttattaaaggatttaaatt

SEQ ID NO: 242446 - DNA, 1335 bp, Artificial Sequence
  derived and/or modified sequence
atgaccatgcccgtgaacggcgcccacaaggacgccgacctgtggagcagccacgacaagatgctggcccagcccctgaaggacagcgacgtggaggtgtacaacatcatcaagaaggagagcaacagacagagagtgggcctggagctgatcgccagcgagaacttcgccagcagagccgtgctggaggccctgggcagctgcctgaacaacaagtacagcgagggctaccccggccagagatactacggcggcaccgagttcatcgacgagctggagaccctgtgccagaagagagccctgcaggcctacaagctggacccccagtgctggggcgtgaacgtgcagccctacagcggcagccccgccaacttcgccgtgtacaccgccctggtggagccccacggcagaatcatgggcctggacctgcccgacggcggccacctgacccacggcttcatgaccgacaagaagaagatcagcgccaccagcatcttcttcgagagcatgccctacaaggtgaaccccgacaccggctacatcaactacgaccagctggaggagaacgccagactgttccaccccaagctgatcatcgccggcaccagctgctacagcagaaacctggagtacgccagactgagaaagatcgccgacgagaacggcgcctacctgatggccgacatggcccacatcagcggcctggtggccgccggcgtggtgcccagccccttcgagcactgccacgtggtgaccaccaccacccacaagaccctgagaggctgcagagccggcatgatcttctacagaaagggcgtggccgtggccctgaagcaggccatgaccctggagttcaaggtgtaccagcaccaggtggtggccaactgcagagccctgagcgaggccctgaccgagctgggctacaagatcgtgaccggcggcagcgacaaccacctgatcctggtggacctgagaagcaagggcaccgacggcggcagagccgagaaggtgctggaggcctgcagcatcgcctgcaacaagaacacctgccccggcgacagaagcgccctgagacccagcggcctgagactgggcacccccgccctgaccagcagaggcctgctggagaaggacttccagaaggtggcccacttcatccacagaggcatcgagctgaccctgcagatccagagcgacaccggcgtgagagccaccctgaaggagttcaaggagagactggccggcgacaagtaccaggccgccgtgcaggccctgagagaggaggtggagagcttcgccagcctgttccccctgcccggcctgcccgacttctag

SEQ ID NO: 242447 - protein, 276 aa, Artificial Sequence
  derived and/or modified sequence
MALLDVCGAPRGQRPESALPVAGSGRRSDPGHYSFSMRSPELALPRGMQPTEFFQSLGGDGERNVQIEMAHGTTTLAFKFQHGVIAAVDSRASAGSYISALRVNKVIEINPYLLGTMSGCAADCQYWERLLAKECRLYYLRNGERISVSAASKLLSNMMCQYRGMGLSMGSMICGWDKKGPGLYYVDEHGTRLSGNMFSTGSGNTYAYGVMDSGYRPNLSPEEAYDLGRRAIAYATHRDSYSGGVVNMYHMKEDGWVKVESTDVSDLLHQYREANQ

SEQ ID NO: 242448 - protein, 252 aa, Artificial Sequence
  derived and/or modified sequence
MALLDVCGAPRGQRPESALPVAGSGRRSDPGHYSFSMRSPELALPRGMQPTEFFQSLGGDGERNVQIEMAHGTTTLAFKFQHGVIAAVDSRASAGSYINCQYWERLLAKECRLYYLRNGERISVSAASKLLSNMMCQYRGMGLSMGSMICGWDKKGPGLYYVDEHGTRLSGNMFSTGSGNTYAYGVMDSGYRPNLSPEEAYDLGRRAIAYATHRDSYSGGVVNMYHMKEDGWVKVESTDVSDLLHQYREANQ

SEQ ID NO: 242449 - protein, 276 aa, Artificial Sequence
  derived and/or modified sequence
MALLDVCGAPRGQRPESALPVAGSGRRSDPGHYSFSMRSPELALPRGMKPTEFFQSLGGDGERNVQIEMAHGTTTLAFKFQHGVIAAVDSRASAGSYISALRVNKVIEINPYLLGTMSGCAADCQYWERLLAKECRLYYLRNGERISVSAASKLLSNMMCQYRGMGLSMGSMICGWDKKGPGLYYVDEHGTRLSGNMFSTGSGNTYAYGVMDSGYRPNLSPEEAYDLGRRAIAYATHRDSYSGGVVNMYHMKEDGWVKVESTDVSDLLHQYREANQ

SEQ ID NO: 242450 - protein, 252 aa, Artificial Sequence
  derived and/or modified sequence
MALLDVCGAPRGQRPESALPVAGSGRRSDPGHYSFSMRSPELALPRGMKPTEFFQSLGGDGERNVQIEMAHGTTTLAFKFQHGVIAAVDSRASAGSYINCQYWERLLAKECRLYYLRNGERISVSAASKLLSNMMCQYRGMGLSMGSMICGWDKKGPGLYYVDEHGTRLSGNMFSTGSGNTYAYGVMDSGYRPNLSPEEAYDLGRRAIAYATHRDSYSGGVVNMYHMKEDGWVKVESTDVSDLLHQYREANQ

SEQ ID NO: 242451 - DNA, 831 bp, Artificial Sequence
  derived and/or modified sequence
atggctctcctggacgtgtgcggagccccacggggacagcgccccgagtccgctttgcccgtggctggcagcggccgaagatccgaccccgggcattactcttttagtatgcggtcaccggagctggccttgccaaggggaatgcagccaacagaattcttccagtctctgggaggagacggggaaaggaacgtacagatcgagatggctcatggtactaccacacttgccttcaagttccagcacggcgtcatagcggctgtggactccagggcttctgccgggagctatatcagcgcgctaagagtgaataaggtcatcgaaatcaatccctacctccttggtacaatgtctggttgtgccgcggactgtcagtattgggagcgcctgctggcaaaggagtgccggttgtattatttgcgcaatggagagcgaatcagtgtgagtgcagcctcaaagttgctcagcaacatgatgtgccagtaccgaggaatgggcctgtccatggggtcaatgatttgtggctgggataagaagggtcccggactttactacgtggacgaacacggtactagactttcaggaaacatgttttccactggttccggaaatacctatgcttacggagtgatggactctggctacagaccaaatctttcaccagaggaggcttacgatttggggagacgtgccatagcctatgcgacccaccgggactcttactcaggcggcgtggtaaacatgtatcatatgaaggaggacggttgggtgaaagtcgaatcaactgacgtgtcagatttgctccatcaatatcgggaggccaaccagtag

SEQ ID NO: 242452 - DNA, 831 bp, Artificial Sequence
  derived and/or modified sequence
atggcacttctggacgtctgcggagctccccgagggcagaggccagaatccgcactccccgtcgctggaagcggaaggagatcagaccccggccactacagctttagtatgaggtcgccagaactggcacttcctcgaggtatgcagcctacagagttctttcagtcgttaggaggcgatggggaaaggaatgttcagatcgaaatggcacatggaacaacaactctggctttcaaattccagcatggcgttatcgcagctgtggattctagagcttcagccggttcctacatctctgctttgcgggtgaataaagttatcgaaatcaacccatacctcctcggcactatgtccggatgcgcagccgattgccagtactgggagcggcttcttgccaaggagtgtaggctgtactatctgcggaacggagaaaggattagtgtttccgcggcctccaagctgctgagtaatatgatgtgccagtaccggggaatgggcctctctatgggttcaatgatttgcgggtgggacaagaaagggccagggctgtactacgtggatgagcacgggaccagactgtccggaaacatgttctccactggctcaggcaacacttatgcctacggagtgatggatagcggctacaggccgaatctgagtccagaagaagcgtatgatttaggcagacgggctatcgcctatgccacccatagagattcttactctggcggagtcgtaaatatgtatcacatgaaggaggacggctgggtcaaagtggagtccacagacgtgagtgacctattgcatcaatatcgcgaggccaaccagtag

SEQ ID NO: 242453 - DNA, 759 bp, Artificial Sequence
  derived and/or modified sequence
atggccctcttagatgtgtgcggtgcccctaggggacagaggccagaatccgcgttaccagttgcaggatctggaaggcgttctgatcccggacattacagctttagtatgagaagtcctgagctggcccttcctagagggatgcaacccacggagttctttcaaagtctgggcggagacggcgagaggaatgtgcagatcgagatggcacatgggaccacaaccctagcttttaaatttcagcatggcgtgattgccgctgtggactctcgggcatctgccggctcctacattaactgccaatattgggagcgcctgcttgccaaagaatgtaggttgtactatcttcgaaatggcgagcggattagtgtctccgctgcttcaaagttactttctaacatgatgtgccagtatcgtggaatggggctgagcatgggatcaatgatctgcggctgggataaaaagggcccaggattatattatgtcgatgaacacggcacacggctcagcggcaatatgttctccaccggctccggcaacacatatgcatatggagtgatggatagcggctaccgcccaaatctgtcgccagaggaggcctacgacctggggcgtagagcaattgcttatgctacacatagggactcgtattcggggggggtcgttaacatgtaccatatgaaggaggatgggtgggtgaaagtggaatctaccgatgtgtctgatctgctccaccagtatcgggaagctaaccaatag

SEQ ID NO: 242454 - DNA, 759 bp, Artificial Sequence
  derived and/or modified sequence
atggcactgctggacgtgtgcggcgctcccagaggccagagacctgaaagcgccctgcctgttgccggctcaggacggcgaagtgatccaggccactactccttttccatgagatcccccgagctggctttgcccagaggcatgcagcccaccgagttctttcagagtttaggcggagacggtgagagaaacgtgcagattgagatggcgcacgggaccacgactctcgccttcaagtttcagcacggagtgatcgctgccgttgacagtagagcatctgccggtagctacatcaattgtcagtattgggagcggttactcgctaaggaatgccgtctgtattacctacgtaatggggagaggataagcgtgtcagccgcgtccaaactgttgtctaatatgatgtgccagtacaggggaatgggtttgtcaatgggatccatgatttgtggatgggataagaagggacccggtctatactacgttgatgaacacggtacccggctgtctggcaatatgttttcaacaggttccggtaatacatacgcatacggcgtgatggactccggataccgtcccaatctgtctccagaggaagcatacgacttaggccgccgggctatcgcgtacgctacacatagggattcatactctggcggcgttgtgaacatgtaccatatgaaggaggacggctgggttaaggtcgagagcacggatgtcagcgacctgttgcatcaatatcgagaagcaaatcagtag

SEQ ID NO: 242455 - DNA, 831 bp, Artificial Sequence
  derived and/or modified sequence
atggccttgctggatgtgtgtggggcaccacggggccagagacctgaaagcgccctacctgtggctggatctggcagaaggtccgatccaggacactattcattcagcatgagatcgcctgagctagccctcccaagaggtatgcagcccaccgaattcttccaatctctgggaggcgatggcgagcggaacgtacagattgaaatggcccatggcacaactaccctggccttcaagtttcagcacggcgtaatagctgcagttgatagccgcgcaagtgccgggtcctatattagcgcgcttcgcgtgaataaggtgatagagatcaatccgtacctgctcggtaccatgagcggctgcgccgccgactgccaatattgggagaggctcctggcaaaggagtgtaggctatactacctgcgtaacggagaaagaatttcagtaagcgctgcaagtaaattgctgagcaatatgatgtgtcaataccgcggtatgggactgagcatgggtagcatgatctgcggatgggacaagaagggacctgggctgtactacgtggacgagcacgggactcggttgagtggcaatatgtttagtaccggttctgggaacacttatgcgtatggggttatggattctgggtaccggccaaacctcagccccgaagaagcgtatgatcttggaagaagagccatcgcctacgccacacaccgcgacagttatagcggtggagtcgttaatatgtaccatatgaaggaggatggttgggtcaaggtggagtccaccgatgtgagcgacctgttgcaccagtatcgagaagctaaccagtag

SEQ ID NO: 242456 - DNA, 759 bp, Artificial Sequence
  derived and/or modified sequence
atggcgctattggacgtctgcggcgcccccagaggacagagacccgaatctgccctgcctgtagccggaagcggtcggaggtccgaccctgggcactatagtttctctatgaggtcccctgagctggcccttccaagaggaatgcagccaaccgaattttttcagagtctgggtggggacggggaacgaaatgttcaaattgaaatggcacacggaacgaccacacttgccttcaagtttcagcacggagtaatagctgccgtggactcccgcgcatctgcaggtagttatatcaactgtcagtactgggagcgtctcttggctaaggaatgccgactgtattatctcagaaatggtgaacgtatctcggttagcgccgccagcaaactgttatcaaatatgatgtgccaatatagaggaatgggcctaagcatgggatctatgatctgtggatgggacaagaaggggcctgggctgtattatgtcgatgaacatggcacaagactgtcggggaacatgttcagcaccggaagcgggaatacatacgcatatggggtgatggatagcggctaccgcccgaatctgagccccgaagaagcttacgacctgggccgacgagctatagcatatgccactcaccgtgatagctactcagggggcgtggtcaatatgtatcacatgaaggaggacggctgggtcaaagtggagtccaccgatgtgtctgacctgcttcaccagtatcgggaggcaaaccagtag

SEQ ID NO: 242457 - DNA, 759 bp, Artificial Sequence
  derived and/or modified sequence
atggctctgctggacgtgtgcggagcaccaaggggccagcgacctgagtccgccctgcctgttgctgggtctgggcggaggagcgacccgggccattactcattctccatgcggtcccccgaattggctctgccacggggaatgcaaccaaccgagttttttcagtccctgggaggggacggggaaaggaacgttcaaattgagatggcacacggaacaacaacgctggcatttaaattccagcatggggtcattgcagccgtggattccagggcatcagccggcagttacataaattgccagtattgggaaaggctcctggccaaagagtgtcggttatattaccttaggaatggcgagaggatcagcgtttccgcggcttcgaagctcctaagcaatatgatgtgtcaataccggggaatgggactgtctatgggtagcatgatatgtgggtgggataagaaaggtcctggcctgtattacgtagacgaacatggcacaaggttgagtgggaacatgttttccacgggcagcggaaacacctacgcttatggcgtgatggattccggatatagacccaatttaagtcccgaggaggcctatgaccttgggcgtcgggccatagcttatgcgacgcatcgcgactcctacagtggaggcgtagttaatatgtatcatatgaaggaggatggttgggtgaaagtcgagtctaccgatgtctctgacctgctgcaccagtaccgggaagcaaatcagtag

SEQ ID NO: 242458 - DNA, 831 bp, Artificial Sequence
  derived and/or modified sequence
atggcattgcttgacgtgtgtggcgcccctaggggccagagaccggaaagcgcgttacctgtggcagggtccgggcggcggtccgacccgggccactactcgttctccatgcgcagcccggagcttgcattgcccaggggcatgcaacctacggagttttttcagtccctgggaggggacggtgagcggaatgttcagattgagatggcccatggaacaaccaccttggcatttaaatttcagcacggcgtgatagccgctgtcgattccagagctagcgccgggtcttatatttcagctctgagagtgaataaggtcattgagatcaatccctacctgcttggaactatgtccggctgtgcggcagattgccagtactgggaaaggctgctcgccaaagagtgcaggctctattacctcagaaatggcgaacgcatcagcgtgtcggctgcttcaaaactgctttctaacatgatgtgccaatatcgcggcatgggcctgtcgatgggctccatgatctgtgggtgggacaagaaaggacccggactctattacgtcgatgaacacgggactcggttaagcggtaacatgttcagcaccggcagtggaaacacatatgcttatggtgtgatggatagcggatataggccaaatctgtccccggaagaagcgtatgatctgggtaggcgagctattgcttacgctacacaccgggattcctactccggcggtgtggtgaacatgtatcacatgaaggaggacggctgggtaaaggttgaaagcactgatgttagcgaccttctgcaccaatatagggaggccaaccagtag

SEQ ID NO: 242459 - DNA, 831 bp, Artificial Sequence
  derived and/or modified sequence
atggccctgctggacgtatgcggtgcacctcggggtcagaggcctgaatcggcattacctgtggctggctccgggcggagaagtgatcccggacactactcatttagtatgagatcacctgagctcgcgttgcccagaggcatgcagcccaccgaattctttcagtccctcggtggagacggagagagaaacgtgcagatcgagatggcgcacggcacaaccacccttgccttcaagtttcagcatggtgtcattgcagctgttgatagtcgggcctccgccgggagttacattagcgccctcagggttaataaggtgattgagattaatccatatctcctgggcaccatgagcggatgtgccgcagattgtcaatactgggagagactgctcgcaaaagaatgcagactgtattacttacggaacggagagcgcattagtgtctctgcggccagcaaactgctcagcaatatgatgtgtcagtatcgggggatgggcctgagcatgggaagtatgatttgcgggtgggacaagaaaggtcctggtctgtactacgtggatgagcatggcacaagactgtcggggaacatgtttagcaccggcagtggtaacacatacgcctacggcgtcatggacagcggttacagaccgaatctcagcccggaagaagcctatgacctgggacggagagcgatcgcatacgccactcatagagatagttacagcggaggcgtagtcaatatgtaccacatgaaggaagatggctgggttaaagtggaaagtacagatgtgtcagacttgttacaccagtatcgtgaagccaatcagtag

SEQ ID NO: 242460 - DNA, 831 bp, Artificial Sequence
  derived and/or modified sequence
atggcattgttagatgtctgcggagcacccagggggcagaggccagaaagcgcacttcccgtagctggcagtgggcgccgaagtgaccctggccactactccttttcaatgaggtcaccagaactggctttgcctcgtgggatgaagccaaccgagtttttccaaagccttggtggcgacggggaacgtaacgtgcagatcgagatggcgcacggcaccactaccctggcctttaagtttcagcacggagttattgccgctgtcgactcccgtgcttctgcagggtcatatattagtgctctgcgcgtgaataaggtcattgagattaacccatacctcctcggtacgatgtcaggctgtgctgccgactgccagtactgggagagattattggctaaagagtgtcgcctgtattacctgcggaacggggaacgcatttccgtgtcagcagcgtcaaagttgctatccaatatgatgtgccaatatcgcgggatggggctttcgatggggtctatgatctgcggttgggataagaaaggacctggactgtattatgtcgacgaacatggtactcgtctttccgggaacatgttctctactggttcgggcaacacctatgcgtacggtgtcatggattcaggctaccgcccaaacttgtcccccgaggaagcctatgacctggggagacgcgctattgcatatgctacccaccgagatagctactctggcggcgtcgttaatatgtaccacatgaaggaggacggctgggtgaaagttgagtccacagatgtgtccgatttgctgcaccagtatagagaagccaatcaatag

SEQ ID NO: 242461 - DNA, 759 bp, Artificial Sequence
  derived and/or modified sequence
atggctctgctggatgtgtgcggggcaccccgcggacaacggcctgaatctgccctccctgtggctggctccggccggaggtctgatcccggtcactattcgttcagcatgagatcccctgagcttgcccttcctcgaggaatgcagcctacagagttctttcaatcactgggaggagacggggaacgaaacgtccaaatcgagatggcccatggaacgaccaccctggcttttaagttccagcacggagtgatcgcagctgtggattcaagagcatccgcaggatcttatatcaactgtcagtattgggaaaggctgctagctaaggaatgcaggctatactatctcagaaatggagagcgcatcagcgtctcggcggcctccaagctgttatctaatatgatgtgccagtatcggggcatgggattgagcatggggagcatgatctgtggatgggacaaaaaaggtcccggtctgtattacgtcgatgagcatggtactcgtctatcaggcaacatgttttccactggatctggcaatacttatgcttatggcgtgatggatagtggatacagaccaaacctgtcaccggaggaagcctatgatctcgggcggcgggcaatcgcctatgcaacccaccgcgattcctactcaggtggggttgtgaacatgtatcatatgaaggaggatggttgggtcaaagttgagagtacagatgtttctgacttactgcatcaatacagggaggccaatcaatag

SEQ ID NO: 242462 - DNA, 759 bp, Artificial Sequence
  derived and/or modified sequence
atggcactactggacgtctgcggcgccccccgaggacagaggcctgagtctgctctgcccgtggctggctctggtaggcggtcagatcctggccactactccttcagcatgcggtctccagagcttgccctgcctcgcggaatgcagcctacagagttctttcagtcccttggcggcgacggggagcgcaacgtacagatcgagatggcccacgggacaactacgctggcttttaaatttcagcatggcgtgatcgctgctgtggactctagagccagtgctggttcctacatcaattgccagtattgggaacggttactcgcaaaagagtgccgtctttactatctacgcaatggcgaacgaatctccgtcagcgcagcttctaaactgctgagcaacatgatgtgccagtaccggggaatggggctgtcaatggggagcatgatctgcggttgggacaaaaaaggacccggactttactacgtggacgaacacggtactagactgtctggaaacatgttctcaacagggtctggaaacacctacgcttacggtgtgatggattctggttaccgaccaaacttgagtcctgaggaggcgtatgatctgggtcggagggctatcgcctatgcgacacaccgggattcctactctggtggagtagtgaacatgtaccacatgaaagaagatggctgggtgaaggtagaaagcactgatgtcagcgatttgctacatcagtatcgggaagccaaccagtag

SEQ ID NO: 242463 - DNA, 759 bp, Artificial Sequence
  derived and/or modified sequence
atggcattgctagacgtttgtggggcaccccgggggcaaagaccagagtctgcgttgcctgtggcaggctctggccgtcgctctgatcccgggcattacagcttttctatgcgatcacctgagctcgcacttccgaggggaatgaagcctactgagttctttcagtcgttaggaggcgacggggagaggaacgtgcagatagagatggctcacgggacgacaactttggccttcaagttccagcatggcgtgatcgcagccgttgattctcgtgcaagcgctggcagctacataaactgtcagtattgggagcgacttcttgccaaagaatgtcgattgtactacttgcgaaatggagaaaggatatccgtgtctgcggcctctaagctgctgagcaacatgatgtgtcaatacagaggaatgggactcagtatgggatcaatgatttgtggatgggataagaaagggccaggcctgtattatgtggatgagcacggcactcggctgtccggcaatatgttctctacagggtccggtaatacatacgcatacggcgtcatggactccggttacagacctaaccttagtcccgaggaggcttatgatctgggccgtagagctatagcgtatgccacgcaccgggactcctacagtggcggagtcgttaacatgtatcatatgaaagaagacggttgggtaaaggtcgaatctactgatgtctcagacctcctccaccaataccgtgaggccaaccaatag

SEQ ID NO: 242464 - DNA, 831 bp, Artificial Sequence
  derived and/or modified sequence
atggctctactcgacgtctgtggcgcaccccgcggccaaagaccagaaagcgctctccccgtggcagggtcaggaagacgctccgaccccggacactactccttttccatgcggtctcccgagcttgccctgccacggggcatgcaaccaactgagttttttcaatccctcggcggcgacggtgagcgaaatgtacagattgagatggcccacggtaccactaccctagctttcaaattccagcatggagtgattgcggcagtggactctcgcgccagcgccggctcttatatttctgcacttagagtcaataaagtcatcgagattaacccttaccttctgggcaccatgtctggatgcgcagccgattgccagtattgggagcgactgcttgcgaaagaatgcagactgtattacctgaggaacggcgagcggattagcgttagcgcagcctccaagctgcttagcaatatgatgtgtcagtacagagggatggggttgtctatggggagcatgatatgcgggtgggataagaagggtcctggtttatattacgtagacgaacatggcacgcggctaagtgggaatatgttctcaacgggttccggtaatacgtatgcctacggcgtcatggactcaggatacaggccaaacttgagtcctgaggaagcgtatgatcttggacggcgcgccatagcctatgcaacccaccgggatagctacagtggcggtgtagtaaacatgtaccacatgaaagaagatggctgggttaaggtggaatctaccgacgtgagcgatcttctgcatcagtaccgggaagctaaccagtag

SEQ ID NO: 242465 - DNA, 831 bp, Artificial Sequence
  derived and/or modified sequence
atggctcttctggacgtgtgcggggcaccaagaggccagagacccgagtctgccctcccagtggctggtagcgggcgccgtagtgaccccggccactatagcttttctatgcgctcacccgaactggccttgcctcgtggtatgcaaccaaccgagttcttccaatctttgggaggggacggagagcgcaatgtccagatcgaaatggcccacgggaccaccaccctggcctttaagttccagcacggcgtgatcgcggctgttgacagcagggcctccgccggctcctacatctctgcactgcgcgttaacaaagttattgagatcaacccctatctcctcggcaccatgtcgggatgcgcagctgattgtcaatattgggagcgtctcctagccaaggagtgccgtctctattatctgcgaaatggcgagcggatcagtgtctctgctgccagcaagttgctgtctaacatgatgtgtcaatacagggggatgggactgtccatgggcagcatgatctgtggatgggataagaaggggccaggactctattatgttgatgaacatggtacaaggctttcaggtaatatgttctccacgggatccggcaacacgtacgcatatggagtaatggattccggataccgccccaacctttccccagaagaagcctatgatctaggcagaagagccatcgcatatgccacccatcgagacagctactccggcggcgtcgtcaacatgtaccatatgaaggaagatggctgggtgaaagtggaaagcaccgatgtgagcgatttgcttcatcagtacagggaggcaaaccaatag

SEQ ID NO: 242466 - DNA, 759 bp, Artificial Sequence
  derived and/or modified sequence
atggcgcttctagatgtgtgcggagctcctagggggcagagaccggagagcgctctgccagtggccggctcaggccgtaggtcagatcccggccattactccttttcgatgcggagcccagagctggccttgccccggggtatgcaacccacagagtttttccagagcctgggtggcgatggggagcggaatgtccagatcgagatggcccatggaactactacgttggccttcaagttccagcatggggtcatagctgcagttgatagtcgggcgtccgcaggctcttacattaattgtcagtactgggagcggttgcttgctaaagaatgcaggctctactaccttaggaatggggaacgaattagcgtgtctgccgcaagcaaactcctgtccaacatgatgtgccagtatagaggaatgggattgagtatgggatcaatgatctgcgggtgggataagaagggccccggcttgtactacgtagacgaacatggcacaaggttgtcaggcaacatgttctcgactggatccgggaacacctacgcctacggggtgatggactctggctacaggccaaacttatcgccggaagaagcctatgatctagggaggcgagcaatcgcgtacgccacccaccgggatagttacagcgggggcgtagtgaacatgtaccacatgaaagaggacggctgggttaaagtggaatccaccgacgtaagtgaccttctgcatcagtatagggaggcaaaccagtag

SEQ ID NO: 242467 - DNA, 831 bp, Artificial Sequence
  derived and/or modified sequence
atggcccttctagatgtttgcggggcaccccggggacagaggccagaatctgccctgcccgtcgctggaagtggtcggagatcagatccgggccactatagcttctccatgcggtctcccgaattagccctaccaagaggaatgcagcctacagaattttttcagtctttgggtggcgatggcgaacggaatgtgcagattgaaatggcccatggaactaccactctggcttttaaattccaacacggcgtgattgctgccgtggacagtagggcttccgcaggctcatacatctctgccctgcgcgttaacaaagtcatcgagatcaatccctatctgctagggacaatgtcaggctgcgcggctgattgtcaatactgggaacgtttgttagctaaagaatgcagactgtactatctgcgtaatggcgaaagaatttccgtctctgcggcaagtaaactgctatcaaacatgatgtgtcagtacaggggaatggggctgtctatgggatcaatgatttgtggctgggacaagaagggtccaggcctgtattacgtagacgagcacggcactcggctgagtgggaatatgttttctacgggatctgggaatacttacgcttacggagtaatggacagtggttaccgacccaatctgtcccctgaagaggcttacgacctgggcaggcgggccatcgcctacgccactcatagagatagttactcaggcggcgtggtgaacatgtatcatatgaaagaagatggatgggtgaaagtggagagcaccgatgtgtccgacctcctacatcagtacagagaagccaaccagtag

SEQ ID NO: 242468 - DNA, 831 bp, Artificial Sequence
  derived and/or modified sequence
atggccctgctggatgtgtgtggggccccccggggccagaggcctgagagcgccctgcctgtggccggcagcggccgccgcagtgaccccggccactacagcttctccatgaggagccctgagctggccctgccccggggcatgcagcccacagagttcttccagagcctgggcggagatggagagagaaatgtgcagatcgagatggcccacggcaccaccaccctggccttcaagttccagcacggcgtgattgctgctgtggacagccgggccagcgctggcagctacatcagcgccctgcgggtgaacaaggtgattgagatcaacccctacctgctgggcaccatgagcggctgtgccgctgactgccagtactgggagcggctgctggccaaggagtgccgcctgtactacctgagaaatggagagcgcatctctgtgtctgctgccagcaagctgctgagcaacatgatgtgccagtaccggggcatgggcctgtccatgggctccatgatctgtggctgggacaagaagggccctggcctgtactacgtggatgaacatggcacccggctgagcggcaacatgttcagcacaggcagcggcaacacctacgcctacggcgtgatggattctggctaccggcccaacctgagccctgaggaggcctatgacctgggcagaagagccatcgcctatgccacccaccgggacagctacagcggcggcgtggtgaacatgtaccacatgaaggaggatggctgggtgaaggtggagagcacagatgtgtctgacctgctgcaccagtaccgggaggccaaccagtag

SEQ ID NO: 242469 - DNA, 759 bp, Artificial Sequence
  derived and/or modified sequence
atggccctgctggatgtgtgtggggccccccggggccagaggcctgagagcgccctgcctgtggccggcagcggccgccgcagtgaccccggccactacagcttctccatgaggagccctgagctggccctgccccggggcatgcagcccacagagttcttccagagcctgggcggagatggagagagaaatgtgcagatcgagatggcccacggcaccaccaccctggccttcaagttccagcacggcgtgattgctgctgtggacagccgggccagcgctggcagctacatcaactgccagtactgggagcggctgctggccaaggagtgccgcctgtactacctgagaaatggagagcgcatctctgtgtctgctgccagcaagctgctgagcaacatgatgtgccagtaccggggcatgggcctgtccatgggctccatgatctgtggctgggacaagaagggccctggcctgtactacgtggatgaacatggcacccggctgagcggcaacatgttcagcacaggcagcggcaacacctacgcctacggcgtgatggattctggctaccggcccaacctgagccctgaggaggcctatgacctgggcagaagagccatcgcctatgccacccaccgggacagctacagcggcggcgtggtgaacatgtaccacatgaaggaggatggctgggtgaaggtggagagcacagatgtgtctgacctgctgcaccagtaccgggaggccaaccagtag

SEQ ID NO: 242470 - DNA, 831 bp, Artificial Sequence
  derived and/or modified sequence
atggccctgctggatgtgtgtggggccccccggggccagaggcctgagagcgccctgcctgtggccggcagcggccgccgcagtgaccccggccactacagcttctccatgaggagccctgagctggccctgccccggggcatgaagcccacagagttcttccagagcctgggcggagatggagagagaaatgtgcagatcgagatggcccacggcaccaccaccctggccttcaagttccagcacggcgtgattgctgctgtggacagccgggccagcgctggcagctacatcagcgccctgcgggtgaacaaggtgattgagatcaacccctacctgctgggcaccatgagcggctgtgccgctgactgccagtactgggagcggctgctggccaaggagtgccgcctgtactacctgagaaatggagagcgcatctctgtgtctgctgccagcaagctgctgagcaacatgatgtgccagtaccggggcatgggcctgtccatgggctccatgatctgtggctgggacaagaagggccctggcctgtactacgtggatgaacatggcacccggctgagcggcaacatgttcagcacaggcagcggcaacacctacgcctacggcgtgatggattctggctaccggcccaacctgagccctgaggaggcctatgacctgggcagaagagccatcgcctatgccacccaccgggacagctacagcggcggcgtggtgaacatgtaccacatgaaggaggatggctgggtgaaggtggagagcacagatgtgtctgacctgctgcaccagtaccgggaggccaaccagtag

SEQ ID NO: 242471 - DNA, 759 bp, Artificial Sequence
  derived and/or modified sequence
atggccctgctggatgtgtgtggggccccccggggccagaggcctgagagcgccctgcctgtggccggcagcggccgccgcagtgaccccggccactacagcttctccatgaggagccctgagctggccctgccccggggcatgaagcccacagagttcttccagagcctgggcggagatggagagagaaatgtgcagatcgagatggcccacggcaccaccaccctggccttcaagttccagcacggcgtgattgctgctgtggacagccgggccagcgctggcagctacatcaactgccagtactgggagcggctgctggccaaggagtgccgcctgtactacctgagaaatggagagcgcatctctgtgtctgctgccagcaagctgctgagcaacatgatgtgccagtaccggggcatgggcctgtccatgggctccatgatctgtggctgggacaagaagggccctggcctgtactacgtggatgaacatggcacccggctgagcggcaacatgttcagcacaggcagcggcaacacctacgcctacggcgtgatggattctggctaccggcccaacctgagccctgaggaggcctatgacctgggcagaagagccatcgcctatgccacccaccgggacagctacagcggcggcgtggtgaacatgtaccacatgaaggaggatggctgggtgaaggtggagagcacagatgtgtctgacctgctgcaccagtaccgggaggccaaccagtag

SEQ ID NO: 242472 - DNA, 831 bp, Artificial Sequence
  derived and/or modified sequence
atggccctgctggacgtgtgcggcgccccccggggccagcggcccgaatcagctctgcccgtggcaggatctggtcgaagatcggatccgggtcactacagcttttctatgagaagcccagagctcgctctgccccgcggcatgcagccaacagaattcttccagtctctgggcggagacggagagcgtaatgttcagatagaaatggcacatgggaccaccacactggctttcaagtttcagcacggcgtgattgccgccgtggatagtagagcatctgccgggtcttatatcagtgcactgagagtgaacaaagttatcgaaatcaatccttacctcctggggacgatgagcgggtgcgccgcagactgtcagtattgggagaggctgttggccaaggaatgccggctgtactacctgaggaatggggagcgaatttctgtatccgccgcgagtaaactgctgagtaacatgatgtgccagtataggggcatgggcttaagtatgggtagcatgatctgcggatgggacaagaaaggtcctggcctgtactacgtcgacgaacatggaaccagactcagcgggaacatgtttagtaccggctccgggaacacctacgcttacggggtgatggactccggataccgaccaaacctctcgcctgaggaagcctatgatctggggcgacgggccatcgcttacgccacccatcgcgatagctatagcggcggagtggtcaatatgtatcacatgaaggaagatggctgggttaaagtggaaagtacagacgtatcagatctgctccatcagtatagagaggcaaatcaatag

SEQ ID NO: 242473 - DNA, 831 bp, Artificial Sequence
  derived and/or modified sequence
atggccctgctggacgtgtgcggcgccccccggggccagcggcccgagtccgccctccctgtggcgggatccggtcgccggagcgaccccggtcattactccttttctatgaggtcccccgagctggcactaccccggggcatgcagcctacggagttctttcagagtctgggaggcgatggtgagagaaatgttcaaattgagatggcccatgggacaacaacgttggcatttaaattccagcacggcgtgatcgcagccgtggattcccgggcttccgctggtagttacatctcagccctgcgggtgaataaagttattgagatcaacccgtacctgctcggcacgatgtcaggttgcgctgctgactgccagtactgggaaaggctactggccaaggagtgccggctatactacttgaggaacggagagcgcatctcagtcagtgccgcatccaagcttctgtccaacatgatgtgccagtatagaggtatgggcttgtccatggggagcatgatctgcggttgggataagaaaggacctggcctgtactacgtagacgagcatggcacacgactgtcgggaaacatgtttagtactgggtcaggcaatacctacgcctacggcgtcatggactcgggttacaggccaaatctttccccggaggaagcgtacgacttggggcgaagagccatcgcctacgcaacccacagagatagttactcaggaggggtcgtgaacatgtaccatatgaaagaggacgggtgggtgaaagtagagagtacggatgtgagcgatctgctgcaccagtacagggaagccaatcaatag

SEQ ID NO: 242474 - DNA, 759 bp, Artificial Sequence
  derived and/or modified sequence
atggccctgctggacgtgtgcggcgccccccggggccagcggcccgaatcagctctcccagtcgccgggtcaggacgtcgttctgatccggggcattacagtttcagtatgcgcagccccgagctggccctccccaggggtatgcaaccgaccgaatttttccagtcccttggcggcgatggagaaagaaacgtgcagatcgagatggctcatggcactacgaccctggcctttaagttccagcacggagttattgcggctgtcgattctcgagctagcgcaggcagttacatcaactgccagtactgggaaagacttctggcaaaagaatgcaggctgtattacctcaggaacggcgagaggatctccgtttcagccgcatcaaaactgctgagcaacatgatgtgccaatatcggggtatgggtctatctatgggcagcatgatttgcggctgggacaaaaaaggaccagggctatactatgtagatgagcacggaacaaggctgtctggaaacatgttcagcaccggctccggaaacacctacgcttatggagtgatggactcagggtaccggccaaacttaagtccagaggaagcctatgatctcgggcgcagagcaatcgcctacgccacccatcgagactcatacagcggcggggtggtgaacatgtaccatatgaaggaggacggatgggtgaaagttgagagtacggatgtgtccgacctcctgcaccaatacagggaagcaaaccagtag

SEQ ID NO: 242475 - DNA, 759 bp, Artificial Sequence
  derived and/or modified sequence
atggccctgctggacgtgtgcggcgccccccggggccagcggcccgaatccgcacttccggttgcgggtagcggtaggcggtctgatccagggcactattcattttccatgaggtctccggaactcgcacttccgagagggatgcaaccaacagagttttttcaatctctgggaggggatggcgagagaaacgtacaaattgaaatggcccacggcaccaccactctggcattcaagttccagcatggggtgatcgccgccgtggacagtcgcgcttctgctggcagctacatcaattgtcagtactgggagcggctgctggctaaggaatgtcgcttatattatcttaggaatggggaacggattagtgtgagtgcggctagtaagttgttgagtaacatgatgtgtcaatatcgcggcatgggactgagcatggggtccatgatttgcggatgggataaaaaaggtcccggcttgtattacgtggatgaacacggaaccaggctgtccggcaatatgttctcaacaggtagcgggaatacctacgcttacggagtcatggactctgggtatagaccaaacctcagcccagaagaggcgtacgacctcggtcgccgcgcaatcgcatacgctacccacagagactcttactccggcggagtcgtgaatatgtaccacatgaaggaggacggatgggtaaaagttgaaagtaccgatgtgtcagatctgctgcaccagtacagagaagccaaccagtag

SEQ ID NO: 242476 - DNA, 831 bp, Artificial Sequence
  derived and/or modified sequence
atggccctgctggacgtgtgcggcgccccccggggccagcggcccgaatccgctctgcctgtggccggttcaggtcggagatcggaccctgggcattattcctttagtatgcgctcccctgaactggctctgccacgtggcatgcagcccactgaattctttcagtctctgggaggggatggtgaacgcaacgtgcagattgagatggcccatgggactacaaccctcgccttcaagtttcagcacggcgtgatcgctgctgtagattctagggcatctgcagggtcctatatctccgcattgcgcgtgaacaaggtgatcgagattaatccctatctcctgggcacaatgtccggctgcgctgcagattgccaatactgggaacggcttcttgctaaagagtgccgtctttactacttgcgaaatggtgaacggatctccgtctcggccgctagtaagctcctgtccaacatgatgtgccagtaccgcggtatggggttaagcatgggctcaatgatatgtggctgggataaaaaaggacctgggctgtattatgtggacgaacatggcactcgcctttctgggaacatgttctccactggttcgggcaacacttatgcatacggcgttatggatagtggatataggccaaaccttagcccagaggaagcttatgatctggggaggcgcgccatcgcctacgcaacccaccgagattcctacagtggtggggtcgtgaacatgtaccacatgaaagaagatggttgggtgaaagtggagagcactgatgtgagcgatcttttacaccagtacagggaggctaatcagtag

SEQ ID NO: 242477 - DNA, 759 bp, Artificial Sequence
  derived and/or modified sequence
atggccctgctggacgtgtgcggcgccccccggggccagcggcccgaatctgctctgcccgtcgccggctcggggcggcgctcagaccctggccattactctttctccatgcgctcccccgagctggcattgccccgcggaatgcaacctaccgagtttttccagagtttgggcggggatggcgaacgcaacgttcagattgagatggcccacggcacaactacccttgcctttaaatttcagcacggggtgatcgccgctgtagactcacgggctagtgcaggaagttatatcaactgccagtattgggagcgactgttggcaaaagagtgtaggctttactatctgcgtaacggagaacggatcagcgtgtcagctgcatctaagcttctgagcaatatgatgtgccagtatcgcgggatgggcttgtccatggggtcaatgatttgtggctgggataagaagggcccaggactctattatgttgacgaacatggaacgcgactttctggcaacatgttcagcacaggaagcggaaacacatacgcctacggcgttatggactctgggtacaggccaaatctcagtccagaagaggcctatgatctcggcagaagagccatcgcatatgccacacaccgcgatagctatagcggtggggtagtgaacatgtatcatatgaaagaggacggctgggtgaaagtcgagtcaaccgacgtctcagatctgcttcatcagtatcgggaggctaaccaatag

SEQ ID NO: 242478 - DNA, 759 bp, Artificial Sequence
  derived and/or modified sequence
atggccctgctggacgtgtgcggcgccccccggggccagcggcccgaatccgcgctcccagtggccgggtccggtaggaggagcgatccaggccattatagctttagtatgagatccccagagctggccttgccccgggggatgcagcctaccgaatttttccagagtttaggcggggacggcgagaggaacgtgcagatcgagatggcgcatggcacgaccactcttgccttcaaatttcagcatggtgtgatcgccgcagttgactcgagagcatccgcaggaagctacattaactgccagtattgggagcggctcctagcaaaagagtgccgcttgtattatctacgcaacggcgagcggatctcagtttctgccgcttccaagctgctgtccaacatgatgtgccaatatcggggaatgggtctgtcaatgggatctatgatatgcggctgggacaagaagggccctggcctctactatgtggatgaacatggaacccgcctgtctggtaatatgttctccactgggagcggcaacacatacgcttacggagtgatggatagcggctatcgccccaacttgtcacctgaggaggcttatgacctgggcaggcgagccatagcgtacgccacacacagagattcttactccggtggcgtggtaaatatgtaccacatgaaagaggatggatgggtgaaggttgagagcacagatgtcagcgatcttctgcaccaatatcgtgaggctaatcagtag

SEQ ID NO: 242479 - DNA, 831 bp, Artificial Sequence
  derived and/or modified sequence
atggccctgctggacgtgtgcggcgccccccggggccagcggcccgagagtgcactgccggtcgccggttctggccgcaggtccgaccccggccactatagctttagcatgcggagcccggagttggctctgcccagaggaatgcaacctaccgaattttttcagagcctaggcggtgatggagagaggaacgtacagatagagatggctcacgggaccactacactggcattcaagtttcagcatggggtcattgcggctgttgatagccgggctagtgccggatcctacatttccgctttaagagtgaacaaggttattgagatcaatccatatctgctgggcaccatgtccggctgtgccgccgactgccagtactgggagcggttgctggcaaaggagtgcaggttatactacctcaggaacggagagcggatcagtgtgagcgctgccagcaagctgctgtccaatatgatgtgtcaatacagagggatgggcctcagcatgggatcgatgatctgtgggtgggacaaaaagggtcctggtctgtattacgtggatgagcacggtacgcggctaagtggcaatatgttctctaccggaagcggcaacacatatgcatacggtgttatggattctggatatcgacccaacctcagccccgaagaagcatacgacctgggacgtcgcgctatcgcctatgctacacacagggattcttactccggcggggtggtgaatatgtatcatatgaaggaggacggttgggttaaagtggagagtacagatgtgtcagatctgctacaccagtatagggaagctaaccagtag

SEQ ID NO: 242480 - DNA, 831 bp, Artificial Sequence
  derived and/or modified sequence
atggccctgctggacgtgtgcggcgccccccggggccagcggcccgagtcagcgcttccagtagctggctcaggacgacgcagtgaccctgggcactatagttttagcatgcggtccccggaactggcgctcccacgagggatgcagccgactgagttcttccagtcgctcgggggtgacggcgagcggaatgtccaaattgaaatggcccatggcactacaacacttgcctttaagttccagcatggggtgatcgcggctgtcgacagcagggcctctgccgggtcttacatcagtgccctgagggtcaataaagttatcgagataaatccctacctcttgggcactatgtcggggtgcgcagctgactgccagtattgggagagattgcttgccaaggagtgtaggctgtactacctccgcaacggggaacgcatttctgtcagtgctgcgagcaaactgttgtccaatatgatgtgccaatacagggggatgggcttgagtatgggaagtatgatctgcggctgggacaaaaaaggtcctggactctactacgtcgatgagcacgggacccgcctgagcggcaatatgttttcgaccgggagcggcaacacctacgcttacggggtgatggacagtgggtacagacctaatctgtctcccgaggaagcatatgatctgggaagacgtgcaatcgcgtatgctactcacagggactcctattcgggaggggtggtgaacatgtatcacatgaaagaggatgggtgggttaaagtggaaagcactgacgtctctgatctgttgcaccaatatagagaggctaatcagtag

SEQ ID NO: 242481 - DNA, 831 bp, Artificial Sequence
  derived and/or modified sequence
atggccctgctggacgtgtgcggcgccccccggggccagcggcccgagtctgctctgcctgtggcagggtccggtaggcgttccgatcctggacattacagcttctctatgaggtcaccagagctagccctgcctcgcggcatgaagcccactgaattttttcaatccctggggggcgacggagagcggaatgtccaaatcgaaatggcacacgggaccactacccttgctttcaaattccagcatggagtgattgcggctgtggacagcagagcctccgctggctcttatatctccgccctgcgcgtcaacaaagttatagaaataaacccctacctgctggggacgatgagtggctgcgccgccgactgtcagtattgggagagactcttggctaaggagtgtaggctctactaccttcgcaacggcgagaggatttctgtgtccgctgcctcgaagcttctgtctaacatgatgtgccaatatagagggatggggctgtccatggggtctatgatctgtgggtgggacaagaagggtcctgggttgtactatgtggatgagcatggaacccggctgagcgggaatatgttctccaccgggagtgggaatacttacgcatacggggtgatggactccggctatagacctaacctctcgcccgaggaggcttacgacctcggccgcagagcgatcgcttatgctacacacagagattcctacagtggcggagtggtgaacatgtaccatatgaaagaggatggttgggtcaaagttgaatcaaccgacgtgtcagacctgctccaccagtatcgggaagccaaccaatag

SEQ ID NO: 242482 - DNA, 759 bp, Artificial Sequence
  derived and/or modified sequence
atggccctgctggacgtgtgcggcgccccccggggccagcggcccgaaagcgccctgcccgtcgcaggatctgggcgacgaagtgatccagggcactatagcttctctatgaggtcccccgagctggccctgcctagggggatgcagcccactgaattctttcagtcactcggtggagacggcgaacgtaacgtacagatcgaaatggcacatggaaccacaaccttggcgttcaagttccaacacggtgtgatagcggccgtggacagcagggcttccgccggaagctacatcaattgccagtattgggagcggttgttagcgaaagagtgtaggctgtattacctccgaaacggtgaaaggatatcggtgagcgctgccagtaaattgctgagtaacatgatgtgtcaatatcggggcatggggctctcaatgggctcgatgatctgtggatgggacaagaaggggcccgggctctattatgtggatgagcatggcacacgactgtccggaaacatgttttccaccgggtccggaaatacatacgcatacggggtcatggatagtgggtataggcccaacctgagtccggaagaagcgtatgacctggggcgacgggctatcgcttatgccacccaccgagactcatacagcgggggggtagtgaacatgtatcatatgaaggaggatggatgggtgaaagtcgagtctaccgacgtttctgacctcttacaccagtatcgcgaggcaaatcagtag

SEQ ID NO: 242483 - DNA, 759 bp, Artificial Sequence
  derived and/or modified sequence
atggccctgctggacgtgtgcggcgccccccggggccagcggcccgaatctgctctgcctgtggccgggtctggaaggcgctctgatccgggacactattctttcagcatgcgctcccccgagttggctttaccccgcggcatgcagccgaccgagttctttcaatccctcggcggtgatggcgagagaaatgtacaaattgagatggcccatggtacaactacccttgccttcaagtttcaacacggggtaattgcggcagtggactcccgcgcgagcgccggttcctatatcaactgccagtattgggaacggctgctcgctaaagaatgccgcttgtattacctgaggaacggagagcgcattagcgtttctgctgccagtaagcttctttcaaatatgatgtgccagtaccggggcatgggtctgagcatggggtcaatgatctgtggttgggataagaagggaccaggcctctactacgtggacgagcacggtactagattgtccggaaatatgttctctacaggcagcggcaatacctatgcgtatggggtcatggattccggttaccgacccaatctgtcgccagaggaagcctatgatcttggaaggcgcgctatcgcctacgccacccacagagactcctactcgggcggggtggtcaatatgtaccatatgaaggaagatggatgggtgaaagtggaatctactgacgtttccgatctgctgcatcagtatcgagaggctaaccagtag

SEQ ID NO: 242484 - DNA, 759 bp, Artificial Sequence
  derived and/or modified sequence
atggccctgctggacgtgtgcggcgccccccggggccagcggcccgaaagcgcccttcccgtggcgggaagcggtcgaaggagcgaccccgggcattattccttttccatgcggagccccgaactggccctgcctaggggtatgaagccaacagagttcttccaatctctgggcggggacggcgaaagaaatgtgcagatagagatggctcacggtaccacaacacttgcgttcaaattccaacatggggtgatcgccgccgtcgactcccgggctagtgcaggcagttatatcaattgtcagtactgggagcgcctgctcgcgaaagagtgcagactctactaccttagaaatggggaacgtatctcagtgagtgctgccagcaagctgctctctaatatgatgtgccagtaccgaggaatgggtctgagcatgggttctatgatctgtggctgggataagaagggccccggattgtattacgtcgatgaacacgggacccgactctccggaaatatgttttccactggctctggaaatacatatgcatacggtgtgatggactccggataccgcccaaacttgtccccggaggaggcatatgacctgggaaggcgcgcaattgcctacgcaacgcacagggactcttatagcggaggcgtggttaacatgtatcatatgaaagaggatgggtgggttaaagtggagtccaccgatgtgagcgacttgcttcatcagtatcgggaggcgaatcagtag

SEQ ID NO: 242485 - DNA, 831 bp, Artificial Sequence
  derived and/or modified sequence
atggccctgctggacgtgtgcggcgccccccggggccagcggcccgagtcggcattacctgtggccgggtccggacgacggagtgaccctggccattactcatttagtatgaggagccctgagcttgcccttccacgcggaatgcagcccaccgaattcttccaatcgttaggaggagacggcgaacggaatgtccaaatcgaaatggcccacggcacgactacactcgccttcaaattccagcacggcgttatagccgctgtagattcacgagccagcgccggatcttatatttcagccctgagagtaaacaaggtcattgagatcaacccataccttttagggacaatgtctggatgcgcagctgactgccaatactgggagcgcttattagctaaggagtgccggctctactatctgcgcaacggcgagaggatcagcgtaagtgccgcaagcaagctgctgtccaatatgatgtgccagtatcgcgggatgggcctgtcaatgggctctatgatctgtgggtgggacaaaaaggggcctggcctgtattacgtggatgaacacgggacccggttatcagggaacatgttctccaccggctccgggaacacctacgcttacggagtgatggacagtggctataggcccaacctttctcctgaagaggcctatgatctaggtaggagggcaatcgcttatgcgactcacagagatagctactccggcggggtagtgaatatgtaccacatgaaagaggacgggtgggtaaaggtcgaatcaaccgatgtgtccgatctactccaccagtacagagaggctaaccagtag

SEQ ID NO: 242486 - DNA, 831 bp, Artificial Sequence
  derived and/or modified sequence
atggccctgctggacgtgtgcggcgccccccggggccagcggcccgaaagcgctttgcctgtggcaggcagtggtagacgaagcgatcccggccactattcattttcaatgcgaagcccagaactggccctcccacgtgggatgcagcctacagaattcttccaaagcctgggaggggatggcgagcgcaatgtccagattgagatggctcatggaacaacaactctcgctttcaagttccagcacggcgtcattgcagctgtggactctcgcgcttctgcgggaagctatatatccgctctcagggttaacaaagttattgaaatcaacccttacttattaggaacaatgtctggctgcgctgccgactgtcaatattgggagcgcttgcttgctaaggaatgtcgcttatactatctccggaacggcgagcgtattagcgtgtccgcagcatcaaagctgctcagcaacatgatgtgtcagtacagaggaatgggcctttccatgggcagcatgatttgtgggtgggataagaaagggcccgggctgtactatgtagatgagcacgggactcgactctccggcaacatgttttccacaggctccggaaacacctacgcttacggagttatggattcaggctacaggcctaacctatccccagaagaggcttacgacctcgggcggagggcaatcgcatatgccacacaccgcgactcctacagtggaggcgtagttaacatgtaccacatgaaggaggacgggtgggttaaggtggagagtacagacgtgtccgaccttctgcatcaatatcgcgaagccaaccaatag

SEQ ID NO: 242487 - DNA, 759 bp, Artificial Sequence
  derived and/or modified sequence
atggccctgctggacgtgtgcggcgccccccggggccagcggcccgaaagtgccctgcctgtggcggggtcaggaagacgttcagatccaggccactactctttcagcatgaggtcgcctgaacttgctctccctcggggaatgcagcctacagagtttttccagtccctgggaggcgacggtgagcgtaacgtgcaaatcgaaatggctcacggcaccaccactttagcattcaagtttcagcatggcgtgatcgccgctgtggactcccgcgcctccgctggaagctacataaactgtcagtactgggaaaggttgttagccaaggaatgtcgactgtactacctgcgcaacggagaaagaatttcggtgtctgcagcatctaagctgctctcgaacatgatgtgccagtacagaggaatgggcctgagtatgggctccatgatttgtggctgggacaaaaaagggcctggactgtactatgtcgacgagcacggcacaagattgtccggcaacatgttctctacaggctccggcaatacgtatgcctacggcgtcatggattccgggtacagacccaatctgtcccctgaagaggcttatgacctgggccgacgagccattgcctatgccactcatagggactcttacagtgggggtgtggtgaatatgtatcacatgaaagaggacggctgggtgaaagtagagagcacagacgtgagcgatttattgcaccagtatagggaggcaaaccagtag

SEQ ID NO: 242488 - DNA, 831 bp, Artificial Sequence
  derived and/or modified sequence
atggccctgctggacgtgtgcggcgccccccggggccagcggcccgagagcgcccttcctgtcgccggcagcggtcggagatctgaccccggacattattctttctccatgcgttccccagagcttgctctgccacgtggaatgcagcctaccgaattttttcaatccctcggaggtgacggggaaagaaatgtgcagatcgaaatggcccatggaacaacgaccctggccttcaaattccagcacggagttatcgccgcagtggattctagagcgagtgctggaagctacatcagcgccctgagagtcaataaagttattgagatcaatccatatttgctgggcacgatgtcgggatgcgccgcagattgccagtactgggaaaggctgctcgcgaaggagtgcagactctattacttacggaatggcgaacggatcagcgtgtctgcagcaagcaaactgctctcaaatatgatgtgtcagtatcgaggcatgggattgtccatggggagcatgatttgcgggtgggataagaaaggccccggactgtattatgttgacgagcacggcaccagattgtcaggcaatatgtttagtaccggatcaggaaacacgtacgcatatggggtgatggacagcggatacagaccaaacttgtcacccgaagaggcctacgatctcggtagaagggctattgcttatgccactcaccgggactcatattctgggggtgtggtcaacatgtatcacatgaaggaggatgggtgggtaaaagtcgagagtacagatgttagcgacttgctgcatcaatacagggaagcaaatcaatag

SEQ ID NO: 242489 - DNA, 831 bp, Artificial Sequence
  derived and/or modified sequence
atggcgctgctcgatgtgtgtggtgctcctagggggcagagacctgaatctgccctgcctgtagctgggagtggcagacgatctgatcctggccattacagtttttcgatgcgatcaccggagctggctttgccacgaggaatgcagcctaccgaattctttcagtcactggggggagatggagagaggaatgtccagattgagatggcccacggcacaaccaccctcgcgtttaaatttcagcatggagttattgccgctgtcgattcacgggcttctgcgggaagctacatcagcgccttaagagtcaacaaagtaatcgaaataaacccatatctgctgggaacaatgtccggatgcgccgcagattgtcagtactgggagaggttgctcgcaaaagaatgtagattgtactatctgaggaatggcgaaagaatctccgtctccgcagcctctaagctactgagtaatatgatgtgccagtatagggggatgggcctgtctatgggttccatgatttgcggatgggacaaaaagggacccggtctgtactacgtggatgaacatgggacccgcctgtccggaaacatgttttcgactggttctggtaacacctacgcctatggagtgatggacagcgggtatagacctaatctgtcccctgaagaggcctacgacctgggtagaagggcgatcgcctatgccactcaccgggattcatacagcggaggggtcgtgaatatgtaccacatgaaagaggacggctgggtcaaggttgagtccactgacgtgtcagaccttctccatcaatatcgtgaagctaatcagtag

SEQ ID NO: 242490 - DNA, 831 bp, Artificial Sequence
  derived and/or modified sequence
atggcactcctggacgtgtgtggggcacccagggggcagcggccagaaagtgccctgcctgtggccggtagtggaaggcgatcagacccaggccattatagcttttcaatgcgatcgccagagctggccctccccagagggatgcagcctactgaattttttcagagcttgggcggtgatggtgagaggaatgttcagatcgaaatggcacacggcacaactacattggcctttaagttccagcacggtgtaatcgccgctgtagattcccgggctagtgccggttcttatattagcgcgcttagagtgaataaagtgatcgagattaatccctacttgctgggtactatgagcggctgcgcagcagactgtcagtattgggaacggctcctggccaaggagtgcagactatattatctcaggaacggggaaagaatctccgtgagtgctgcctccaagttgctttctaatatgatgtgccagtaccgcggaatgggcctcagcatgggcagcatgatttgcggctgggacaaaaagggccctgggctttactatgtggacgaacacggcaccaggctgtctgggaatatgttttccactggctccgggaatacttacgcttacggggtgatggacagtggttatcgtccaaacctctcacccgaggaggcttacgacttgggacggagagcaattgcatacgccacccaccgtgattcttatagcggaggagttgttaacatgtaccacatgaaggaagatgggtgggtgaaagttgagtctacagacgtatcggacctgctgcatcagtatcgtgaggccaaccagtag

SEQ ID NO: 242491 - DNA, 759 bp, Artificial Sequence
  derived and/or modified sequence
atggcactccttgatgtttgcggcgcaccgaggggacagaggcccgaatctgccctacctgttgccggtagcgggagaagaagcgaccctggccattactcattctcaatgcggtcacccgagctcgccctgccacggggaatgcagcccaccgaattcttccaatctcttgggggtgacggagaacggaatgttcagatcgaaatggcacatggtacaacgacccttgcctttaagttccagcacggcgttatcgctgcagtcgactctcgtgcttccgccggaagttatataaactgtcagtattgggagagactattagcaaaggaatgcaggctgtactatctcaggaatggcgaacgcatcagcgtgtccgctgccagcaagctgctgagtaatatgatgtgccagtaccggggtatgggtctgagcatgggatccatgatctgtggctgggacaaaaagggacccggattgtactatgtggatgaacacgggacccggctcagcggtaacatgttctcaaccggctccggcaacacatacgcgtatggcgttatggactcaggctataggccaaatctctctccagaagaggcttacgaccttggtaggcgagcaatcgcctatgccacccacagagactcgtattcaggtggagtggtgaatatgtaccatatgaaggaggatggctgggttaaggtagaatccaccgatgtttccgacctcctccatcagtaccgcgaagctaaccagtag

SEQ ID NO: 242492 - DNA, 759 bp, Artificial Sequence
  derived and/or modified sequence
atggcactcctcgacgtctgcggtgctccccgtggccaaaggcccgagagcgcactcccggttgcaggtagcggtcgcaggtctgaccccggtcactacagtttttcaatgcggtctccagaacttgcattaccaagggggatgcaacctactgagttttttcaaagtctgggcggtgacggggaaagaaatgtgcagatcgaaatggctcatgggacaaccacgctggcctttaagtttcagcacggtgtgatcgccgctgttgacagcagggcatcagcaggcagctatataaattgccagtactgggagcggctcctcgcgaaagaatgtagattgtattacctgaggaacggcgagcgcatctctgtgagcgccgcttccaagttgctcagcaatatgatgtgtcagtacagggggatggggttatcaatgggcagtatgatctgcggctgggataaaaaagggccaggactgtactacgttgacgagcatggtaccaggctatcaggcaatatgttctccactggctccggcaatacttacgcctacggagttatggactcaggctatagacccaacctcagtcccgaagaggcatatgacctaggacggagggccatagcttacgccacacatcgcgacagctactctgggggtgtggtgaacatgtaccacatgaaggaggacggctgggttaaagttgagtccactgatgtgagtgatctgctgcatcagtaccgcgaagcaaaccagtag

SEQ ID NO: 242493 - DNA, 831 bp, Artificial Sequence
  derived and/or modified sequence
atggctctattagatgtctgcggtgcacctcggggtcagagaccagaatccgctctgccggtcgcgggttccggccgaagatcggaccctggccactacagcttctcaatgcgttcccccgaactcgctttgcccaggggcatgcagcccactgagttctttcagtccctcggcggtgatggcgagaggaacgtgcagatcgagatggcccacggcaccaccacactcgcttttaagtttcagcatggtgtgattgccgctgtagattcacgggcaagtgctggtagctatatcagcgcactcagggtcaacaaggtaatcgaaatcaatccctatttgttaggaactatgtctgggtgcgccgcagattgccagtattgggaaagactgctagcgaaagagtgtaggctctattacttgagaaatggcgagaggatctccgtatcagcagcatctaaactcttgagtaacatgatgtgtcaataccggggaatggggttaagtatggggagtatgatctgtggttgggacaagaaaggcccaggtctctactacgtagacgagcatgggacccgcttgtccgggaatatgttttctacaggctctggaaatacctatgcctacggtgtgatggatagcggataccgacctaacctctcccccgaggaggcctacgacctcggcaggcgggcaatcgcttacgccacccacagggattcatattccggcggtgtcgtaaatatgtatcacatgaaggaagacggttgggtaaaggtagaatctactgacgtttcagacctcctgcatcagtatcgggaggccaatcagtag

SEQ ID NO: 242494 - DNA, 759 bp, Artificial Sequence
  derived and/or modified sequence
atggccttactcgacgtgtgcggggctccgagaggtcagcgaccagaatctgccctgcccgtggccggatcagggagaagaagcgatcccggacactattcatttagtatgcgctcaccggagctagctttgcccagggggatgcaacctaccgagttcttccagagcctcggtggtgacggagaacggaatgtacagatcgagatggctcacggaacaacgactctggcatttaaattccagcacggagttattgctgctgtagactccagggcctcggcgggttcttatattaactgccaatattgggagcggttactggccaaagagtgtcgcctttactatcttcggaatggtgagcgcattagcgtgtctgctgcatcaaaactcctgtccaatatgatgtgtcagtatagggggatggggctgtccatgggctcgatgatctgtgggtgggacaaaaagggccctggcctgtattacgtggacgagcatggcacccgcttgagcggaaacatgttttctacaggaagtgggaacacatacgcttacggcgttatggattcaggataccggcctaatttgtcacctgaggaagcatacgatcttggcaggcgtgccatcgcgtacgccacacaccgggactcctattctggcggagtggtgaatatgtaccacatgaaggaggacggctgggtgaaagtggagtccactgacgtgtcggatctgttgcaccaatatcgcgaagccaaccagtag

SEQ ID NO: 242495 - DNA, 759 bp, Artificial Sequence
  derived and/or modified sequence
atggcactccttgacgtctgtggagcccctcgcggacagagacccgaatcggctctccccgtcgccggtagtggcaggagatcggacccaggccactactcatttagtatgcgcagtcctgagctcgccctccctcgaggcatgcagcccactgaattcttccagtctctgggtggggatggggagcggaatgttcagatcgaaatggcccatggaacaacaactcttgcatttaaatttcagcatggtgtcatcgccgctgtggatagccgcgcatcggctgggagctatataaactgccagtattgggagagattgctcgcaaaggagtgtcgcctgtactatctgcgcaatggcgaacggattagcgttagtgccgcatctaagttactgagtaatatgatgtgtcagtacagaggcatggggctcagtatgggatccatgatttgcggttgggataaaaagggaccaggcctgtactacgtcgacgaacacggcacaaggctgtctggaaacatgttttccacaggatccggcaacacgtacgcatatggcgtcatggactctggatatcgcccaaatttgagccccgaagaagcctacgacctgggtaggagagcaattgcgtacgcaacccatcgagacagctatagtggaggagtggtgaacatgtaccatatgaaggaagacggttgggtgaaggttgagtctaccgacgtgtcagacctgcttcatcagtacagagaggctaaccagtag

SEQ ID NO: 242496 - DNA, 831 bp, Artificial Sequence
  derived and/or modified sequence
atggccctgctcgacgtatgcggtgctccgagaggtcagaggcccgagtccgccttaccggtcgccggttcaggtcggcgttctgatccagggcattactctttttctatgcgttcccctgagctggctttgcctcgcggtatgcagcctaccgagttcttccagtctctcgggggtgacggggaaagaaacgtccagatcgagatggcccacgggacaacgacactggcattcaagttccaacacggggtaattgctgccgtggactcccgagcctcagccggaagctatattagcgccttgcgggtgaacaaagtgattgaaatcaacccctatctgttgggcaccatgtcaggttgcgcagccgattgtcagtactgggaaaggttgctggccaaggagtgtcgcctctactacctgcggaacggggagcgcattagtgtctccgcggcttctaaactgctgagtaacatgatgtgccagtaccgcggaatggggctgtccatgggttcgatgatatgcgggtgggacaaaaaggggccagggctttattatgttgatgaacacggtacaaggctgtcaggtaatatgtttagcacaggaagcggaaatacgtacgcctacggggtaatggattcaggctacaggccgaacctgtcaccagaagaggcctacgacctggggagaagggccatagcctacgccactcacagggactcatacagtggcggagtggtgaacatgtaccacatgaaagaagatggctgggttaaagtagagtctacagacgttagcgacctgcttcatcagtatagggaagcaaaccaatag

SEQ ID NO: 242497 - DNA, 831 bp, Artificial Sequence
  derived and/or modified sequence
atggccctcctggacgtctgtggagcccctcggggacaacggccagaatccgcacttcctgtggccggttcgggaagacggtcggatccaggacattactctttcagtatgcgatctcccgagctggccttacccagaggcatgcagcccacagaattttttcaatcacttgggggtgatggtgagcgcaacgtgcagattgaaatggcgcatggtacgactacactagctttcaaattccaacatggagtgatagccgctgttgattcacgcgcttccgcgggaagctatatctcagcgttgagagtaaataaggtgatcgagatcaacccatatttattgggaaccatgagcggctgcgcagctgattgtcaatactgggagagattattggctaaggaatgcaggttatattatcttagaaacggagaaaggattagtgtcagcgcagctagcaagctcctctctaatatgatgtgtcaatatagaggcatgggcctgagtatgggatcgatgatttgcggctgggacaagaagggcccagggctttactacgtcgacgagcatggaaccagactctctggtaatatgtttagcaccggatcagggaatacgtacgcatacggggtcatggactccggttacaggccaaacctgtcccccgaggaggcctatgatctcggtcgacgcgcaattgcatacgccacccaccgggatagttacagtggcggagtcgtcaacatgtatcacatgaaagaagacgggtgggtgaaggtggaatctacggatgttagcgacttactgcaccagtaccgtgaggccaaccagtag

SEQ ID NO: 242498 - DNA, 831 bp, Artificial Sequence
  derived and/or modified sequence
atggctctgctcgatgtatgtggtgctcccagaggccaaagacctgagtctgctctccccgttgcagggagcgggaggcggagcgaccctggccattatagcttttctatgaggagtcccgaactggccctgcctcggggaatgaaaccaacagaattctttcaaagtttgggaggagacggggagcgaaatgtccagattgagatggctcacggcacaacaaccctggctttcaaatttcagcatggcgtgatagctgccgttgactctcgcgcttccgccggatcctacatcagcgccctgcgggtgaataaagtgatagagatcaatccatacctgctcggaacaatgagtggttgcgctgcggactgccagtactgggagagactgctggccaaagagtgccggttgtactacctgaggaatggagagagaattagcgtaagcgccgcttccaaactcctgtcaaatatgatgtgtcagtacagaggcatgggtctctctatggggtctatgatctgtggatgggacaagaagggccctggtctctactacgtcgacgagcatggtacgcggctgtcaggaaacatgtttagcacaggcagcggtaatacatacgcctatggagtcatggacagcggctaccgcccaaatttatctccagaggaggcttatgatctcgggaggcgggctatcgcatatgcaacacatcgggacagctacagcggaggagttgtcaatatgtaccacatgaaagaggatggatgggtgaaagttgaatccacagatgtttctgaccttcttcatcaataccgcgaagccaaccaatag

SEQ ID NO: 242499 - DNA, 759 bp, Artificial Sequence
  derived and/or modified sequence
atggccctcctggatgtctgcggcgcaccacgtggtcaacggcctgaatcagcattgcccgtggccggttctggccgtcgctctgacccgggtcattactcattctctatgcggagccctgagttggctctgcccaggggcatgcagcccactgaattcttccagagtcttggaggtgatggtgagagaaacgtgcagatcgagatggctcacggtactacaacattagctttcaagtttcagcacggcgtgattgccgctgtcgactcccgcgctagtgcgggtagttacataaattgccagtactgggaaaggctgctcgcaaaagagtgtcgactctattacttaaggaacggggaacgtatctctgtttctgcagcatcaaagttgctctccaatatgatgtgccaatacaggggcatgggcctttccatgggctcaatgatctgtggctgggacaaaaaaggaccaggtctctattatgtggacgagcatggaacgcgactttccggcaacatgttctccacaggatccgggaacacttatgcttatggggtaatggattctggatataggccaaatctcagcccagaggaagcttacgacttagggcgaagggcaatagcttatgctacgcaccgagactcatactccggcggtgtggtgaacatgtatcacatgaaagaggacgggtgggtcaaagtcgagagtacagacgtgagcgacctgctgcaccagtacagggaagccaatcagtag

SEQ ID NO: 242500 - DNA, 759 bp, Artificial Sequence
  derived and/or modified sequence
atggcactgttggatgtgtgcggcgctccacgtggccagcggcctgaaagcgctctgccggtcgcaggaagcgggagacgctccgaccctggccactacagcttctctatgaggtcacctgaactcgccctgcccagaggcatgcaaccgaccgagtttttccagtctctagggggagatggagagagaaatgtccagattgaaatggctcacggaacaaccactttggcctttaaatttcagcatggagtgattgcagctgttgatagtcgggcaagtgctggctcctacattaactgccagtactgggagaggttactggctaaggaatgtcgactgtactacctgcgcaatggagaacgtatctcagtgtcagccgcttccaagctcttgtcaaatatgatgtgccagtacagaggcatggggctgagtatgggaagcatgatctgcggttgggacaaaaagggcccaggcttgtattatgtcgacgaacacggtactcgcctgagtggaaacatgtttagtactggaagtggcaatacgtatgcctatggggtgatggacagcggatatcgtcctaatctcagcccagaggaagcctatgacctgggcaggagggcaatagcttatgccacccatcgcgattcatacagtgggggtgtggtgaacatgtatcacatgaaggaggacggctgggtgaaggtggaaagcactgacgtttctgatttactgcaccagtacagagaggccaaccagtag

SEQ ID NO: 242501 - DNA, 759 bp, Artificial Sequence
  derived and/or modified sequence
atggcccttctggacgtttgcggggcaccacgtgggcagaggcccgagtcagccttgccggtggccggtagtggtaggagatcggatccaggacactacagcttctcaatgcgcagtccagagcttgctctgccacgaggcatgaagcccactgaattcttccagtcccttggtggtgacggtgagaggaacgtccagatcgagatggcccacggcacaacaacccttgcttttaagtttcagcacggagtgatcgctgccgtagactctcgagccagtgctggcagctacattaattgccagtactgggagcgactgctggcaaaagagtgccgcttgtattatctgcgtaatggggaacggatctccgtgtcagcagcatctaaattactctcaaatatgatgtgtcagtaccgaggtatggggctttccatgggaagcatgatatgcgggtgggacaagaagggccctggattgtattatgttgatgaacatggtacccggctctcaggaaacatgtttagtacaggaagtgggaacacatatgcctacggcgttatggacagcggctaccggcctaacttatcccctgaggaggcatacgacctgggtcgtagagcaatagcctacgctactcatcgcgacagctatagcggcggtgtggtaaatatgtatcatatgaaggaagacggctgggtcaaagtcgagtcaaccgatgtaagcgatcttctccatcagtatcgcgaagccaatcagtag

SEQ ID NO: 242502 - DNA, 831 bp, Artificial Sequence
  derived and/or modified sequence
atggcactgttagatgtatgcggagcaccaagaggacagcggccagagagcgcgcttccagttgccggaagcgggaggcggagtgaccccggacactattcatttagtatgagatccccagaacttgccctgccgcgtggcatgcagcccacggaattctttcagtcactcggcggtgatggggagagaaatgtgcaaattgagatggcccatggcaccaccacactagcctttaagttccagcacggagttatcgccgctgttgactcccgcgcatctgccggaagctacatcagcgctctaagagtcaataaagtgatagagatcaacccctatctgctgggcacaatgagtgggtgcgcagccgactgccaatattgggagagactcctagctaaagagtgtaggttatactacctcaggaatggtgagcgtatatctgtgagcgctgcaagcaagttgctgtcaaacatgatgtgtcagtatcgaggcatgggcctgagcatgggtagcatgatctgcggttgggataagaagggacccggactgtactacgtggatgaacacggcactcggctttcaggaaatatgttttccacgggctccgggaatacctatgcatacggcgttatggattcagggtacagacccaatctgtcccccgaagaggcctacgacctggggcgaagggcgatcgcctacgccactcaccgtgattcttactctggcggagtggtgaacatgtaccacatgaaggaggatggctgggtgaaagtcgagagtaccgacgttagtgatctgttgcatcaatacagggaagccaaccagtag

SEQ ID NO: 242503 - DNA, 831 bp, Artificial Sequence
  derived and/or modified sequence
atggctcttttggacgtttgcggagctccccgaggtcagaggccggagtctgctctacccgtcgcgggatctggacgaagaagcgacccgggacactattccttttccatgaggagtccagagctggcattgccccgagggatgcagccaacagagtttttccagagtttagggggagatggcgaacgaaacgttcagatcgaaatggcacatgggacaactaccttggcttttaagtttcagcacggggttatcgccgcagtggatagccgggctagtgcaggttcctacatctctgccctgcgcgtgaacaaggtgattgagatcaatccatatctgctgggtactatgagcggatgcgccgctgattgccagtattgggagcgactactggcaaaagagtgtagactgtactatcttcgtaatggcgagagaatatccgttagtgcagccagcaagctgctgtccaacatgatgtgccagtatagagggatgggcctctccatgggcagcatgatttgcggttgggataagaagggtcccggtctgtattacgttgatgagcatggaacccggctcagtggaaacatgttcagcactggatccggaaacacatatgcatacggggtaatggactcagggtaccggccaaacctgtctccggaggaagcttatgatctggggcgaagagcaattgcctacgccactcatagagatagctattctggcggagttgtcaatatgtaccacatgaaagaagacgggtgggtcaaagtcgaatcgaccgatgtgtctgacttgttacaccaataccgcgaagccaaccagtag

SEQ ID NO: 242504 - DNA, 759 bp, Artificial Sequence
  derived and/or modified sequence
atggctctcctcgacgtttgtggagcaccaagaggacagcgcccagagtctgccctaccagtcgcaggttctggcaggaggagcgaccctgggcactactccttcagcatgagatcgcctgaactcgcccttccacgcggaatgcagccaacagagttctttcagtcattggggggagatggggagcggaatgtccagatcgagatggcccacggaacgaccaccctcgcgtttaagttccagcacggagtgatcgcagccgtcgattcccgcgcatctgctgggtcttacataaattgccagtactgggagcgtttgctcgccaaggagtgcagactttattacctgcgtaacggtgagaggatcagcgtgtcagccgcttcgaagctgctcagcaatatgatgtgccagtacagagggatgggtctcagcatgggttcaatgatctgtggctgggacaagaagggaccgggtctgtactatgtcgacgagcacggcaccaggctgtctggaaacatgttcagcactggctccggaaatacatacgcttacggcgtaatggattcaggctatcgtcccaatctgtctcccgaagaagcgtatgacctcgggagaagggccatagcatatgctactcatcgagactcgtattccggcggtgtcgttaatatgtaccatatgaaggaggacggatgggtaaaggtagaatctacggatgtctccgacctgctgcaccaataccgggaagccaatcaatag

SEQ ID NO: 242505 - DNA, 831 bp, Artificial Sequence
  derived and/or modified sequence
atggccctcctagacgtctgtggcgcacctcggggtcagagaccagagtccgctctgccagtagcaggaagtgggcgaaggagcgatccaggacattactccttctccatgcgctctcctgaactcgctctcccacgtgggatgcagcccacggagttctttcagagtctggggggtgacggggagaggaatgtgcagattgagatggcacacggcaccaccacgcttgcctttaagtttcagcatggggttattgcagcggtggacagtcgcgcatctgcgggttcatacatatctgccctcagggtcaataaagtaatcgagattaatccgtacctcctcggcaccatgagcggttgcgccgctgactgccaatactgggaacgtctcctggctaaagagtgtcggctgtattatttgaggaacggggagcgtattagcgtcagtgcggcatctaagttgctctctaacatgatgtgccaatacaggggaatgggattgagcatgggatccatgatatgcgggtgggacaaaaaaggacccggactttattacgttgatgagcatggtactcgcttaagcggaaacatgttctccaccgggagcggcaatacatacgcctatggagttatggactcgggctatagacccaatctcagtcccgaggaggcatacgacttagggcgtcgtgcgatcgcctatgccactcacagagatagctattcaggcggtgtcgttaatatgtatcacatgaaggaagacggttgggtgaaagtagagtctaccgatgtatcagatctactgcatcagtaccgcgaggctaaccagtag

SEQ ID NO: 242506 - DNA, 1124 bp, Artificial Sequence
  derived and/or modified sequence
gctttcacttcctcctccgagagcggacagatctctgggtgctgggcggtcatggcgctactagatgtatgcggagccccccgagggcagcggccggaatcggctctcccggttgcgggaagcgggcgtcgctcggacccaggacactacagtttctctatgcgatctccagagctcgctttaccccggggaatgcagcccacagaattcttccagtccctgggtggggacggagaaaggaacgttcagattgagatggcccatggcaccaccacgctcgccttcaagttccagcatggagtgattgcagcagtggattctcgggcctcagctgggtcctacattagtgccttacgggtgaacaaggtgattgagattaacccttacctgcttggcaccatgtctggctgtgcagcagactgtcagtactgggagcgcctgctggccaaggaatgcaggctgtactatctgcgaaatggagaacgtatttcagtgtcggcagcctccaagctgctgtccaacatgatgtgccagtaccggggcatgggcctctctatgggcagtatgatctgtggctgggataagaagggtcctggactctactacgtggatgaacatgggactcggctctcaggaaatatgttctccacgggtagtgggaacacttatgcctacggggtcatggacagtggctatcggcctaatcttagccctgaagaggcctatgaccttggccgcagggctattgcttatgccactcacagagacagctattctggaggcgttgtcaatatgtaccacatgaaggaagatggttgggtgaaagtagaaagtacagatgtcagtgacctgctgcaccagtaccgggaagccaatcaataatggtggtggtggcagctgggcaggtctcctctgggaggtcttggccgactcagggacctaagccacgttaagtccaaggagaagaagaggcctagcctgagccaaagagagagtacgggctcagcagccagaggaggccggtgaagtgcatcttctgcgtgttctctatttgaacaagcatttcccccagggaagtttctgggtgccccactaagtagaataaagaaaaacggttataaata

SEQ ID NO: 242507 - DNA, 1025 bp, Artificial Sequence
  derived and/or modified sequence
cagatctctgggtgctgggcggtcatggcgctactagatgtatgcggagccccccgagggcagcggccggaatcggctctcccggttgcgggaagcgggcgtcgctcggacccaggacactacagtttctctatgcgatctccagagctcgctttaccccggggaatgcagcccacagaattcttccagtccctgggtggggacggagaaaggaacgttcagattgagatggcccatggcaccaccacgctcgccttcaagttccagcatggagtgattgcagcagtggattctcgggcctcagctgggtcctacattaactgtcagtactgggagcgcctgctggccaaggaatgcaggctgtactatctgcgaaatggagaacgtatttcagtgtcggcagcctccaagctgctgtccaacatgatgtgccagtaccggggcatgggcctctctatgggcagtatgatctgtggctgggataagaagggtcctggactctactacgtggatgaacatgggactcggctctcaggaaatatgttctccacgggtagtgggaacacttatgcctacggggtcatggacagtggctatcggcctaatcttagccctgaagaggcctatgaccttggccgcagggctattgcttatgccactcacagagacagctattctggaggcgttgtcaatatgtaccacatgaaggaagatggttgggtgaaagtagaaagtacagatgtcagtgacctgctgcaccagtaccgggaagccaatcaataatggtggtggtggcagctgggcaggtctcctctgggaggtcttggccgactcagggacctaagccacgttaagtccaaggagaagaagaggcctagcctgagccaaagagagagtacgggctcagcagccagaggaggccggtgaagtgcatcttctgcgtgttctctatttgaacaagcatttcccccagggaagtttctgggtgccccactaagtagaataaagaaaaacggttataaata

SEQ ID NO: 242508 - DNA, 1124 bp, Artificial Sequence
  derived and/or modified sequence
gctttcacttcctcctccgagagcggacagatctctgggtgctgggcggtcatggcgctactagatgtatgcggagccccccgagggcagcggccggaatcggctctcccggttgcgggaagcgggcgtcgctcggacccaggacactacagtttctctatgcgatctccagagctcgctttaccccggggaatgaagcccacagaattcttccagtccctgggtggggacggagaaaggaacgttcagattgagatggcccatggcaccaccacgctcgccttcaagttccagcatggagtgattgcagcagtggattctcgggcctcagctgggtcctacattagtgccttacgggtgaacaaggtgattgagattaacccttacctgcttggcaccatgtctggctgtgcagcagactgtcagtactgggagcgcctgctggccaaggaatgcaggctgtactatctgcgaaatggagaacgtatttcagtgtcggcagcctccaagctgctgtccaacatgatgtgccagtaccggggcatgggcctctctatgggcagtatgatctgtggctgggataagaagggtcctggactctactacgtggatgaacatgggactcggctctcaggaaatatgttctccacgggtagtgggaacacttatgcctacggggtcatggacagtggctatcggcctaatcttagccctgaagaggcctatgaccttggccgcagggctattgcttatgccactcacagagacagctattctggaggcgttgtcaatatgtaccacatgaaggaagatggttgggtgaaagtagaaagtacagatgtcagtgacctgctgcaccagtaccgggaagccaatcaataatggtggtggtggcagctgggcaggtctcctctgggaggtcttggccgactcagggacctaagccacgttaagtccaaggagaagaagaggcctagcctgagccaaagagagagtacgggctcagcagccagaggaggccggtgaagtgcatcttctgcgtgttctctatttgaacaagcatttcccccagggaagtttctgggtgccccactaagtagaataaagaaaaacggttataaata

SEQ ID NO: 242509 - DNA, 1025 bp, Artificial Sequence
  derived and/or modified sequence
cagatctctgggtgctgggcggtcatggcgctactagatgtatgcggagccccccgagggcagcggccggaatcggctctcccggttgcgggaagcgggcgtcgctcggacccaggacactacagtttctctatgcgatctccagagctcgctttaccccggggaatgaagcccacagaattcttccagtccctgggtggggacggagaaaggaacgttcagattgagatggcccatggcaccaccacgctcgccttcaagttccagcatggagtgattgcagcagtggattctcgggcctcagctgggtcctacattaactgtcagtactgggagcgcctgctggccaaggaatgcaggctgtactatctgcgaaatggagaacgtatttcagtgtcggcagcctccaagctgctgtccaacatgatgtgccagtaccggggcatgggcctctctatgggcagtatgatctgtggctgggataagaagggtcctggactctactacgtggatgaacatgggactcggctctcaggaaatatgttctccacgggtagtgggaacacttatgcctacggggtcatggacagtggctatcggcctaatcttagccctgaagaggcctatgaccttggccgcagggctattgcttatgccactcacagagacagctattctggaggcgttgtcaatatgtaccacatgaaggaagatggttgggtgaaagtagaaagtacagatgtcagtgacctgctgcaccagtaccgggaagccaatcaataatggtggtggtggcagctgggcaggtctcctctgggaggtcttggccgactcagggacctaagccacgttaagtccaaggagaagaagaggcctagcctgagccaaagagagagtacgggctcagcagccagaggaggccggtgaagtgcatcttctgcgtgttctctatttgaacaagcatttcccccagggaagtttctgggtgccccactaagtagaataaagaaaaacggttataaata

SEQ ID NO: 242510 - DNA, 1125 bp, Artificial Sequence
  derived and/or modified sequence
gctttcacttcctcctccgagagcggacagatctctgggtgctgggcggtcatggcgctactagatgtatgcggagccccccgagggcagcggccggaatcggctctcccggttgcgggaagcgggcgtcgctcggacccaggacactacagtttctctatgcgatctccagagctcgctttaccccggggaatgcagcccacagaattcttccagtccctgggtggggacggagaaaggaacgttcagattgagatggcccatggcaccaccacgctcgccttcaagttccagcatggagtgattgcagcagtggattctcgggcctcagctgggtcctacattagtgccttacgggtgaacaaggtgattgagattaacccttacctgcttggcaccatgtctggctgtgcagcagactgtcagtactgggagcgcctgctggccaaggaatgcaggctgtactatctgcgaaatggagaacgtatttcagtgtcggcagcctccaagctgctgtccaacatgatgtgccagtaccggggcatgggcctctctatgggcagtatgatctgtggctgggataagaagggtcctggactctactacgtggatgaacatgggactcggctctcaggaaatatgttctccacgggtagtgggaacacttatgcctacggggtcatggacagtggctatcggcctaatcttagccctgaagaggcctatgaccttggccgcagggctattgcttatgccactcacagagacagctattctggaggcgttgtcaatatgtaccacatgaaggaagatggttgggtgaaagtagaaagtacagatgtcagtgacctgctgcaccagtaccgggaagccaatcaataatggtggtggtggcagctgggcaggtctcctctgggaggtcttggccgactcagggacctaagccacgttaagtccaaggagaagaagaggcctagcctgagccaaagagagagtacgggctcagcagccagaggaggccggtgaagtgcatcttctgcgtgttctctatttgaacaagcatttcccccagggaagtttctgggtgccccactaagtagaataaagaaaaacggttataaatac

SEQ ID NO: 242511 - DNA, 1090 bp, Artificial Sequence
  derived and/or modified sequence
ttcctcctccgagagcggacagatctctgggtgctgggcggtcatggcgctactagatgtatgcggagccccccgagggcagcggccggaatcggctctcccggttgcgggaagcgggcgtcgctcggacccaggacactacagtttctctatgcgatctccagagctcgctttaccccggggaatgcagcccacagaattcttccagtccctgggtggggacggagaaaggaacgttcagattgagatggcccatggcaccaccacgctcgccttcaagttccagcatggagtgattgcagcagtggattctcgggcctcagctgggtcctacattagtgccttacgggtgaacaaggtgattgagattaacccttacctgcttggcaccatgtctggctgtgcagcagactgtcagtactgggagcgcctgctggccaaggaatgcaggctgtactatctgcgaaatggagaacgtatttcagtgtcggcagcctccaagctgctgtccaacatgatgtgccagtaccggggcatgggcctctctatgggcagtatgatctgtggctgggataagaagggtcctggactctactacgtggatgaacatgggactcggctctcaggaaatatgttctccacgggtagtgggaacacttatgcctacggggtcatggacagtggctatcggcctaatcttagccctgaagaggcctatgaccttggccgcagggctattgcttatgccactcacagagacagctattctggaggcgttgtcaatatgtaccacatgaaggaagatggttgggtgaaagtagaaagtacagatgtcagtgacctgctgcaccagtaccgggaagccaatcaataatggtggtggtggcagctgggcaggtctcctctgggaggtcttggccgactcagggacctaagccacgttaagtccaaggagaagaagaggcctagcctgagccaaagagagagtacgggctcagcagccagaggaggccggtgaagtgcatcttctgcgtgttctctatttgaacaagcatttcccccagggaagtttctgggtgccccactaagt

SEQ ID NO: 242512 - DNA, 831 bp, Artificial Sequence
  derived and/or modified sequence
atggccctgctggacgtgtgcggcgcccccagaggccagagacccgagagcgccctgcccgtggccggcagcggcagaagaagcgaccccggccactacagcttcagcatgagaagccccgagctggccctgcccagaggcatgcagcccaccgagttcttccagagcctgggcggcgacggcgagagaaacgtgcagatcgagatggcccacggcaccaccaccctggccttcaagttccagcacggcgtgatcgccgccgtggacagcagagccagcgccggcagctacatcagcgccctgagagtgaacaaggtgatcgagatcaacccctacctgctgggcaccatgagcggctgcgccgccgactgccagtactgggagagactgctggccaaggagtgcagactgtactacctgagaaacggcgagagaatcagcgtgagcgccgccagcaagctgctgagcaacatgatgtgccagtacagaggcatgggcctgagcatgggcagcatgatctgcggctgggacaagaagggccccggcctgtactacgtggacgagcacggcaccagactgagcggcaacatgttcagcaccggcagcggcaacacctacgcctacggcgtgatggacagcggctacagacccaacctgagccccgaggaggcctacgacctgggcagaagagccatcgcctacgccacccacagagacagctacagcggcggcgtggtgaacatgtaccacatgaaggaggacggctgggtgaaggtggagagcaccgacgtgagcgacctgctgcaccagtacagagaggccaaccagtag

SEQ ID NO: 242513 - DNA, 759 bp, Artificial Sequence
  derived and/or modified sequence
atggccctgctggacgtgtgcggcgcccccagaggccagagacccgagagcgccctgcccgtggccggcagcggcagaagaagcgaccccggccactacagcttcagcatgagaagccccgagctggccctgcccagaggcatgcagcccaccgagttcttccagagcctgggcggcgacggcgagagaaacgtgcagatcgagatggcccacggcaccaccaccctggccttcaagttccagcacggcgtgatcgccgccgtggacagcagagccagcgccggcagctacatcaactgccagtactgggagagactgctggccaaggagtgcagactgtactacctgagaaacggcgagagaatcagcgtgagcgccgccagcaagctgctgagcaacatgatgtgccagtacagaggcatgggcctgagcatgggcagcatgatctgcggctgggacaagaagggccccggcctgtactacgtggacgagcacggcaccagactgagcggcaacatgttcagcaccggcagcggcaacacctacgcctacggcgtgatggacagcggctacagacccaacctgagccccgaggaggcctacgacctgggcagaagagccatcgcctacgccacccacagagacagctacagcggcggcgtggtgaacatgtaccacatgaaggaggacggctgggtgaaggtggagagcaccgacgtgagcgacctgctgcaccagtacagagaggccaaccagtag

SEQ ID NO: 242514 - DNA, 831 bp, Artificial Sequence
  derived and/or modified sequence
atggccctgctggacgtgtgcggcgcccccagaggccagagacccgagagcgccctgcccgtggccggcagcggcagaagaagcgaccccggccactacagcttcagcatgagaagccccgagctggccctgcccagaggcatgaagcccaccgagttcttccagagcctgggcggcgacggcgagagaaacgtgcagatcgagatggcccacggcaccaccaccctggccttcaagttccagcacggcgtgatcgccgccgtggacagcagagccagcgccggcagctacatcagcgccctgagagtgaacaaggtgatcgagatcaacccctacctgctgggcaccatgagcggctgcgccgccgactgccagtactgggagagactgctggccaaggagtgcagactgtactacctgagaaacggcgagagaatcagcgtgagcgccgccagcaagctgctgagcaacatgatgtgccagtacagaggcatgggcctgagcatgggcagcatgatctgcggctgggacaagaagggccccggcctgtactacgtggacgagcacggcaccagactgagcggcaacatgttcagcaccggcagcggcaacacctacgcctacggcgtgatggacagcggctacagacccaacctgagccccgaggaggcctacgacctgggcagaagagccatcgcctacgccacccacagagacagctacagcggcggcgtggtgaacatgtaccacatgaaggaggacggctgggtgaaggtggagagcaccgacgtgagcgacctgctgcaccagtacagagaggccaaccagtag

SEQ ID NO: 242515 - DNA, 759 bp, Artificial Sequence
  derived and/or modified sequence
atggccctgctggacgtgtgcggcgcccccagaggccagagacccgagagcgccctgcccgtggccggcagcggcagaagaagcgaccccggccactacagcttcagcatgagaagccccgagctggccctgcccagaggcatgaagcccaccgagttcttccagagcctgggcggcgacggcgagagaaacgtgcagatcgagatggcccacggcaccaccaccctggccttcaagttccagcacggcgtgatcgccgccgtggacagcagagccagcgccggcagctacatcaactgccagtactgggagagactgctggccaaggagtgcagactgtactacctgagaaacggcgagagaatcagcgtgagcgccgccagcaagctgctgagcaacatgatgtgccagtacagaggcatgggcctgagcatgggcagcatgatctgcggctgggacaagaagggccccggcctgtactacgtggacgagcacggcaccagactgagcggcaacatgttcagcaccggcagcggcaacacctacgcctacggcgtgatggacagcggctacagacccaacctgagccccgaggaggcctacgacctgggcagaagagccatcgcctacgccacccacagagacagctacagcggcggcgtggtgaacatgtaccacatgaaggaggacggctgggtgaaggtggagagcaccgacgtgagcgacctgctgcaccagtacagagaggccaaccagtag

SEQ ID NO: 242516 - protein, 760 aa, Artificial Sequence
  derived and/or modified sequence
MVLKAFFPTCCVSTDSGLLVGRWVPEQSSAVVLAVLHFPFIPIQVKQLLAQVRQASQVGVAVLGTWCHCRQEPEESLGRFLESLGAVFPHEPWLRLCRERGGTFWSCEATHRQAPTAPGAPGEDQVMLIFYDQRQVLLSQLHLPTVLPDRQAGATTASTGGLAAVFDTVARSEVLFRSDRFDEGPVRLSHWQSEGVEASILAELARRASGPICLLLASLLSLVSAVSACRVFKLWPLSFLGSKLSTCEQLRHRLEHLTLIFSTRKAENPAQLMRKANTVASVLLDVALGLMLLSWLHGRSRIGHLADALVPVADHVAEELQHLLQWLMGAPAGLKMNRALDQVLGRFFLYHIHLWISYIHLMSPFVEHILWHVGLSACLGLTVALSLLSDIIALLTFHIYCFYVYGARLYCLKIHGLSSLWRLFRGKKWNVLRQRVDSCSYDLDQLFIGTLLFTILLFLLPTTALYYLVFTLLRLLVVAVQGLIHLLVDLINSLPLYSLGLRLCRPYRLADKPTALQPRGAHLPPPQLWLPPQALLGRPVPQAVPWGAHLPLEAERGQAGLRELLARLAPPHGHSQPSALPGWHQLSWRMSCALWTLLCAPEHGRPCYHTLGLEVIGSEQMWGWPARLAALHHWHCLPWDPLPTCCGHHGGEHSNPRCPEHCPMPTLCTQVQRVRPPQQPQVEGWSPWGLPSGSALAVGVEGPCQDEPPSPRHPLAPSAEQHPASGGLKQSLTPVPSGPGPSLPEPHGVYLRMFPGEVAL

SEQ ID NO: 242517 - DNA, 2283 bp, Artificial Sequence
  derived and/or modified sequence
atggtgctgaaggccttcttccccacctgctgcgtgagcaccgacagcggcctgctggtgggcagatgggtgcccgagcagagcagcgccgtggtgctggccgtgctgcacttccccttcatccccatccaggtgaagcagctgctggcccaggtgagacaggccagccaggtgggcgtggccgtgctgggcacctggtgccactgcagacaggagcccgaggagagcctgggcagattcctggagagcctgggcgccgtgttcccccacgagccctggctgagactgtgcagagagagaggcggcaccttctggagctgcgaggccacccacagacaggcccccaccgcccccggcgcccccggcgaggaccaggtgatgctgatcttctacgaccagagacaggtgctgctgagccagctgcacctgcccaccgtgctgcccgacagacaggccggcgccaccaccgccagcaccggcggcctggccgccgtgttcgacaccgtggccagaagcgaggtgctgttcagaagcgacagattcgacgagggccccgtgagactgagccactggcagagcgagggcgtggaggccagcatcctggccgagctggccagaagagccagcggccccatctgcctgctgctggccagcctgctgagcctggtgagcgccgtgagcgcctgcagagtgttcaagctgtggcccctgagcttcctgggcagcaagctgagcacctgcgagcagctgagacacagactggagcacctgaccctgatcttcagcaccagaaaggccgagaaccccgcccagctgatgagaaaggccaacaccgtggccagcgtgctgctggacgtggccctgggcctgatgctgctgagctggctgcacggcagaagcagaatcggccacctggccgacgccctggtgcccgtggccgaccacgtggccgaggagctgcagcacctgctgcagtggctgatgggcgcccccgccggcctgaagatgaacagagccctggaccaggtgctgggcagattcttcctgtaccacatccacctgtggatcagctacatccacctgatgagccccttcgtggagcacatcctgtggcacgtgggcctgagcgcctgcctgggcctgaccgtggccctgagcctgctgagcgacatcatcgccctgctgaccttccacatctactgcttctacgtgtacggcgccagactgtactgcctgaagatccacggcctgagcagcctgtggagactgttcagaggcaagaagtggaacgtgctgagacagagagtggacagctgcagctacgacctggaccagctgttcatcggcaccctgctgttcaccatcctgctgttcctgctgcccaccaccgccctgtactacctggtgttcaccctgctgagactgctggtggtggccgtgcagggcctgatccacctgctggtggacctgatcaacagcctgcccctgtacagcctgggcctgagactgtgcagaccctacagactggccgacaagcccaccgccctgcagcccagaggcgcccacctgccccccccccagctgtggctgcccccccaggccctgctgggcagacccgtgccccaggccgtgccctggggcgcccacctgcccctggaggccgagagaggccaggccggcctgagagagctgctggccagactggcccccccccacggccacagccagcccagcgccctgcccggctggcaccagctgagctggagaatgagctgcgccctgtggaccctgctgtgcgcccccgagcacggcagaccctgctaccacaccctgggcctggaggtgatcggcagcgagcagatgtggggctggcccgccagactggccgccctgcaccactggcactgcctgccctgggaccccctgcccacctgctgcggccaccacggcggcgagcacagcaaccccagatgccccgagcactgccccatgcccaccctgtgcacccaggtgcagagagtgagacccccccagcagccccaggtggagggctggagcccctggggcctgcccagcggcagcgccctggccgtgggcgtggagggcccctgccaggacgagccccccagccccagacaccccctggcccccagcgccgagcagcaccccgccagcggcggcctgaagcagagcctgacccccgtgcccagcggccccggccccagcctgcccgagccccacggcgtgtacctgagaatgttccccggcgaggtggccctgtag

SEQ ID NO: 242518 - DNA, 2283 bp, Artificial Sequence
  derived and/or modified sequence
atggttctgaaggctttttttcctacctgttgcgtgagtacagactccgggctactagtcgggaggtgggtccctgaacagtccagtgcagtggtgcttgctgtgcttcattttccgttcataccgattcaggtaaagcaactgcttgcccaggtaaggcaagcaagccaggtgggagttgccgtgctcgggacttggtgccattgtcggcaggagccagaggaaagtctgggtcggttcctggagtctttaggtgcagtgttccctcacgagccgtggctgcgcctctgccgcgagaggggcggaaccttttggtcttgcgaggccacacatcgacaggcacctaccgcaccaggcgctcccggagaagaccaggtgatgctgatcttttacgaccagcgccaggtcctactgtcccaactgcacttgcccactgtcttaccagacagacaggctggcgcgacaaccgcaagtacaggcggactggccgctgtttttgataccgtagcgaggagcgaggtgcttttccgttcagaccgattcgatgagggaccagtgcgcctatcccactggcagagtgagggtgttgaggctagtatcctagctgagttagcccgtagggcctccggcccgatctgtttgctgctggcctcgcttctttccctcgtgagcgccgtcagtgcgtgtagggtttttaagctctggccactcagcttcctgggaagtaagctatccacgtgcgagcagctaagacacagactggagcacttaacacttattttttccaccagaaaagcggagaatccagctcagctcatgagaaaggccaataccgttgcctccgtcctgctggacgtggctttgggactgatgctgctttcatggctgcacggtaggtctagaatcggtcacttggctgacgcccttgtccccgtcgctgatcacgtggctgaggagctgcagcacttgctgcagtggttgatgggagcaccagccggactgaagatgaacagggcacttgaccaagtccttgggagatttttcctgtaccacatccatctgtggatctcgtacatacacctcatgagcccattcgtcgagcacatcctgtggcacgtaggtctctctgcttgcctgggtcttacagttgccctttcattattgagcgatattattgcgctgctgacattccacatctactgtttttacgtgtatggtgctcgcctttactgcttaaagattcatggactctcttccctttggaggctgtttagaggcaagaagtggaacgtgttgcggcagagggtagactcttgctcatacgatttggatcagctctttatcggtaccctcctgtttaccatcctcctgttcctgttaccgactacagctctctactacttggtttttactctgctgcggctgctggtcgtcgccgttcagggactgattcatctgctcgtggacctcattaattcccttccactctactcactcggactcaggctttgtcgaccttaccgcttggctgataaaccaacagccttgcagcctcggggggcgcatcttcccccgcctcaattgtggcttccaccccaggccttgctggggcgcccagtgcctcaggctgtgccatggggcgctcatctgccactggaggctgagagagggcaggctgggctgagggagcttcttgctcggcttgcccccccacacggtcattcacagccatccgccctgcccggctggcatcagctatcctggaggatgtcatgcgctctctggaccttattatgcgcgccagaacacgggcgaccttgttatcataccctgggtttggaggtcatcgggagcgagcaaatgtggggatggccagcaaggctggccgcccttcaccactggcactgtttgccgtgggaccctctgcccacctgctgtgggcatcacggtggcgaacactcgaatccacgctgtccagagcactgtcccatgcccaccctctgcacgcaagtacaacgggtgcgcccaccgcaacagccacaggtggagggttggtccccgtgggggctaccatctggaagcgcactcgctgtcggcgtcgaaggtccgtgtcaagacgaaccgccttcccctcggcatcctctcgcaccttctgctgagcagcaccccgccagcggagggctcaagcagagcttgaccccagtaccctcaggacccgggccatctctgcccgagcctcatggcgtctatctgcgcatgtttccaggcgaagtcgccctatag

SEQ ID NO: 242519 - DNA, 2283 bp, Artificial Sequence
  derived and/or modified sequence
atggtgctgaaggccttcttccccacctgctgcgtgtccacagacagcggcctgctggtgggccgctgggtgcctgagcagagcagcgctgtggtgctggccgtgctgcacttccccttcatccccatccaggtgaagcagctgctggcccaggtgcggcaggccagccaggtgggcgtggccgtgctgggcacctggtgccactgccggcaggagcctgaggagagcctgggccgcttcctggagagcctgggcgctgtgttcccccatgagccctggctgcggctgtgccgggagcggggcggcaccttctggagctgtgaggccacccaccggcaggcccccacagcccctggggcccctggagaggaccaggtgatgctgatcttctatgaccagaggcaggtgctgctgagccagctgcacctgcccaccgtgctgcctgaccggcaggccggggccaccacagccagcactggaggcctggccgctgtgtttgacacagtggcccggtctgaggtgctcttcagaagtgacagatttgatgagggccctgtgcggctgagccactggcagagcgagggcgtggaggccagcatcctggccgagctggcccggcgggccagcggccccatctgcctgctgctggccagcctgctgagcctggtgtctgctgtgtctgcctgcagggtcttcaagctgtggcccctgtccttcctgggcagcaagctgagcacctgtgagcagctgcggcaccggctggagcacctgaccctcatcttcagcaccaggaaggcagaaaatcctgcccagctgatgaggaaggccaacacagtggcctctgtgctgctggatgtggccctgggcctgatgctgctgtcctggctgcacggccgcagccgcatcggccacctggctgatgccctggtgcctgtggccgaccacgtggccgaggagctgcagcacctgctgcagtggctgatgggcgccccagctggcctgaagatgaacagagccctggaccaggtgctgggccgcttcttcctgtaccacatccacctgtggatctcctacatccacctgatgagcccctttgtggagcacatcctgtggcacgtgggcctgagcgcctgcctgggcctgactgtggccctgagcctgctgagtgacatcatcgccctgctgaccttccacatctactgcttctacgtgtatggagcccggctgtactgcctgaagatccacggcctgagcagcctgtggaggctcttccggggcaagaagtggaatgtgctgcggcagagggtggacagctgcagctatgacctggaccagctgttcatcggcaccctgctcttcaccatcctgctcttcctgctgcccaccacagccctgtactacctggtgttcaccctgctgcggctgctggtggtggccgtgcagggcctcatccacctgctggtggacctgatcaacagcctgcccctgtacagcctgggcctgcggctgtgccggccctaccgcctggccgacaagcccacagccctgcagcccaggggggcccacctgcccccaccccagctgtggctgcccccccaggccctgctgggccggcctgtgccccaggccgtgccctggggcgcccacctgcccctggaggccgagcggggccaggccggcctgcgggagctgctggcccggctggccccaccccacggccacagccagcccagcgccctgcccggctggcaccagctgtcctggaggatgagctgtgccctgtggaccctgctgtgtgcccctgagcacggccggccctgctaccacaccctgggcctggaggtgattggcagcgagcagatgtggggctggccagcccggctggccgccctgcaccactggcactgcctgccctgggaccccctgcccacctgctgcggccaccacggcggggagcacagcaacccccgctgcccagagcactgccccatgcccaccctgtgcacccaggtgcagagggtgcggcccccccagcagccccaggtggagggctggagcccctggggcctgcccagcggcagcgccctggccgtgggcgtggagggcccctgccaggatgagccccccagccccaggcaccccctggcccccagcgctgagcagcacccagccagcggcggcctgaagcagagcctgacccctgtgcccagcggccctggccccagcctgcctgagccccatggagtgtacctgaggatgtttcctggagaggtggccctgtag

SEQ ID NO: 242520 - DNA, 2283 bp, Artificial Sequence
  derived and/or modified sequence
atggtgctgaaggccttcttccccacctgctgcgtgagcaccgactcagggctgctcgtgggacggtgggttcctgaacagtcctctgcggtcgtgctagccgtgctgcatttccccttcatccccatccaggttaagcagctgctagcacaagtgcggcaggcaagtcaagtcggtgtcgcggtgctcggaacctggtgccactgtcgccaggagcccgaggagtcccttggacgattcctggaatccctgggagccgtatttccacatgagccttggctgagactatgtcgtgagcgcggcgggacattttggagctgtgaggctactcacaggcaggcgcctacagcaccgggcgcgccaggcgaggatcaggtgatgcttatcttctatgatcagaggcaggtgttactaagccagctgcacctgcctaccgtcctacctgacaggcaggctggcgctacgactgccagtaccggagggctggccgccgtttttgataccgtagcacgaagtgaggtgctgttcagaagtgatcggtttgacgaggggcctgtcagattgtcccactggcagtcagaaggggtggaggcctcaattttagccgagctcgccagaagagcatcgggccctatctgtcttctgctcgccagtctactgtccctggtatcagccgtatcagcatgtagggtctttaaattgtggccactttcttttcttggtagtaaattgtccacctgtgaacagctgcgacatagactcgaacatctgaccctcattttctctaccaggaaggccgagaatcctgcgcaactaatgcggaaggcaaatacagtggcgtcagtactgctggatgtggcgctgggtctcatgctcctgagttggttgcacggccggtcacgtatcgggcatctcgccgacgccctcgttcccgtggcagatcacgttgccgaggaacttcagcacttactccaatggctcatgggcgcccctgccgggttgaagatgaaccgagcactcgatcaggtgttggggagattttttctctaccatatccacctctggatcagctatatacatctgatgagcccctttgtggaacatattctttggcacgtaggtctgagtgcatgtctggggttgaccgtggccttaagtctgttatccgacattatcgctcttctaacttttcacatatactgtttctacgtgtacggcgccaggttgtactgcctgaaaattcatggcctctcctccctctggcgcttattcagggggaagaaatggaacgtgctgcggcagcgagttgactcttgcagctacgatctcgatcagctgttcatcgggacccttctgttcacaattctcttgtttctgcttcccaccaccgcactatactatttggtgttcacactacttcgcttactggtcgtggcagtccagggcttaatccacctcttggtggatcttatcaactctcttcctctgtattccttggggcttcggctgtgtcggccctatagactcgccgacaagcccacagccctacaaccccgcggcgctcacctgccccctccccagctgtggcttcccccacaggcgctgttaggccggcccgtgccgcaggctgtgccctggggcgctcatcttccactggaagctgagcgcgggcaagccggactgagagaactgcttgctagactcgcccctccacacggccatagccagccctccgcccttccgggatggcatcagctatcttggcgcatgagctgcgctctctggactctgctgtgcgcaccagagcacggcagaccctgttatcacaccctgggcctggaagtgatcggatcggagcagatgtggggatggccagccaggcttgcagcacttcaccattggcactgcctcccttgggaccctttgcccacttgctgtgggcaccacgggggagaacactccaatcctcgctgtccagagcactgtcctatgcctaccttgtgtacccaggtccagagagtgcgaccaccacagcagccccaggtggaggggtggagcccgtggggactgccatctggttcagctctggccgttggagtggaaggcccttgccaggacgaacccccgtccccacggcatcctctcgccccatccgccgaacagcacccagcttctggaggactgaagcagtcactgacgcctgtgcctagcggacccggcccttcccttccagaaccccatggggtgtatctgagaatgttccccggagaggtggccttgtag

SEQ ID NO: 242521 - DNA, 2846 bp, Artificial Sequence
  derived and/or modified sequence
gtctgcccgggcccgcccatcggggtccccaaccccatccggaccccgccgcccgagcgcgcggccccggaagcacccgcctcccggcatggtgctcaaggccttcttccccacgtgctgcgtctcgacggacagcgggctgctggtgggacggtgggtgccggagcagagcagcgccgtggtcctggcggtcctgcactttcccttcatccccatccaggtcaagcagctcctggcccaggtgcggcaggccagccaggtgggcgtggccgtgctgggcacctggtgccactgccggcaggagcccgaggagagcctgggccgcttcctggagagcctgggtgctgtcttcccccatgagccctggctgcggctgtgccgggagagaggcggcacgttctggagctgcgaggccacccaccggcaagcgcccactgcccccggtgcccctggtgaggaccaggtcatgctcatcttctatgaccagcgccaggtgttgctgtcacagctacacctgcccaccgtcctgcccgaccgccaggctggagccaccactgccagcacggggggcctggctgccgtcttcgacacggtagcacgcagtgaggtgctcttccgcagtgaccgctttgatgagggccccgtgcggctgagccactggcagtcggagggcgtggaggccagcatcctcgcggagctggccaggcgagcctcgggacccatttgcctgctgttggccagcctgctgtcgctggtctcagctgtcagtgcctgccgagtgttcaagctctggcccctgtccttcctcgggagcaaactctccacgtgcgaacagctccggcaccggctggagcacctcacgctaatcttcagtacacggaaggcggagaaccctgcccagctgatgaggaaggccaacacggtggcctctgtgctgctggacgtggccctgggcctcatgctgctgtcctggctccacgggagaagccgcatcgggcatctggccgacgccctcgttcctgtggctgaccacgtggccgaggagctccagcatctgctgcagtggctgatgggtgctcccgccgggctcaagatgaaccgtgcactggaccaggtgctgggccgcttcttcctctaccacatccacctgtggatcagctacatccacctcatgtcccccttcgtggagcacatcctttggcacgtgggcctctcggcctgcctgggcctgacggtggccctgtccctcctctcggacattatcgccctcctcaccttccacatctactgcttttacgtctatggagccaggctgtactgcctgaagatccatggcctgtcctcactgtggcgtctgttccgggggaagaagtggaacgttctgcgccagcgcgtggactcctgttcctatgacctggaccagctgttcatcgggactctgctcttcaccatcctgctcttcctcctgcctaccacagccctgtactacctggtgttcaccctgctccggctcctggtggtcgccgtgcagggcctgatccatctgctcgtggacctcatcaactccctgccgctgtactcactgggtcttcggctctgccggccctacaggctggcggataaacccactgccctacagccgcgtggtgcacacctaccgcctccccagctgtggctgccaccccaagcactcctggggcgccctgtgccgcaagctgttccttggggagctcatctacccctggaggcagagaggggacaagcaggactgagggaactgctggctcgcctggcaccaccacacggccacagccagccatctgctctgccagggtggcaccagctcagctggcgcatgtcctgtgctttgtggacgctgctgtgtgctcctgaacacggcaggccctgctatcacaccttgggcttggaggtcattgggagtgagcagatgtgggggtggccagccaggctggccgcactccatcactggcactgcctgccttgggacccgcttcccacctgctgcggtcaccatggtggcgagcacagcaaccccaggtgtccagagcactgccccatgcccaccctgtgtacccaggtccagagggtccgtccaccacagcagccccaggtggagggctggtctccctgggggctccccagtggctctgccctggctgtgggggtggagggaccttgccaggatgaaccccccagtcccaggcaccctctagctccctcagccgaacagcaccctgcatctgggggattgaagcagtcgctgacccccgtccccagcgggcccgggccctcactccctgaaccacacggggtttatttgcggatgttccctggagaggtcgctttgtgaagaaaccatcagcaggctgtgagcatcgccaggctgctgtgggggcgggagcagcctcagtgtcaagggcccgcccactgacccagccgtacctattcgtccacggtgccccgtagcagcaggtcctgcggccaaatctgtctcccttcatgggcctcccagggaaggaggaagccctgctgtgcagacacctctgtggccccccaggagtgtgagtggcctggggagggggccgtggcactgaggccgaaagtgcctgccagacggcacggtctgggtgcgggtgttccctgtgagcccgagtccgcttcaggaggggagcctgcaggtgccggctggtgaggggatgacgcgctgtgggtgggaggaggcagcgcccatctcagcagcaccaggactgcctgggactccctggcaacccagcaccggggaagccgtcagctgctgtgacaataaaacctgccccgtgtctgga

SEQ ID NO: 242522 - DNA, 2283 bp, Artificial Sequence
  derived and/or modified sequence
atggtccttaaagctttcttcccaacatgctgtgtgagcacagacagtggtctcctcgtgggcaggtgggtccccgaacagagctccgctgtagtgctagcagtgctgcacttcccattcatccctattcaggtgaaacagctgctggcgcaggtgcgccaggcaagccaggttggcgttgcagtccttggaacctggtgccactgtcgccaggagcctgaggaaagtctgggacggttcctggagtcactcggcgcagtgttcccacatgagccctggctcaggctgtgtcgagaaagggggggtaccttctggtcctgcgaggccactcacagacaagccccaacagctccaggtgctcctggtgaagaccaggtaatgttgattttttacgatcagcggcaagtcctcctttctcagctccatttacccaccgtgttgcccgaccgacaggccggagcaactaccgccagcactggtggcttggccgctgtgttcgacacggttgccagatcagaagtactgttcaggagtgaccggttcgatgaaggaccagtgcgcctttcacattggcagtccgagggcgtcgaggccagtatactagccgagctggccaggcgtgcctcaggacctatttgtctcctgctggcgtccctgcttagcttggtcagtgcagtaagcgcttgccgcgtcttcaagctctggcctttatccttccttggcagcaaattgagcacttgcgagcagctaagacataggctggaacaccttacgctgatcttcagtacccgaaaggctgagaaccccgcacagctcatgcggaaggctaacactgttgctagtgtgctcctcgacgtggcgctgggactgatgctactgagttggctccacggaaggtccagaatcgggcatctggccgatgctctagtccctgtcgcggaccacgtcgccgaagagctgcaacacctgcttcagtggctgatgggcgctccagcaggattgaaaatgaaccgggctctcgatcaggttctcgggagatttttcttataccacatccatctgtggatttcctacatacacctgatgagtcctttcgttgagcacattctgtggcatgttggactcagcgcttgtctcgggctgaccgtcgctctcagcttactaagcgatattatagccctgttgaccttccatatttactgtttttatgtctatggcgctcgcctatattgtctgaagattcacgggctgagtagcctgtggcgactcttcagagggaagaagtggaatgtcctgaggcaaagggtggattcatgttcctacgatctagatcagctgttcataggaaccctcctctttacaatattactctttctcttgcccacaactgcgctgtactacttggtcttcacactgctgcgcctgttggtcgtggccgtccagggactgatccatctcctggtggaccttattaactcgctgccactgtactcgttgggcctccgattatgcaggccctacaggcttgcggataagcccaccgcgttgcagcccaggggcgctcatctcccgccaccgcagctgtggttgccccctcaggccttgctgggtagacctgtcccacaagctgtgccgtggggggctcatctgcccctggaggccgaacgaggacaagccggacttagggagttgctggcaagactcgctccccctcatggacacagtcagccatcagctctgccaggctggcaccagttatcctggcgcatgagctgtgccttgtggaccttactgtgcgccccagagcacgggaggccctgctatcatacgctggggctggaggttattgggagtgagcaaatgtggggttggccagcaagattggcagcactgcaccactggcactgcttgccatgggacccactccccacatgctgtggccatcatgggggagagcatagcaaccccaggtgtcctgagcactgtcccatgcccacactatgtactcaggtgcagcgtgtgcgcccaccgcaacagccccaggtggaagggtggagcccatggggactcccaagcggttcagcgttagcagtcggagttgagggaccctgccaggacgagcccccttcgccacgtcaccccctcgcgccttcagccgaacagcacccagcatcagggggtctaaagcagtccctgaccccagtacctagcgggccaggccctagtttaccggaaccccacggggtctacctgagaatgttccctggggaggtggctctctag

SEQ ID NO: 242523 - DNA, 2283 bp, Artificial Sequence
  derived and/or modified sequence
atggttcttaaagcgttctttccaacttgttgcgtgagcaccgatagtggcttgttggtcggaaggtgggtaccagagcaatcttcggctgtggtgctggccgtgctgcactttccattcatccctattcaggtgaagcaacttttagcccaggttagacaggcttcacaagtaggtgtggcagtacttggcacctggtgccattgccgacaggagccagaagaatccttagggagattcttagaaagcttgggtgccgtttttccccacgaaccttggctgcggctgtgcagggaaagggggggaaccttttggagctgcgaggccacccacagacaggccccgaccgctcccggcgctcctggagaggatcaggtgatgttaatattctatgaccagagacaggtacttctttctcagctccacctgccaacagttctgcccgaccgacaggctggggcaacaaccgcatctactggagggctggcagcggtctttgacacagtggcaagatccgaggtgttatttcgatcagaccggtttgatgagggacccgtccggttatctcactggcagtctgagggggtcgaagctagtatcctcgccgagctggctcggcgcgcttcaggccccatttgcctgctgcttgcctctctgttaagcctcgtctctgccgtgtcagcgtgtagagtttttaaactgtggccgctgtcctttttaggctcaaagctttccacttgcgaacaactgaggcacagactggaacatttaacacttatattctccacccgaaaggcagaaaatcccgcccaacttatgagaaaggctaatacagtggcaagcgtcctcttagatgttgcactcggtttaatgctgttgtcctggcttcatggccggagccgcattgggcacctagcagatgcacttgtaccagttgccgaccacgtcgctgaagagttgcagcatctcctgcagtggctgatgggagctcctgcggggctgaaaatgaatagggcactcgatcaggtgctgggtaggtttttcttgtaccacatacacctttggataagttacatccaccttatgtccccctttgtcgaacacattctgtggcatgtgggtctctctgcctgtcttggacttaccgtggctctgtccctgctctccgatattatcgcactccttacgttccacatttattgtttctacgtctacggtgcgcggctgtactgtctcaagatacacggacttagctcgctgtggcggttgtttagagggaaaaagtggaatgtgctgcgacagagagtagacagctgctcatatgacctggaccagttatttatcggaacactactgttcaccatcctgctgttcctgcttcccacaaccgccctctattacttggtctttaccctgctccgcctcctggtggtggcagttcaagggctgattcatttactggtcgatctcataaactctctgcctttgtacagtcttgggctgcggctttgccgcccatatcgattggctgacaagccgacagcgttacagcccagaggcgctcacctgccccccccccaactatggttacccccccaggcgttgcttggccggcctgtgccgcaggcagtcccttggggagcccacctcccccttgaggcagagagaggacaggcaggcttacgggagctcctggctcggctggcaccccctcacggccatagtcaaccatccgccttgcctggctggcaccaactctcgtggcgtatgtcatgtgcactctggaccctcctgtgcgctcccgagcatggccggccatgctaccataccctagggcttgaagtaattggtagtgagcaaatgtggggctggccagcgcggcttgccgctcttcaccactggcattgcctcccttgggaccctctgcctacctgctgtggtcatcatgggggcgaacactctaacccacgatgccctgaacattgtccaatgcccaccctgtgcactcaggtgcagagagtcagaccacctcagcagcctcaagttgagggttggtctccgtgggggcttccctctggttccgcgctggcagtgggagtagagggtccttgccaggacgaaccaccttcaccgagacacccgctcgctcccagcgctgagcagcaccccgcctctgggggcttgaagcagagcctaacccctgtacctagtggaccgggccccagcctgccggaaccccatggcgtctatttacgcatgtttcctggcgaagtggccctgtag

SEQ ID NO: 242524 - DNA, 2283 bp, Artificial Sequence
  derived and/or modified sequence
atggtcctgaaagcctttttcccaacgtgctgcgtcagcactgatagcggtttgctcgtcggtagatgggtgcctgagcaatcctcagcagttgtgcttgcagtcttgcacttccccttcatacccatccaagtgaaacaactccttgctcaggtcagacaggcctcacaggtaggtgtagctgtgctgggtacttggtgtcactgcagacaggaacccgaggagagtctgggtagattcttggaatcactgggagctgtattcccccacgagccatggctgcgcttgtgccgtgaacggggcggaacattctggagctgcgaagccacacaccgccaggcccctaccgcaccaggagccccaggagaggaccaggtgatgttaatattctacgaccaacgacaggtgcttttgtctcagctccacttgcctacagtgctacccgacaggcaagccggggctactaccgcatctacaggaggactagccgccgtgttcgataccgtagcgcggtccgaagtattattccgctcagaccgattcgacgaaggcccagtcagactaagccattggcagtctgaaggcgttgaggcctctattcttgcagagttagcaagaagagcttctggaccgatatgtctgctcctcgcttctcttctcagcttagtttcggcagtctcagcctgcagagtctttaaattatggcctcttagtttcttagggagcaagctgtccacttgcgagcaactgaggcacagacttgaacacctgactcttatctttagcacacggaaggctgaaaacccggcccagctgatgcgcaaagctaatactgtcgctagcgtcctcttggacgtcgccctgggtcttatgctgttgagctggctccacggccgatcacgcattgggcacctagcagatgcacttgtaccagttgccgaccacgtcgctgaagagttgcagcatctcctgcagtggctgatgggagctcctgcggggctgaaaatgaatagggcactcgatcaggtgctgggtaggtttttcttgtaccacatacacctttggataagttacatccaccttatgtccccctttgtcgaacacattctgtggcatgtgggtctctctgcctgtcttggacttaccgtggctctgtccctgctctccgatattatcgcactccttacgttccacatttattgtttttacgtttacggcgcaagattgtattgccttaaaatacatggtctctcatctctctggaggttgttcaggggcaaaaagtggaatgtcctgcgacagagggtggactcctgcagctatgatctggatcaactgttcatcggcacacttttattcacaatattactctttctattgccaaccacggccttatactatttggtttttacgcttctgcgcctcctggttgtcgccgtgcagggactgatacaccttttggtggacctcataaacagcttacccttgtattccctcggactgagactctgccgcccatatagactggcagataaacccactgcactgcagccacgcggcgctcatctgcccccaccgcaactgtggttgccccctcaagctctccttggaagacccgtacctcaagccgtgccttggggcgctcacctgccgctagaggcagagcgtggccaggccggacttcgcgaactgctggcgcgcctggcccctcctcacggccacagtcaaccctccgccctccccggttggcaccaattgtcctggcggatgtcttgtgccctgtggacactcctgtgcgctccagaacacgggagaccctgttaccatacgcttggccttgaagtaatcggaagcgaacagatgtggggatggccggctcgattggctgcgctgcaccattggcactgcctgccctgggacccactgccaacttgttgcggccatcacggaggcgaacactctaatccacgctgccctgaacattgccccatgccgacactatgcacacaggtccagagggttagacccccccagcagccccaggttgagggttggagtccctggggtcttcctagcggctcagcactggccgtaggagtggaagggccctgtcaggacgaacctccttcacctagacaccccttagctccttccgcagaacaacacccagctagcggaggcttaaagcaatccctcacccccgtgccttccgggccaggaccctctctaccagagccccatggcgtctacctccgcatgtttccaggcgaagtcgcattgtag

SEQ ID NO: 242525 - RNA, 2283 nt, Artificial Sequence
  derived and/or modified sequence
augguucuuaaagcguucuuuccaacuuguugcgugagcaccgauaguggcuuguuggucggaagguggguaccagagcaaucuucggcuguggugcuggccgugcugcacuuuccauucaucccuauucaggugaagcaacuuuuagcccagguuagacaggcuucacaaguagguguggcaguacuuggcaccuggugccauugccgacaggagccagaagaauccuuagggagauucuuagaaagcuugggugccguuuuuccccacgaaccuuggcugcggcugugcagggaaagggggggaaccuuuuggagcugcgaggccacccacagacaggccccgaccgcucccggcgcuccuggagaggaucaggugauguuaauauucuaugaccagagacagguacuucuuucucagcuccaccugccaacaguucugcccgaccgacaggcuggggcaacaaccgcaucuacuggagggcuggcagcggucuuugacacaguggcaagauccgagguguuauuucgaucagaccgguuugaugagggacccguccgguuaucucacuggcagucugagggggucgaagcuaguauccucgccgagcuggcucggcgcgcuucaggccccauuugccugcugcuugccucucuguuaagccucgucucugccgugucagcguguagaguuuuuaaacuguggccgcuguccuuuuuaggcucaaagcuuuccacuugcgaacaacugaggcacagacuggaacauuuaacacuuauauucuccacccgaaaggcagaaaaucccgcccaacuuaugagaaaggcuaauacaguggcaagcguccucuuagauguugcacucgguuuaaugcuguuguccuggcuucauggccggagccgcauugggcaccuagcagaugcacuuguaccaguugccgaccacgucgcugaagaguugcagcaucuccugcaguggcugaugggagcuccugcggggcugaaaaugaauagggcacucgaucaggugcuggguagguuuuucuuguaccacauacaccuuuggauaaguuacauccaccuuaugucccccuuugucgaacacauucuguggcaugugggucucucugccugucuuggacuuaccguggcucugucccugcucuccgauauuaucgcacuccuuacguuccacauuuauuguuucuacgucuacggugcgcggcuguacugucucaagauacacggacuuagcucgcuguggcgguuguuuagagggaaaaaguggaaugugcugcgacagagaguagacagcugcucauaugaccuggaccaguuauuuaucggaacacuacuguucaccauccugcuguuccugcuucccacaaccgcccucuauuacuuggucuuuacccugcuccgccuccuggugguggcaguucaagggcugauucauuuacuggucgaucucauaaacucucugccuuuguacagucuugggcugcggcuuugccgcccauaucgauuggcugacaagccgacagcguuacagcccagaggcgcucaccugccccccccccaacuaugguuacccccccaggcguugcuuggccggccugugccgcaggcagucccuuggggagcccaccucccccuugaggcagagagaggacaggcaggcuuacgggagcuccuggcucggcuggcacccccucacggccauagucaaccauccgccuugccuggcuggcaccaacucucguggcguaugucaugugcacucuggacccuccugugcgcucccgagcauggccggccaugcuaccauacccuagggcuugaaguaauugguagugagcaaauguggggcuggccagcgcggcuugccgcucuucaccacuggcauugccucccuugggacccucugccuaccugcuguggucaucaugggggcgaacacucuaacccacgaugcccugaacauuguccaaugcccacccugugcacucaggugcagagagucagaccaccucagcagccucaaguugaggguuggucuccgugggggcuucccucugguuccgcgcuggcagugggaguagaggguccuugccaggacgaaccaccuucaccgagacacccgcucgcucccagcgcugagcagcaccccgccucugggggcuugaagcagagccuaaccccuguaccuaguggaccgggccccagccugccggaaccccauggcgucuauuuacgcauguuuccuggcgaaguggcccuguag

SEQ ID NO: 242526 - RNA, 2283 nt, Artificial Sequence
  derived and/or modified sequence
augguccugaaagccuuuuucccaacgugcugcgucagcacugauagcgguuugcucgucgguagaugggugccugagcaauccucagcaguugugcuugcagucuugcacuuccccuucauacccauccaagugaaacaacuccuugcucaggucagacaggccucacagguagguguagcugugcuggguacuuggugucacugcagacaggaacccgaggagagucuggguagauucuuggaaucacugggagcuguauucccccacgagccauggcugcgcuugugccgugaacggggcggaacauucuggagcugcgaagccacacaccgccaggccccuaccgcaccaggagccccaggagaggaccaggugauguuaauauucuacgaccaacgacaggugcuuuugucucagcuccacuugccuacagugcuacccgacaggcaagccggggcuacuaccgcaucuacaggaggacuagccgccguguucgauaccguagcgcgguccgaaguauuauuccgcucagaccgauucgacgaaggcccagucagacuaagccauuggcagucugaaggcguugaggccucuauucuugcagaguuagcaagaagagcuucuggaccgauaugucugcuccucgcuucucuucucagcuuaguuucggcagucucagccugcagagucuuuaaauuauggccucuuaguuucuuagggagcaagcuguccacuugcgagcaacugaggcacagacuugaacaccugacucuuaucuuuagcacacggaaggcugaaaacccggcccagcugaugcgcaaagcuaauacugucgcuagcguccucuuggacgucgcccugggucuuaugcuguugagcuggcuccacggccgaucacgcauugggcaccuagcagaugcacuuguaccaguugccgaccacgucgcugaagaguugcagcaucuccugcaguggcugaugggagcuccugcggggcugaaaaugaauagggcacucgaucaggugcuggguagguuuuucuuguaccacauacaccuuuggauaaguuacauccaccuuaugucccccuuugucgaacacauucuguggcaugugggucucucugccugucuuggacuuaccguggcucugucccugcucuccgauauuaucgcacuccuuacguuccacauuuauuguuuuuacguuuacggcgcaagauuguauugccuuaaaauacauggucucucaucucucuggagguuguucaggggcaaaaaguggaauguccugcgacagaggguggacuccugcagcuaugaucuggaucaacuguucaucggcacacuuuuauucacaauauuacucuuucuauugccaaccacggccuuauacuauuugguuuuuacgcuucugcgccuccugguugucgccgugcagggacugauacaccuuuugguggaccucauaaacagcuuacccuuguauucccucggacugagacucugccgcccauauagacuggcagauaaacccacugcacugcagccacgcggcgcucaucugcccccaccgcaacugugguugcccccucaagcucuccuuggaagacccguaccucaagccgugccuuggggcgcucaccugccgcuagaggcagagcguggccaggccggacuucgcgaacugcuggcgcgccuggccccuccucacggccacagucaacccuccgcccuccccgguuggcaccaauuguccuggcggaugucuugugcccuguggacacuccugugcgcuccagaacacgggagacccuguuaccauacgcuuggccuugaaguaaucggaagcgaacagauguggggauggccggcucgauuggcugcgcugcaccauuggcacugccugcccugggacccacugccaacuuguugcggccaucacggaggcgaacacucuaauccacgcugcccugaacauugccccaugccgacacuaugcacacagguccagaggguuagacccccccagcagccccagguugaggguuggagucccuggggucuuccuagcggcucagcacuggccguaggaguggaagggcccugucaggacgaaccuccuucaccuagacaccccuuagcuccuuccgcagaacaacacccagcuagcggaggcuuaaagcaaucccucacccccgugccuuccgggccaggacccucucuaccagagccccauggcgucuaccuccgcauguuuccaggcgaagucgcauuguag

SEQ ID NO: 242527 - protein, 134 aa, Artificial Sequence
  derived and/or modified sequence
MAEQSDEAVKYYTLEEIQKHNHSKSTWLILHHKVYDLTKFLEEHPGGEEVLREQAGGDATENFEDVGHSTDAREMSKTFIIGELHPDDRPKLNKPPETLITTIDSSSSWWTNWVIPAISAVAVALMYRLYMAED

SEQ ID NO: 242528 - protein, 98 aa, Artificial Sequence
  derived and/or modified sequence
MAEQSDEAVKYYTLEEIQKHNHSKSTWLILHHKVYDLTKFLEEHPGGEEVLREQAGGDATENFEDVGHSTDAREMSKTFIIGELHPDDRPKLNKPPEP

SEQ ID NO: 242529 - DNA, 405 bp, Artificial Sequence
  derived and/or modified sequence
atggcagaacagtcagatgaggccgtgaaatattacactctagaagaaatacagaaacataatcattccaaaagcacctggctaattctccaccacaaggtgtacgatctgacaaaattcctggaggagcaccctggtggagaagaggtgctcagagaacaggctggtggggacgcgacagagaatttcgaagacgtggggcattcgaccgacgcaagggaaatgagcaaaactttcatcataggcgagctgcatcctgatgatcgtcccaaactcaataagccccctgaaacccttattaccaccatcgactccagctcctcatggtggaccaattgggtgatccctgcaattagcgccgttgccgtggcactgatgtacagactgtacatggcggaggattag

SEQ ID NO: 242530 - DNA, 405 bp, Artificial Sequence
  derived and/or modified sequence
atggccgagcagagtgatgaggccgtgaagtactacaccctggaggagatccagaagcacaaccacagcaagagcacctggctgatcctgcaccacaaggtgtatgacctgaccaagttcctggaggagcaccctggaggagaggaggtgctgcgggagcaggccggaggagatgccacagaaaattttgaagatgtgggccacagcacagatgcccgggagatgagcaagaccttcatcattggagagctgcacccagatgaccggcccaagctgaacaagcccccagagaccctcatcaccaccatcgacagcagcagctcctggtggaccaactgggtgatcccagccatctctgctgtggccgtggccctgatgtaccgcctgtacatggctgaagattag

SEQ ID NO: 242531 - DNA, 405 bp, Artificial Sequence
  derived and/or modified sequence
atggccgagcagagcgacgaggccgtgaagtactacaccctggaggagatacagaaacataaccatagcaagtcaacctggctgatcctgcaccacaaggtgtatgatcttacaaagtttcttgaggagcacccgggaggagaagaggtgttgagggaacaggccgggggggatgccaccgagaatttcgaggacgttggtcactctaccgatgcccgggaaatgtccaaaactttcattataggtgagctccatcctgacgacaggcccaaattgaataaacctccagagaccctcataaccaccattgatagcagctcgtcttggtggacaaattgggtgatccctgctatatctgcggttgcagttgctttgatgtataggctgtacatggccgaagactag

SEQ ID NO: 242532 - DNA, 405 bp, Artificial Sequence
  derived and/or modified sequence
atggcggaacagtccgatgaagccgtgaaatattacacattggaggaaatacagaagcacaatcactccaaaagtacctggcttattctgcaccacaaggtctacgatctgactaagttcctcgaggaacacccaggcggagaggaggtgttgcgcgaacaagccggaggggatgccactgagaacttcgaggacgtgggtcatagtacagatgcaagggaaatgtctaagacctttattatcggtgagttgcaccctgatgatcggccaaagctgaataagccacccgagacgctgatcacaaccatcgactcatcctcatcctggtggacaaattgggtgatacccgcaatcagtgcagttgcagtggccctgatgtaccggctatacatggccgaggactag

SEQ ID NO: 242533 - DNA, 834 bp, Artificial Sequence
  derived and/or modified sequence
gcgccccgcccctgagccggccgcccagcccccagtggggttcccggcgcggggaatgtcccgggtggagctggctgagtcgcgcgctctgctccacccgacggggctgtgtgtgctgggcctggctcgcggcgaaccgagatggcagagcagtcggacgaggccgtgaagtactacaccctagaggagattcagaagcacaaccacagcaagagcacctggctgatcctgcaccacaaggtgtacgatttgaccaaatttctggaagagcatcctggtggggaagaagttttaagggaacaagctggaggtgacgctactgagaactttgaggatgtcgggcactctacagatgccagggaaatgtccaaaacattcatcattggggagctccatccagatgacagaccaaagttaaacaagcctccggaaactcttatcactactattgattctagttccagttggtggaccaactgggtgatccctgccatctctgcagtggccgtcgccttgatgtatcgcctatacatggcagaggactgaacacctcctcagaagtcagcgcaggaagagcctgctttggacacgggagaaaagaagccattgctaactacttcaactgacagaaaccttcacttgaaaacaatgattttaatatatctctttctttttcttccgacattagaaacaaaacaaaaagaactgtcctttctgcgctcaaatttttcgagtgtgcctttttattcatctactttattttgatgtttccttaatgtgtaatttacttattataagcatgatcttttaaaaatatatttggcttttaaagta

SEQ ID NO: 242534 - DNA, 776 bp, Artificial Sequence
  derived and/or modified sequence
gcgcgctctgctccacccgacggggctgtgtgtgctgggcctggctcgcggcgaaccgagatggcagagcagtcggacgaggccgtgaagtactacaccctagaggagattcagaagcacaaccacagcaagagcacctggctgatcctgcaccacaaggtgtacgatttgaccaaatttctggaagagcatcctggtggggaagaagttttaagggaacaagctggaggtgacgctactgagaactttgaggatgtcgggcactctacagatgccagggaaatgtccaaaacattcatcattggggagctccatccagatgacagaccaaagttaaacaagcctccggaaccttaaaggcggtgtttcaaggaaactcttatcactactattgattctagttccagttggtggaccaactgggtgatccctgccatctctgcagtggccgtcgccttgatgtatcgcctatacatggcagaggactgaacacctcctcagaagtcagcgcaggaagagcctgctttggacacgggagaaaagaagccattgctaactacttcaactgacagaaaccttcacttgaaaacaatgattttaatatatctctttctttttcttccgacattagaaacaaaacaaaaagaactgtcctttctgcgctcaaatttttcgagtgtgcctttttattcatctactttattttgatgtttccttaatgtgtaatttacttattataagcatgatcttttaaaaatatatttggcttttaaagt

SEQ ID NO: 242535 - DNA, 405 bp, Artificial Sequence
  derived and/or modified sequence
atggccgagcagagcgacgaggccgtgaagtactacaccctggaggagatccagaagcacaaccacagcaagagcacctggctgatcctgcaccacaaggtgtacgacctgaccaagttcctggaggagcaccccggcggcgaggaggtgctgagagagcaggccggcggcgacgccaccgagaacttcgaggacgtgggccacagcaccgacgccagagagatgagcaagaccttcatcatcggcgagctgcaccccgacgacagacccaagctgaacaagccccccgagaccctgatcaccaccatcgacagcagcagcagctggtggaccaactgggtgatccccgccatcagcgccgtggccgtggccctgatgtacagactgtacatggccgaggactag

SEQ ID NO: 242536 - protein, 457 aa, Artificial Sequence
  derived and/or modified sequence
MASGGGGCSASERLPPPFPGLEPESEGAAGGSEPEAGDSDTEGEDIFTGAAVVSKHQSPKITTSLLPINNGSKENGIHEEQDQEPQDLFAGDGMNAYVAYKVTTQTSLPLFRSKQFAVKRRFSDFLGLYEKLSEKHSQNGFIVPPPPEKSLIGMTKVKVGKEDSSSAEFLEKRRAALERYLQRIVNHPTMLQDPDVREFLEKEELPRAVGTQTLSGAGLLKMFNKATDAVSKMTIKMNESDIWFEEKLQEVECEEQRLRKLHAVVETLVNHRKELALNTAQFAKSLAMLGSSEDNTALSRALSQLAEVEEKIEQLHQEQANNDFFLLAELLSDYIRLLAIVRAAFDQRMKTWQRWQDAQATLQKKREAEARLLWANKPDKLQQAKDEILEWESRVTQYERDFERISTVVRKEVIRFEKEKSKDFKNHVIKYLETLLYSQQQLAKYWEAFLPEAKAIS

SEQ ID NO: 242537 - DNA, 1374 bp, Artificial Sequence
  derived and/or modified sequence
atggccagcggcggcggcggctgcagcgccagcgagagactgcccccccccttccccggcctggagcccgagagcgagggcgccgccggcggcagcgagcccgaggccggcgacagcgacaccgagggcgaggacatcttcaccggcgccgccgtggtgagcaagcaccagagccccaagatcaccaccagcctgctgcccatcaacaacggcagcaaggagaacggcatccacgaggagcaggaccaggagccccaggacctgttcgccggcgacggcatgaacgcctacgtggcctacaaggtgaccacccagaccagcctgcccctgttcagaagcaagcagttcgccgtgaagagaagattcagcgacttcctgggcctgtacgagaagctgagcgagaagcacagccagaacggcttcatcgtgccccccccccccgagaagagcctgatcggcatgaccaaggtgaaggtgggcaaggaggacagcagcagcgccgagttcctggagaagagaagagccgccctggagagatacctgcagagaatcgtgaaccaccccaccatgctgcaggaccccgacgtgagagagttcctggagaaggaggagctgcccagagccgtgggcacccagaccctgagcggcgccggcctgctgaagatgttcaacaaggccaccgacgccgtgagcaagatgaccatcaagatgaacgagagcgacatctggttcgaggagaagctgcaggaggtggagtgcgaggagcagagactgagaaagctgcacgccgtggtggagaccctggtgaaccacagaaaggagctggccctgaacaccgcccagttcgccaagagcctggccatgctgggcagcagcgaggacaacaccgccctgagcagagccctgagccagctggccgaggtggaggagaagatcgagcagctgcaccaggagcaggccaacaacgacttcttcctgctggccgagctgctgagcgactacatcagactgctggccatcgtgagagccgccttcgaccagagaatgaagacctggcagagatggcaggacgcccaggccaccctgcagaagaagagagaggccgaggccagactgctgtgggccaacaagcccgacaagctgcagcaggccaaggacgagatcctggagtgggagagcagagtgacccagtacgagagagacttcgagagaatcagcaccgtggtgagaaaggaggtgatcagattcgagaaggagaagagcaaggacttcaagaaccacgtgatcaagtacctggagaccctgctgtacagccagcagcagctggccaagtactgggaggccttcctgcccgaggccaaggccatcagctag

SEQ ID NO: 242538 - DNA, 1374 bp, Artificial Sequence
  derived and/or modified sequence
atggcaagcggcgggggcggctgcagcgcaagcgagcgacttccaccgcccttccctggcctggaaccggagtctgagggcgccgctggcggaagtgagccagaggccggggacagtgatacagagggcgaggatattttcaccggcgcggcagtggtaagcaaacaccagtcaccaaaaataaccaccagcctgctaccaattaataacggctctaaagaaaacggaatacatgaggagcaggaccaggaaccgcaggacctgtttgctggtgatggtatgaacgcctacgttgcttataaggtgaccacacaaacttcccttccgctgtttcgcagcaagcagtttgcagtaaagaggcggttttcggatttcctcggcctgtacgagaagctcagtgagaagcacagtcagaatggatttatcgtgcccccaccacctgaaaagagtcttatagggatgaccaaggtgaaagtgggaaaagaggatagcagcagcgccgagttcttagaaaaaagaagggcagccctagagcgctacctccagcggatagtaaatcacccaaccatgctgcaggaccctgatgtgcgggaattcttagagaaggaagagctcccacgagcagtcggcacccagaccctgagcggtgccggcctgttaaagatgttcaacaaggctactgacgctgtaagtaagatgacaattaagatgaacgagtcggatatatggttcgaagaaaaactccaggaggtcgagtgcgaggagcaaagactaaggaagctgcacgcagtggtggagaccctggtgaaccaccgcaaagagctcgctctaaacaccgcccagtttgctaaatccctggccatgttaggcagcagtgaggataacactgccctgtccagagcgcttagtcagttagccgaagttgaagagaaaattgaacagttgcaccaagaacaggctaataacgacttttttctgcttgctgagctgctctccgactatatcaggctgctggctattgtgcgtgccgcattcgaccaacgcatgaagacttggcagcgctggcaagatgcgcaggctactctgcaaaaaaagcgagaggccgaggctcgactgctatgggccaataaacctgataagctacagcaggccaaagatgagattctggagtgggaatctagggttacccagtacgaaagagattttgaacggatctccaccgtggtcagaaaggaggtgatccgctttgaaaaggaaaaatctaaagacttcaagaaccatgtaatcaaatatttagagaccttgctctattctcagcagcagcttgcaaaatactgggaagcttttctgcccgaagccaaagcaatctcctag

SEQ ID NO: 242539 - DNA, 1374 bp, Artificial Sequence
  derived and/or modified sequence
atggcatccgggggcgggggctgttccgccagtgagagactcccaccgccattccccggtttggaaccagagtctgaaggcgctgctgggggctccgagccagaggccggagattccgacaccgaaggcgaagacatttttactggagccgcagtggtgtctaagcaccaaagtccaaagatcaccacaagcctgttgcccatcaacaacggttcaaaggaaaacggaatacacgaggagcaggaccaggagccccaagacctgttcgccggagatggcatgaatgcttacgtcgcttacaaagtcactacacagaccagtctgccactatttagaagcaaacaatttgcagtgaagagaagattttccgatttcctgggtctctatgagaagctctctgagaagcactcacagaatgggtttattgtgccgccacctcctgagaaaagtctgataggaatgaccaaggtgaaagtgggcaaagaggacagctcgtccgcagaatttttggaaaaacggcgggccgccctagaacgatatctccagcggattgtgaatcatcccacgatgttgcaggacccagacgtgcgcgagttcctggagaaggaggagctgcctcgcgcagtgggcacacaaactctgtccggcgccggcttgctcaagatgttcaataaagctactgatgcagtgtcgaagatgacgatcaaaatgaatgaatcagacatctggttcgaggagaagcttcaggaggtcgaatgcgaggagcagcgccttcgaaaactccacgcagtggtggaaactctggtgaatcacaggaaagaattggcattaaacaccgcacagtttgcaaagtccctggcaatgcttggcagttccgaagacaataccgcactgtctagggcactgtctcagttggccgaggttgaggaaaaaatagaacagctccaccaggagcaggctaacaacgactttttcttattggcggagctactatctgactacattcgtctgcttgctatcgtgcgcgctgcctttgatcagcgcatgaagacatggcagcgatggcaagatgcgcaagctaccttgcagaagaagcgagaagctgaagcacgtctgctgtgggccaataaacctgataagctccagcaggcaaaagatgagattttggaatgggaatcaagggtcacacaatacgagagggatttcgaacggatctctaccgtggtccgcaaggaagtgattcgctttgaaaaagagaaatcaaaagattttaagaaccacgtgattaagtacctagaaacactgttgtattcccagcagcagctggcaaaatactgggaagcattcctgcccgaagcaaaagccatctcctag

SEQ ID NO: 242540 - DNA, 1374 bp, Artificial Sequence
  derived and/or modified sequence
atggccagcggcggcggcggctgcagcgccagcgagcggctgcccccacccttccctggcctggagcctgagagcgagggcgctgctgggggcagcgagcctgaggccggggacagcgacacagaaggagaggacatcttcaccggggctgctgtggtgtccaagcaccagagccccaagatcaccaccagcctgctgcccatcaacaacggcagcaaagaaaatggcatccacgaggagcaggaccaggagccccaggacctgtttgctggagatggcatgaatgcctacgtggcctacaaggtgaccacccagaccagcctgcccctcttccgcagcaagcagtttgctgtgaagaggcgcttcagtgacttcctgggcctgtatgagaagctgtctgagaagcacagccagaatggcttcatcgtgcccccacctcctgagaagagcctcatcggcatgaccaaggtgaaggtgggcaaggaggacagcagcagcgctgagttcctggagaagagaagagctgccctggagcgctacctgcagagaattgtgaaccaccccaccatgctgcaggaccctgatgtgcgggagttcctggagaaggaggagctgcccagggctgtgggcacccagaccctgtctggagctggcctgctgaagatgttcaacaaggccacagatgctgtgtccaagatgaccatcaagatgaatgaaagtgacatctggtttgaggagaagctgcaggaggtggagtgtgaggagcagaggctgaggaagctgcatgctgtggtggagaccctggtgaaccacaggaaggagctggccctgaacacagcccagtttgccaagagcctggccatgctgggcagcagcgaggacaacacagccctgagccgggccctgagccagctggccgaggtggaggagaagattgagcagctgcaccaggagcaggccaacaatgacttcttcctgctggccgagctgctgagtgactacatccggctgctggccatcgtgcgggccgcctttgaccagaggatgaagacctggcagcgctggcaggatgcccaggccaccctgcagaagaagcgggaggccgaggcccggctgctgtgggccaacaagccagacaagctgcagcaggccaaggatgagatcctggagtgggagagccgggtgacccagtatgaaagagactttgagcgcatcagcacagtggtgaggaaggaggtgatccgctttgagaaggagaagagcaaggacttcaagaaccacgtgatcaagtacctggagaccctgctgtacagccagcagcagctggccaagtactgggaggccttcctgcctgaggccaaggccatctcctag

SEQ ID NO: 242541 - DNA, 1374 bp, Artificial Sequence
  derived and/or modified sequence
atggccagcggcggcggcggctgcagcgccagcgagcggctgccccctccattccctggtctggaaccagagtcagagggcgctgctggtggctccgagccagaggccggagacagcgataccgagggggaggatattttcaccggggctgcggtggtatccaagcaccagtcgcccaagattaccacttcactgttgcccattaacaacggctctaaagagaacggcattcacgaggagcaggatcaagaacctcaagatctgttcgcgggtgatgggatgaacgcttatgtggcttataaggtaaccactcagacctcactgccactgtttcgcagcaagcagtttgcggtgaaaagaaggttctctgatttcctgggactgtacgagaaactgagtgagaagcattcgcagaatgggtttatcgtgccaccaccccctgagaaatctctgatagggatgacaaaagtcaaagtcggcaaggaagacagcagtagcgccgagttcctcgagaagagacgggccgccctcgaacgctacctgcagaggatcgtaaaccaccccacaatgctgcaagatccagatgtgagagagttcttagagaaagaagagctccctcgcgcagtagggactcagactctctcaggggcaggactgcttaagatgttcaacaaagccacagatgcggtctcaaagatgacgatcaagatgaacgaatcggatatatggttcgaagaaaagctgcaagaggttgagtgcgaggagcagagacttcgtaagctacatgccgtggtggaaacactggtcaatcacaggaaggagctggccctgaacaccgcacaatttgcaaaatccctggcgatgctggggtcctccgaggataataccgcactatctcgagccttgagccagcttgctgaggtggaggaaaaaattgagcaactgcaccaggagcaggccaataatgacttctttcttctggctgagctgttaagcgactatatcaggttgctcgccatcgtcagggccgctttcgatcagcgaatgaaaacatggcaacgatggcaggacgcccaggctaccctgcagaagaaacgagaagctgaggcccgactcctgtgggctaacaaacccgataaactgcagcaggcaaaagacgagatcctggagtgggagagccgagtcacacagtacgagagggacttcgagcggattagcacggttgttcggaaagaggtcatcaggtttgagaaagaaaaaagcaaggatttcaagaatcacgtcatcaagtaccttgagaccctgctctactcacagcagcagctggcaaaatactgggaggcgttcctcccggaggcaaaagcaatctcctag

SEQ ID NO: 242542 - DNA, 1374 bp, Artificial Sequence
  derived and/or modified sequence
atggccagcggcggcggcggctgcagcgccagcgagcggctgccccccccttttcccggactggaaccagaatccgagggggctgccggcggctcagaaccggaggccggagactccgacacagaaggcgaggatatctttaccggtgccgccgtggttagcaagcaccagtctcctaagatcacgacctcacttctgcctataaataatggcagtaaggaaaacgggatacatgaagagcaagatcaggaaccccaggacctgttcgcaggggacggtatgaatgcctatgttgcctataaagttacaacacagacctccctgccactgttcagatctaaacagttcgccgtgaagcggcgtttttctgacttcctggggttatacgagaagttatccgaaaagcacagccagaatgggtttatagtgccccctcctccggaaaaatccctcataggcatgacaaaggtgaaagtcggaaaggaggattcctctagcgccgagtttctggaaaagaggagggccgcattggagcggtacctgcagcgtatcgtgaaccatcctaccatgctccaggaccccgacgtgagagagttcctggagaaagaagagttgccccgcgctgtaggtacacagaccctgagcggagccggcctgctgaaaatgttcaacaaagccactgacgcggtgagtaaaatgactattaaaatgaatgagtccgacatatggttcgaggaaaagctccaagaggtagaatgcgaagagcagcgcctcagaaagctgcacgctgtggtcgagaccctcgtgaatcaccgaaaggaactggcactgaacacagcccagtttgctaagagcttggctatgttgggaagctcggaggacaataccgccctgagtcgggcccttagtcagctcgccgaagtcgaggaaaagattgagcagctgcatcaggaacaagccaataacgatttctttctactggctgagctgctgtccgattacatcaggctgctggccattgttagggctgcgtttgaccaaagaatgaagacctggcagaggtggcaagacgcgcaagcgactctgcagaaaaaacgggaggccgaggcccggctcttatgggccaataaacccgataagctacagcaggcaaaagacgaaattttggagtgggagagtagggtgactcagtatgagcgcgattttgagcggataagcaccgtagtgaggaaggaagtcatccgatttgaaaaagagaaaagtaaggattttaagaaccacgtcataaagtacttggagacactactatattctcagcagcagctggcaaaatactgggaagccttcctcccagaagctaaagccatttcttag

SEQ ID NO: 242543 - DNA, 1374 bp, Artificial Sequence
  derived and/or modified sequence
atggctagtggcggtggaggttgctccgcctcagagcggctgccccctccatttccaggtttagaaccagaaagcgaaggagctgcaggcggaagtgaaccggaagccggagattcggatacagagggggaggatatttttacaggagccgcagtggtgagtaagcatcagtcacccaaaataaccacgtccctactgcccattaacaatgggagtaaagagaatggcattcacgaggaacaggaccaggagccacaggacctgtttgctggggacgggatgaacgcgtacgtagcctacaaagtaacgacccagacttccctgccactgttccggtcaaaacaatttgccgttaaacggcgattcagtgatttcctgggcctgtacgagaaacttagtgagaagcatagccagaacggatttatagttcctcctccacctgaaaaaagtttgattgggatgaccaaggtcaaggttggaaaggaggattcttccagcgccgagtttctcgagaagcgtcgagccgctctggaaagatacttacaacgaattgtcaatcaccccacgatgctgcaggatccggatgtgagagagttcctagagaaggaggagctgcccagagccgtgggcacccagaccctgagtggcgcaggcttgctgaagatgtttaataaagccacggacgccgtgtccaagatgacaattaagatgaatgagagcgacatttggttcgaagaaaagctccaggaagtggagtgcgaggagcaaagactccgcaagcttcacgctgtagtggagactctggtgaaccatcgcaaagaactggccttgaatactgcgcagtttgccaaatcattggccatgttgggtagcagcgaagacaatactgccctgagcagagcactgagtcagcttgctgaggtggaggaaaagattgaacagctgcaccaggagcaggcaaacaacgacttctttctcctagctgagctcctctcagactatattagacttttggccattgtgagggctgccttcgaccagcggatgaagacctggcagcgatggcaggacgctcaagccacactgcagaagaagagagaagcggaagcccgacttctctgggctaacaagcctgacaagctgcagcaggcaaaggacgagattctcgaatgggagtcaagagtgactcagtacgagcgggattttgaaagaatctctacggtggttagaaaggaagtgatccggttcgaaaaagagaagtctaaggattttaagaaccacgtcatcaaatacctcgagaccctcctctacagccagcagcaactggctaagtattgggaagcctttctgcctgaggcaaaggccatctcctag

SEQ ID NO: 242544 - DNA, 1374 bp, Artificial Sequence
  derived and/or modified sequence
atggcctccgggggagggggatgtagcgccagcgagcgtctacccccaccctttccaggacttgaacctgaatctgagggcgctgccggagggtccgagccagaggccggtgatagcgatacagaaggcgaggacatcttcacaggtgccgctgtggtgagtaagcatcagagccccaagatcactacgagccttctgcctatcaacaatggcagcaaggagaacgggatccacgaagagcaagatcaagagcctcaagatctctttgcgggagatggcatgaatgcctatgtggcttacaaggtaactacacagacttccttgccgttatttaggtccaaacagttcgctgtcaagcggaggttcagcgatttcttgggactgtatgagaagctgtctgaaaaacactcccaaaacggctttatcgtgccacccccaccagaaaagagcctgatcggcatgactaaggtaaaagtgggcaaggaggactcatcctctgcagagttcctcgaaaagcgacgcgcagccctggagcggtatctgcagcgcattgtaaatcaccctacaatgctgcaggaccctgatgtccgcgagtttcttgaaaaagaggagttaccaagggcggttggtacccagactctgtctggcgctgggctcctcaaaatgttcaacaaagcaactgatgccgtgtccaagatgaccattaagatgaatgagtctgacatctggttcgaggaaaagttgcaggaagtagagtgtgaggagcaacgccttcgaaagctgcacgcagtggttgagaccttagtgaaccatcgcaaagaactggctctgaatacagctcagttcgcaaagtctttagccatgcttggttccagtgaagataataccgcactctccagggccctgtcacagctcgccgaggtggaggaaaagattgagcagctgcaccaggagcaagccaataacgattttttccttttagcagagttgctttccgactacatcaggttgctggctatcgtgcgcgcagccttcgaccagcgcatgaaaacgtggcagaggtggcaggacgcccaggctacccttcaaaaaaaaagagaggcagaagctaggctgttgtgggctaataaaccagacaaactgcagcaagccaaagacgagatcctggagtgggagtccagggtaacccagtacgaacgcgattttgaaaggatttcaactgtcgtgcgtaaggaagtgatcagatttgagaaggagaagagtaaggattttaaaaaccacgtcattaagtatcttgaaacgttgctatatagccaacagcagttggcaaaatactgggaggcgttcctgccagaagccaaagcaatatcatag

SEQ ID NO: 242545 - DNA, 1374 bp, Artificial Sequence
  derived and/or modified sequence
atggcgtcgggtggtggtggctgtagcgcttcggagagactgcctccgcccttccccggcctggagccggagtccgagggggcggccgggggatcagaacccgaggctggggacagcgacaccgagggggaggacattttcaccggcgccgcggtggtcagtaaacatcagtctccaaagataactacatcccttcttcccatcaacaatggctccaaagaaaatgggatccatgaagaacaagaccaagagccacaggatctctttgcaggggatggtatgaatgcatatgtagcctacaaagttacaacacagacaagcttaccattgttcagaagcaaacagtttgcagtaaaaagaagatttagtgactttctgggtctttatgagaagctttccgagaagcactctcagaatggcttcattgtccctccgcccccggagaagagcctcatagggatgacaaaagtgaaagttgggaaggaagattcttcttctgcagaatttcttgaaaaacggagggccgctttagaaaggtaccttcagaggattgtaaatcatcctaccatgttacaggaccctgacgtcagagagttcttggaaaaagaagagctgccacgtgccgtgggtacccagacattgagtggtgctggtctcctcaagatgttcaacaaagccacagatgccgtcagcaaaatgaccatcaagatgaatgaatcagacatttggtttgaggagaagctccaggaggtagagtgtgaggagcagcgcttacggaaactgcatgctgttgtagaaactctagtcaaccataggaaagagctagcgctgaacacagcccagtttgcaaagagtctagccatgcttgggagctctgaggacaacacggcattgtcacgggcactctcccagctggctgaggtggaagaaaaaattgagcagctccaccaggaacaggccaacaatgacttcttcctccttgctgagctcctgagtgactacattcgcctcctggccatagtccgcgctgccttcgaccagcgcatgaagacatggcagcgctggcaggatgcccaagccacactgcagaagaagcgggaggccgaggctcggctgctgtgggccaacaagcctgataagctgcagcaggccaaggacgagatcctcgagtgggagtctcgggtgactcaatatgaaagggacttcgagaggatttcaacagtggtccgaaaagaagtgatacggtttgagaaagagaaatccaaggacttcaagaaccacgtgatcaagtaccttgagacactcctttactcacagcagcagctggcaaagtactgggaagccttccttcctgaggcaaaggccatctcctaa

SEQ ID NO: 242546 - protein, 466 aa, Artificial Sequence
  derived and/or modified sequence
MGLYAAAAGVLAGVESRQGSIKGLVYSSNFQNVKQLYALVCETQRYSAVLDAVIASAGLLRAEKKLRPHLAKVLVYELLLGKGFRGGGGRWKALLGRHQARLKAELARLKVHRGVSRNEDLLEVGSRPGPASQLPRFVRVNTLKTCSDDVVDYFKRQGFSYQGRASSLDDLRALKGKHFLLDPLMPELLVFPAQTDLHEHPLYRAGHLILQDRASCLPAMLLDPPPGSHVIDACAAPGNKTSHLAALLKNQGKIFAFDLDAKRLASMATLLARAGVSCCELAEEDFLAVSPSDPRYHEVHYILLDPSCSGSGMPSRQLEEPGAGTPSPVRLHALAGFQQRALCHALTFPSLQRLVYSTCSLCQEENEDVVRDALQQNPGAFRLAPALPAWPHRGLSTFPGAEHCLRASPETTLSSGFFVAVIERVEVPSSASQAKASAPERTPSPAPKRKKRQQRAAAGACTPPCT

SEQ ID NO: 242547 - DNA, 1401 bp, Artificial Sequence
  derived and/or modified sequence
atgggcctgtacgccgccgccgccggcgtgctggccggcgtggagagcagacagggcagcatcaagggcctggtgtacagcagcaacttccagaacgtgaagcagctgtacgccctggtgtgcgagacccagagatacagcgccgtgctggacgccgtgatcgccagcgccggcctgctgagagccgagaagaagctgagaccccacctggccaaggtgctggtgtacgagctgctgctgggcaagggcttcagaggcggcggcggcagatggaaggccctgctgggcagacaccaggccagactgaaggccgagctggccagactgaaggtgcacagaggcgtgagcagaaacgaggacctgctggaggtgggcagcagacccggccccgccagccagctgcccagattcgtgagagtgaacaccctgaagacctgcagcgacgacgtggtggactacttcaagagacagggcttcagctaccagggcagagccagcagcctggacgacctgagagccctgaagggcaagcacttcctgctggaccccctgatgcccgagctgctggtgttccccgcccagaccgacctgcacgagcaccccctgtacagagccggccacctgatcctgcaggacagagccagctgcctgcccgccatgctgctggaccccccccccggcagccacgtgatcgacgcctgcgccgcccccggcaacaagaccagccacctggccgccctgctgaagaaccagggcaagatcttcgccttcgacctggacgccaagagactggccagcatggccaccctgctggccagagccggcgtgagctgctgcgagctggccgaggaggacttcctggccgtgagccccagcgaccccagataccacgaggtgcactacatcctgctggaccccagctgcagcggcagcggcatgcccagcagacagctggaggagcccggcgccggcacccccagccccgtgagactgcacgccctggccggcttccagcagagagccctgtgccacgccctgaccttccccagcctgcagagactggtgtacagcacctgcagcctgtgccaggaggagaacgaggacgtggtgagagacgccctgcagcagaaccccggcgccttcagactggcccccgccctgcccgcctggccccacagaggcctgagcaccttccccggcgccgagcactgcctgagagccagccccgagaccaccctgagcagcggcttcttcgtggccgtgatcgagagagtggaggtgcccagcagcgccagccaggccaaggccagcgcccccgagagaacccccagccccgcccccaagagaaagaagagacagcagagagccgccgccggcgcctgcacccccccctgcacctag

SEQ ID NO: 242548 - DNA, 1401 bp, Artificial Sequence
  derived and/or modified sequence
atgggcctctacgctgctgccgcgggcgtgctcgcaggcgtggaatctagacaagggtccatcaagggcttagtttactcctccaattttcagaatgtgaagcagctgtatgctctcgtctgtgaaacccagcgatattcagctgtgctggacgccgtgatagccagcgccgggcttctgagagccgaaaagaaactgcgccctcatctcgcaaaggtcctggtctatgagctactgctggggaagggattcagaggagggggtggccgatggaaggcactgcttggtagacaccaggcaaggctgaaggcagagctggctcggcttaaagtgcacagaggtgtcagccgaaacgaggacttgctggaagtgggcagccggccaggccctgccagccagctgccgagatttgttagggtcaataccttgaaaacttgctccgatgacgtggtggactactttaaaagacaggggttcagttatcagggtagggcaagctcccttgatgatctgcgggctttgaaaggaaagcatttcttgctggaccctctgatgcctgaactcctagtattccctgcccagacagaccttcatgaacatcctttgtaccgcgccgggcacctgattctgcaagatcgcgctagttgtctacccgccatgcttcttgacccacctcccggatcccatgtgatcgacgcttgcgccgcccccggaaataaaacttcccacctggccgcactgctcaagaaccaaggaaagatttttgccttcgatctagatgccaaaagactggcatccatggcaaccctgctggctcgcgccggcgtaagctgttgcgaactagccgaggaggactttctagcagtgtccccttccgaccccaggtatcacgaggttcactacatccttcttgaccccagttgttcaggatctggcatgccttcaaggcaattagaggaacccggtgccggaactccttcacccgtcagattgcatgccctcgcggggttccagcagcgagctctgtgtcacgccctcacctttcccagtcttcaacgcctggtgtacagcacttgcagcttatgtcaagaggaaaacgaagatgtagtgcgtgatgcgctgcagcagaatcccggagctttcagactggctccggctctccctgcttggccacacaggggcctcagtacgtttcccggagcagagcactgtctccgcgccagccccgagaccacattgagcagtggatttttcgtggccgttatcgagcgtgtggaggtgcccagctctgcttcccaggcaaaggccagtgccccagagcgcacaccctctccagcgcccaagcgaaagaaacgacagcagcgagccgcagccggggcttgcacaccaccatgcacctag

SEQ ID NO: 242549 - DNA, 1401 bp, Artificial Sequence
  derived and/or modified sequence
atgggcctgtatgctgctgctgctggggtgctggccggcgtggagagccggcagggcagcatcaagggcctggtgtacagcagcaacttccagaatgtgaagcagctgtatgccctggtgtgtgagacccagcgctacagcgctgtgctggatgctgtgattgccagcgctggcctgctgcgggcagagaagaagctgcggccccacctggccaaggtgctggtgtatgagctgctgctgggcaagggcttccggggcggcggcggccgctggaaggccctgctgggccgccaccaggcccggctgaaggccgagctggcccggctgaaggtgcaccggggcgtgtccagaaatgaagacctgctggaggtgggcagccggcccggccctgccagccagctgcccaggtttgtgcgggtgaacaccctgaagacctgcagtgatgatgtggtggactacttcaagaggcagggcttctcctaccagggccgggccagcagcctggatgacctgcgggccctgaagggcaagcacttcctgctggaccccctgatgcctgagctgctggtgtttcctgcccagacagacctgcacgagcaccccctgtacagagctggccacctgatcctgcaggaccgggccagctgcctgcctgccatgctgctggaccccccacctggcagccacgtgattgatgcctgtgccgcccctggcaacaagaccagccacctggccgccctgctgaagaaccagggcaagatctttgcctttgacctggatgccaagaggctggcctccatggccaccctgctggcccgggccggcgtgtcctgctgtgagctggccgaggaggacttcctggccgtgagccccagcgacccccgctaccacgaggtgcactacatcctgctggaccccagctgcagcggcagcggcatgcccagccggcagctggaggagcctggagctggcacccccagccctgtgcggctgcacgccctggccggcttccagcagagggccctgtgccacgccctgaccttccccagcctgcagaggctggtgtacagcacctgcagcctgtgccaggaggagaatgaagatgtggtgagagatgccctgcagcagaaccctggggccttccggctggccccagccctgcctgcctggccccaccggggcctgagcaccttccctggagctgagcactgcctgcgggccagccctgagaccaccctgagcagcggcttctttgtggccgtcatcgagcgggtggaggtgcccagcagcgccagccaggccaaggccagcgcccctgagaggacccccagccctgcccccaagaggaagaagaggcagcagagagctgctgctggggcctgcaccccaccctgcacctag

SEQ ID NO: 242550 - DNA, 1401 bp, Artificial Sequence
  derived and/or modified sequence
atgggcctgtacgccgccgccgccggcgtgctggccggcgtggagtccaggcagggatccataaagggactggtgtactcaagcaattttcagaatgtgaagcagttgtacgctctggtttgcgaaacccaacgctactctgctgtcttggatgctgtcatagccagcgccgggttactgcgagccgagaaaaagcttcgcccccatctggcaaaggtgctggtgtacgagctgctgctggggaaggggtttcgcggcggagggggcagatggaaagcactattggggaggcatcaggctaggcttaaagctgaattggctcgcttaaaagtgcacaggggagtgtcacggaatgaggatttgttggaagtcgggtctcggccaggccccgcttcccaactcccacgtttcgtgcgcgtgaacactttaaaaacttgcagtgacgacgtcgtggattactttaagagacaaggcttcagctatcaggggagagcctcaagtttagatgatctgagagccctgaaaggcaaacatttcctgttggacccccttatgcccgagctgctggtgttcccagcgcagacagacctgcacgagcatccgttgtaccgagccgggcacctcattctgcaagaccgtgcaagttgtcttcctgctatgctgttggacccgccacccggctcacatgtcattgatgcatgtgctgccccaggcaacaagacctcccatctggctgccctcctgaagaaccaaggaaaaatttttgcttttgatctggatgccaaacgactcgcaagcatggccaccctgctggcacgagcaggggtgtcctgttgcgaactggcagaagaggattttctggctgtgtccccctcggacccgcggtaccacgaagtgcattatatcttacttgatcctagctgttcgggttcagggatgcccagcaggcaacttgaggagcctggggccgggaccccctcacctgtgcgactccatgccctcgcaggtttccaacagagagccctgtgccacgccttaaccttccctagtctgcaacgcctggtatattccacgtgctcactgtgtcaagaagagaacgaggatgtggtccgtgacgcacttcaacagaaccctggagcattcagactggcccccgctttacccgcttggccccacagagggctgagcacgtttcctggggctgaacattgcctccgcgcctctcccgagactaccctgtccagcgggtttttcgttgcagtgatagaacgggtggaggttccaagcagtgctagccaggccaaggccagcgcccctgaacggacaccaagcccagctcctaaacgcaagaaacggcagcagcgcgctgccgctggcgcttgcaccccaccatgtacctag

SEQ ID NO: 242551 - DNA, 1663 bp, Artificial Sequence
  derived and/or modified sequence
gctttttgaccccggaagtccgggcgggcgccgagccgggtgcgttttgccacagagccgtaaaggcgcgcgggaacatggggctgtatgctgcagctgcaggcgtgttggccggcgtggagagccgccagggctctatcaaggggttggtgtactccagcaacttccagaacgtgaagcagctgtacgcgctggtgtgcgaaacgcagcgctactccgccgtgctggatgctgtgatcgccagcgccggcctcctccgtgcggagaagaagctgcggccgcacctggccaaggtgctagtgtatgagttgttgttgggaaagggctttcgagggggtgggggccgatggaaggctctgttgggccggcaccaggcgaggctcaaggctgagttggctcggctcaaggttcatcggggtgtgagccggaatgaggacctgttggaagtgggatccaggcctggtccagcctcccagctgcctcgatttgtgcgtgtgaacactctcaagacctgctccgatgatgtagttgattatttcaagagacaaggtttctcctatcagggtcgggcttccagcctcgatgacttacgagccctcaaggggaagcattttctcctggaccccttgatgccggagctgctggtgtttcccgcccagacagatctgcatgaacacccactgtaccgggccggacacctcattctgcaggacagggccagctgtctcccagccatgctgctggaccccccgccaggctcccatgtcatcgatgcctgtgccgccccaggcaataagaccagtcacttggctgctcttctgaagaaccaagggaagatctttgcctttgacctggatgccaagcggctggcatccatggccacgctgctggcccgggctggcgtctcttgctgtgaactggctgaggaggacttcctggcggtctccccctcggatccacgctaccatgaggtccactacatcctgctggatccttcctgcagtggctcgggtatgccgagcagacagctggaggagcccggggcaggcacacctagcccggtgcgtctgcatgccctggcagggttccagcagcgagccctgtgccacgcgctcactttcccttccctgcagcggctcgtctactccacgtgctccctctgccaggaggagaatgaagacgtggtgcgagatgcgctgcagcagaacccgggcgccttcaggctagctcccgccctgcctgcctggccccaccgaggcctgagcacgttcccgggtgccgagcactgcctccgggcctcccctgagaccacactcagcagtggcttcttcgttgctgtaattgaacgggtcgaggtgccaagctcagcctcacaggccaaagcatcagcaccagaacgcacacccagcccagccccaaagagaaagaagagacagcaaagagccgcagccggtgcttgcacaccgccttgcacatagcagaggctccgggctgactccttcctggtgggaaaggaagatgcctgtcctctccgtggaggaccctgggccctcaccgcaggaagcagtttgggttttgaaaggttattgggtcccttccttgggctgtgttcttgctggtgagcaaagtgttgcctgcaaaaataaaatgcagaacgtactct

SEQ ID NO: 242552 - DNA, 1401 bp, Artificial Sequence
  derived and/or modified sequence
atggggctctacgcagccgctgcgggagtgctggccggagtggagtcgagacagggatctattaaaggactagtgtatagctctaatttccagaacgtgaagcagttgtacgccctggtgtgcgagactcagagatattccgccgtgcttgacgccgtgatcgcaagcgccggtctgctgcgcgcagagaaaaaacttcggccacacctcgccaaggtgttggtgtacgagctgctattgggcaagggctttaggggcggtggcggaagatggaaggctctattgggcagacaccaggcccgtctaaaggcggagctagctcgactcaaggtgcaccgcggtgtaagccgcaatgaggacttgcttgaggtcgggagccgtccaggacccgcttcacaactgccaaggttcgtgagggtcaacactcttaagacctgttcagatgacgttgtcgattatttcaagcgccagggctttagttaccaaggtcgcgcatcctcgctggacgatctgcgcgcactgaaaggaaagcatttcctgctggatccgcttatgccagaactgcttgtgtttcctgcacaaacagatcttcatgagcatcctctgtatagggccggacacctgatcctccaggacagagcttcttgcttacctgccatgctgctcgaccctcctccgggaagccatgtgatcgacgcgtgtgctgcccctggaaacaaaaccagccatctggccgctcttctaaaaaatcagggcaagatttttgcctttgacttagatgcaaaacggcttgccagcatggccactctactggcacgggcaggagtctcatgttgtgaattggccgaggaggacttccttgccgtgtcgcccagcgatcccagataccacgaggtgcattatatactgctggacccatcctgcagcggatcgggcatgccttctcggcagctggaagagcctggagcagggacgcccagcccagtcaggctgcacgctctcgccggattccagcaacgggctctctgccacgcactcactttcccctcactccagcgacttgtatattctacatgctctctgtgccaggaggaaaatgaggatgtcgttagggatgctctccagcagaaccccggtgcctttcggctcgcacctgcccttccggcttggccacaccggggtctctcaacattcccaggagccgaacattgcttaagagccagtccagagactactctctccagcggattctttgttgccgtgatagaaagagtcgaggtcccatcctctgcctcacaggccaaagcatcagcacccgagcgaacgccatcacctgcacccaaacggaagaagaggcaacagcgagcagctgccggtgcatgcacgcccccttgcacatag

SEQ ID NO: 242553 - protein, 417 aa, Artificial Sequence
  derived and/or modified sequence
MALKVLLEQEKTFFTLLVLLGYLSCKVTCESGDCRQQEFRDRSGNCVPCNQCGPGMELSKECGFGYGEDAQCVTCRLHRFKEDWGFQKCKPCLDCAVVNRFQKANCSATSDAICGDCLPGFYRKTKLVGFQDMECVPCGDPPPPYEPHCASKVNLVKIASTASSPRDTALAAVICSALATVLLALLILCVIYCKRQFMEKKPSWSLRSQDIQYNGSELSCFDRPQLHEYAHRACCQCRRDSVQTCGPVRLLPSMCCEEACSPNPATLGCGVHSAASLQARNAGPAGEMVPTFFGSLTQSICGEFSDAWPLMQNPMGGDNISFCDSYPELTGEDIHSLNPELESSTSLDSNSSQDLVGGAVPVQSHSENFTAATDLSRYNNTLVESASTQDALTMRSQLDQESGAVIHPATQTSLQEA

SEQ ID NO: 242554 - DNA, 1254 bp, Artificial Sequence
  derived and/or modified sequence
atggccctgaaggtgctgctggagcaggagaagaccttcttcaccctgctggtgctgctgggctacctgagctgcaaggtgacctgcgagagcggcgactgcagacagcaggagttcagagacagaagcggcaactgcgtgccctgcaaccagtgcggccccggcatggagctgagcaaggagtgcggcttcggctacggcgaggacgcccagtgcgtgacctgcagactgcacagattcaaggaggactggggcttccagaagtgcaagccctgcctggactgcgccgtggtgaacagattccagaaggccaactgcagcgccaccagcgacgccatctgcggcgactgcctgcccggcttctacagaaagaccaagctggtgggcttccaggacatggagtgcgtgccctgcggcgaccccccccccccctacgagccccactgcgccagcaaggtgaacctggtgaagatcgccagcaccgccagcagccccagagacaccgccctggccgccgtgatctgcagcgccctggccaccgtgctgctggccctgctgatcctgtgcgtgatctactgcaagagacagttcatggagaagaagcccagctggagcctgagaagccaggacatccagtacaacggcagcgagctgagctgcttcgacagaccccagctgcacgagtacgcccacagagcctgctgccagtgcagaagagacagcgtgcagacctgcggccccgtgagactgctgcccagcatgtgctgcgaggaggcctgcagccccaaccccgccaccctgggctgcggcgtgcacagcgccgccagcctgcaggccagaaacgccggccccgccggcgagatggtgcccaccttcttcggcagcctgacccagagcatctgcggcgagttcagcgacgcctggcccctgatgcagaaccccatgggcggcgacaacatcagcttctgcgacagctaccccgagctgaccggcgaggacatccacagcctgaaccccgagctggagagcagcaccagcctggacagcaacagcagccaggacctggtgggcggcgccgtgcccgtgcagagccacagcgagaacttcaccgccgccaccgacctgagcagatacaacaacaccctggtggagagcgccagcacccaggacgccctgaccatgagaagccagctggaccaggagagcggcgccgtgatccaccccgccacccagaccagcctgcaggaggcctag

SEQ ID NO: 242555 - DNA, 1254 bp, Artificial Sequence
  derived and/or modified sequence
atggccctcaaagtgctgctcgaacaggaaaagaccttctttactttacttgtgttgctaggatacctgtcctgtaaagtaacatgtgaatctggcgattgccggcagcaggaatttagggaccgcagtggcaattgtgttccctgcaaccagtgcggcccaggcatggagctgagtaaagaatgtggcttcggctacggcgaggacgctcagtgcgtcacctgcagactgcatagattcaaagaggattggggctttcaaaagtgtaaaccctgccttgattgcgccgtcgtaaacaggtttcagaaggcaaattgtagcgctacaagcgacgcgatttgcggggactgtttgcccggattttacagaaagacgaaattagttgggtttcaagacatggaatgtgtgccttgtggggaccctcctccaccatacgaacctcattgcgcaagcaaggttaaccttgtcaagattgcatcaactgcctctagcccgagagatacggcactggccgcggtcatttgttctgcccttgctacagtcctgttagccctcctgattctctgcgtcatttactgcaagcgccagtttatggagaagaagcctagttggtccctgcggtcccaggatatccagtataatggcagtgagctgtcctgcttcgatcgcccacagctgcacgagtacgcgcatcgcgcctgttgccagtgtcgtagggattctgtgcagacgtgtggtccggtgcggttactgccctctatgtgttgcgaggaagcctgttcccctaaccctgccacgctggggtgcggggtccacagtgccgcctcactccaggccagaaatgccggacccgccggcgagatggttcccacgtttttcggctctctgacacagtctatttgcggggagtttagtgacgcatggcctctgatgcagaaccccatggggggggataatattagcttttgcgactcttacccggaacttacaggcgaagacatccactctctgaacccagagctagagagctcgacctcactcgactctaacagctctcaagacttggtaggaggcgctgtgccagtgcagtcccatagtgagaatttcactgccgccacagacctatcaagatataataatacattagtcgagagcgccagcacccaggatgcgttaacaatgagatcccagctcgaccaagagtccggcgccgtgatccaccccgctacgcagacaagtctccaagaagcatag

SEQ ID NO: 242556 - DNA, 1254 bp, Artificial Sequence
  derived and/or modified sequence
atggccttaaaggtgcttctggagcaggagaagaccttctttacactgttggttctcctgggctatctttcctgcaaagtgacgtgtgagtccggagattgtcggcagcaggaattcagggaccgaagcggcaattgtgtcccgtgtaaccagtgtggccctggcatggagctgagtaaagagtgtggctttggatatggggaggacgcacaatgcgtcacatgtaggctacatcggttcaaggaagactggggtttccagaaatgcaaaccttgccttgattgcgcagtggtgaatcgcttccagaaggctaactgtagcgctactagtgacgccatctgcggcgactgcctaccaggcttttataggaagacgaagctggtaggctttcaggatatggagtgtgttccctgtggagatccccccccaccctatgaacctcattgcgccagcaaagtcaacttggttaagatcgcttctacggcttcttcccctcgtgacactgctctcgctgcggtgatatgctcagcactggctaccgtcctgctggcactattaatactgtgtgttatttattgtaagcgccagttcatggagaagaagccttcctggtcactgcgctcacaggatattcagtacaacggatctgagctttcttgttttgacagaccacaactgcatgaatacgctcaccgtgcttgttgccagtgccgaagggactccgtgcaaacatgcgggccagtcaggctcctgccttccatgtgctgtgaagaggcatgtagcccaaatccagctactctcggttgtggagtacatagcgccgctagcctccaggcccgcaacgctggcccagccggagaaatggtgcccaccttctttggttctctaacccagagtatctgtggagagttttctgacgcttggcccctgatgcaaaacccaatgggcggggacaatatcagcttttgtgacagttatccagagctgaccggcgaagatattcattctttaaatcctgaactggagtcatctacctcccttgactcaaatagtagccaggatctggtgggcggagctgtgccagtgcaatcccactctgagaactttaccgcagctaccgacttgtccaggtacaataacacactagtggagtccgcttctacccaggacgcgctgactatgcggtcgcagttggaccaggagagcggggctgtgatccacccggccacacagacaagtctgcaggaggcttag

SEQ ID NO: 242557 - DNA, 1254 bp, Artificial Sequence
  derived and/or modified sequence
atggccctgaaggtgctgctggagcaggagaagaccttcttcaccctgctggtgctgctgggctacctgagctgcaaggtgacctgtgagagcggggactgccggcagcaggagttccgggacagaagtggcaactgtgtgccctgcaaccagtgtggccctggcatggagctgagcaaagaatgtggcttcggctacggggaggatgcccagtgtgtgacctgccgcctgcaccgcttcaaggaggactggggcttccagaagtgcaagccctgcctggactgtgctgtggtgaaccgcttccagaaggccaactgcagcgccaccagtgatgccatctgtggggactgcctgcccggcttctacaggaagaccaagctggtgggcttccaggacatggagtgtgtgccctgtggggaccccccaccaccctatgagccccactgtgccagcaaggtgaacctggtgaagatcgccagcacagccagcagcccccgggacacagccctggccgccgtcatctgcagcgccctggccaccgtgctgctggccctgctgatcctgtgtgtgatctactgcaagaggcagttcatggagaagaagcccagctggagcctgcggagccaggacatccagtacaacggcagcgagctgagctgctttgaccggccccagctgcatgaatatgcccaccgggcctgctgccagtgccggcgggacagcgtgcagacctgtggccctgtgcggctgctgcccagcatgtgctgtgaggaggcctgcagccccaacccagccaccctgggctgcggcgtgcacagcgctgccagcctgcaggccagaaatgccggccctgctggggagatggtgcccaccttcttcggcagcctgacccagagcatctgtggggagttcagtgatgcctggcccctgatgcagaaccccatgggcggggacaacatctccttctgtgacagctacccagagctgaccggggaggacatccacagcctgaaccctgagctggagagcagcaccagcctggacagcaacagcagccaggacctggtgggcggcgctgtgcctgtgcagagccacagcgagaacttcaccgctgccacagacctgagccgctacaacaacaccctggtggagagcgccagcacccaggatgccctgaccatgaggagccagctggaccaggagagcggggccgtcatccacccagccacccagaccagcctgcaggaggcctag

SEQ ID NO: 242558 - DNA, 1254 bp, Artificial Sequence
  derived and/or modified sequence
atggccctgaaggtgctgctggagcaggagaagaccttcttcaccctactggtcctcctcggatatctctcctgcaaggttacgtgtgagagtggagattgtcgccagcaggagtttagagatcgtagcggcaattgtgtaccgtgtaatcagtgcggtccaggcatggagttgagtaaggagtgcggattcggctatggtgaagatgcccagtgcgttacgtgccgcctgcaccgctttaaggaagattggggattccagaagtgtaagccctgtctcgactgtgccgttgtgaaccgattccagaaggctaattgtagtgccacgagcgacgccatctgtggcgattgtttgcccggattctaccggaagaccaagttggtggggtttcaggatatggagtgtgtcccttgtggcgacccacctcctccctatgagccccactgcgcttcgaaagtgaacctcgtgaagatcgccagtactgccagttccccacgggatacggccttggccgcagtgatttgtagcgctctcgccaccgtgcttctcgccctccttattctgtgtgtgatttactgtaagagacagtttatggaaaagaagccctcatggagtctccgaagccaggacattcagtataatgggtccgagttgagttgctttgatcgcccacagcttcacgaatatgcacacagagcatgttgccagtgtcggcgcgattcagttcaaacttgtgggccagttcgcctccttccctcgatgtgttgcgaagaagcttgctcccctaatcccgcaacattaggctgcggggttcacagtgctgcaagtctccaggctcgaaatgcggggccagctggcgagatggtgcccactttttttggaagcctgacgcagagtatctgcggcgagtttagtgacgcttggccactgatgcagaaccccatgggcggcgacaatatctccttttgtgacagctatcccgaactgacaggggaagatatccatagcctgaacccagaactagaaagttccaccagtctcgacagcaacagcagccaggatctggtcggcggcgccgtacccgttcagagccacagcgagaactttaccgccgcaaccgacctttctcgttataacaacacactggttgaatcagcctcaacacaggatgctctgacaatgcggtcccagttggatcaggaaagcggggcggtgatccaccccgcaactcagacctccctgcaagaggcatag

SEQ ID NO: 242559 - DNA, 1254 bp, Artificial Sequence
  derived and/or modified sequence
atggccctgaaggtgctgctggagcaggagaagaccttcttcaccttgctggtgttactggggtatctgagctgcaaggtcacatgcgagtccggcgactgccggcaacaggagtttagagaccgcagtggcaactgcgtaccttgcaatcagtgcggcccaggcatggagttgtcaaaggagtgcggctttggctacggagaagatgcccagtgcgttacatgtagacttcaccggtttaaggaggactggggcttccaaaagtgtaagccctgtttggattgcgcagttgtaaaccgattccagaaggccaattgttcagccacaagtgatgccatctgcggggactgcctgcctggattttataggaaaaccaaactcgttggctttcaagatatggaatgtgtaccttgtggtgatcctcctccaccttatgaaccacattgcgcctctaaagtaaacctggtgaaaattgcttctactgccagctccccacgcgataccgcacttgccgccgtgatttgttcggcactggcaacggtgctgctggcactcctgatcttgtgtgtcatctactgtaagcggcagttcatggaaaaaaagccctcatggtctctacggtcccaggatattcaatacaacggctccgagctatcctgcttcgataggcctcagctccacgagtacgcacacagggcctgctgtcagtgccgtagggattctgtgcagacctgcggccccgtccgcctgttacctagtatgtgttgcgaagaggcatgctctcctaacccagccacactcggatgcggcgtgcactcagccgcaagtcttcaagcgaggaacgctggcccggctggagaaatggttcccaccttttttggttccctaacgcagtcaatctgtggcgaattcagcgatgcctggcctctgatgcagaaccccatgggcggggacaacatatccttctgcgatagttacccggaacttaccggggaggacatccactccctgaacccagaactggagtccagcactagtctggactccaactctagccaggacctggttgggggggccgtgcccgtgcagagccatagtgaaaacttcacggcagctacagatctgtctcgatacaataacaccctggtcgaatccgcttcaacacaggacgctctgaccatgagatcacagcttgaccaagaatctggcgctgttatccatccagccacacagacttcattacaggaggcttag

SEQ ID NO: 242560 - DNA, 1254 bp, Artificial Sequence
  derived and/or modified sequence
atggctctaaaagtccttcttgagcaggaaaagaccttttttaccttattagtcctgttgggatacttaagttgtaaagtgacctgcgaaagcggagattgcagacagcaagaattcagggaccggtcaggaaattgtgtgccgtgtaatcagtgcggccctggcatggagctttccaaggaatgcgggtttggttatggagaagatgcccagtgtgtcacttgtcgtctgcaccgctttaaggaggactggggttttcagaagtgtaagccctgtctcgactgcgccgtagtcaatcgcttccaaaaagccaactgctccgcaactagtgacgccatatgtggagactgtttgcccggattctacagaaaaaccaagctggtgggcttccaggatatggaatgtgtgccctgtggggacccaccacccccatacgagcctcattgtgcctcaaaggtgaatctggtaaaaatagcatcaacagcctccagccccagagatactgccctggccgcagtcatctgtagcgcgcttgccacagtgctcctggccctgctaatcttatgcgtcatatactgtaaacggcaatttatggagaagaaaccatcctggtctctgagatcccaggatatccagtataatgggtccgagttaagctgcttcgaccgacctcagctgcacgaatacgcccacagagcgtgttgtcagtgccggcgtgatagcgtccaaacgtgcggtcccgtgagactgctccccagtatgtgctgcgaggaagcatgttcgcccaaccccgcaacactgggctgcggcgtccatagcgccgctagcctccaggctcggaacgcgggtccagccggagagatggtgccaactttttttggaagcctgacacagtcaatatgtggcgagttctcagatgcctggccactcatgcagaacccgatgggtggcgacaacataagtttttgcgatagctaccccgagctgacaggggaggatattcattctctgaatccagagcttgagagtagcacgtcgctggactccaatagctcacaggacttggtgggcggagccgtgccagtgcagtcgcattctgagaacttcaccgctgctaccgatctgtcccgctataataacacgctggtcgagtcagcctcaacgcaggatgcccttaccatgagaagccagctcgaccaggaatccggcgcagttatccatccagccacccagacttcgctccaggaagcctag

SEQ ID NO: 242561 - DNA, 1254 bp, Artificial Sequence
  derived and/or modified sequence
atggctctgaaagtgttgctggagcaggagaagacttttttcacacttctggtcttactgggctacctgagctgcaaggtaacttgcgagtccggggactgcaggcagcaggaattccgtgaccgttctggaaattgtgttccatgcaatcaatgcgggcctggaatggagcttagcaaggaatgcgggttcggttacggcgaagatgcccagtgcgtgacatgccgattacaccgtttcaaagaggactggggattccagaaatgcaaaccatgtcttgactgtgccgtggtgaacaggttccagaaggcaaattgttccgccacaagcgacgctatctgcggtgactgcctgcctgggttttatcgtaagaccaagctagtgggcttccaggacatggaatgtgttccttgcggggatccgcctcccccatacgagccacactgcgcaagtaaagtgaacctggtaaagatcgcctctaccgcttcttcgccccgtgatacagcattggctgccgttatctgctctgcccttgcaaccgtcctgctggccctgctgatcctgtgcgtaatctattgcaagcgccagttcatggagaagaaacccagttggtccctccgctcacaggatattcagtacaacggatctgagctgtcatgctttgacaggccgcagctgcatgaatatgctcaccgagcatgctgccagtgccgcagagacagcgtccagacatgtggtccagttcgcctgttgcccagcatgtgctgcgaagaggcgtgtagtcctaacccagctacactagggtgtggcgtccactcagcagcgagcctgcaagccaggaatgctggaccagctggagaaatggtgcccacatttttcggtagtctaacccagagtatctgtggcgagttctcagacgcatggcctctgatgcagaaccctatgggcggagataatatttcgttctgcgatagttacccggagctgaccggtgaggatatccactccctgaaccccgagttggagagttcgaccagccttgacagtaattctagccaggacttggtgggcggagccgtgcccgtacagagccacagcgaaaattttactgccgctaccgatctctctagatacaataacacactcgtggaatccgccagcacgcaggatgccttgaccatgagatcacagttggaccaagagtcaggcgcagttatacaccctgccacccagacatccctgcaggaggcatag

SEQ ID NO: 242562 - DNA, 3276 bp, Artificial Sequence
  derived and/or modified sequence
gcagttcagcgagatgaaagggataaagcagaacccgctggcactaggaaaagcttccaacacacagtccacaacacagcttgggaaccaaaaaagctacagatccagccactcagcccaagcatgggagaactaccagcattgcctcattgcaaaaaagaggaggaaaacaacgtgatccatgtttaacaaaagagtctgtggactaggaggtgggagggtaactacctgctgaaagtgaactttctttgatatccatgcatatatataaactcagccctgcctttgatgttcagcaactgattcactgatcagattacaggcatttcatctccctgctcgtctgcctttgatctgcatggttaattttattttcctggatttgaagtttcgtctgggcttgtgctgacatacatttttgggaaggtagaagcatttggcacagaagtgctgccaggagaaactaagttgctgaacggaactctccaacaataaatacatttgataagaaagatggctttaaaagtgctactagaacaagagaaaacgtttttcactcttttagtattactaggctatttgtcatgtaaagtgacttgtgaatcaggagactgtagacagcaagaattcagggatcggtctggaaactgtgttccctgcaaccagtgtgggccaggcatggagttgtctaaggaatgtggcttcggctatggggaggatgcacagtgtgtgacgtgccggctgcacaggttcaaggaggactggggcttccagaaatgcaagccctgtctggactgcgcagtggtgaaccgctttcagaaggcaaattgttcagccaccagtgatgccatctgcggggactgcttgccaggattttataggaagacgaaacttgtcggctttcaagacatggagtgtgtgccttgtggagaccctcctcctccttacgaaccgcactgtgccagcaaggtcaacctcgtgaagatcgcgtccacggcctccagcccacgggacacggcgctggctgccgttatctgcagcgctctggccaccgtcctgctggccctgctcatcctctgtgtcatctattgtaagagacagtttatggagaagaaacccagctggtctctgcggtcacaggacattcagtacaacggctctgagctgtcgtgttttgacagacctcagctccacgaatatgcccacagagcctgctgccagtgccgccgtgactcagtgcagacctgcgggccggtgcgcttgctcccatccatgtgctgtgaggaggcctgcagccccaacccggcgactcttggttgtggggtgcattctgcagccagtcttcaggcaagaaacgcaggcccagccggggagatggtgccgactttcttcggatccctcacgcagtccatctgtggcgagttttcagatgcctggcctctgatgcagaatcccatgggtggtgacaacatctctttttgtgactcttatcctgaactcactggagaagacattcattctctcaatccagaacttgaaagctcaacgtctttggattcaaatagcagtcaagatttggttggtggggctgttccagtccagtctcattctgaaaactttacagcagctactgatttatctagatataacaacacactggtagaatcagcatcaactcaggatgcactaactatgagaagccagctagatcaggagagtggtgctgtcatccacccagccactcagacgtccctccaggaagcttaaagaacctgcttctttctgcagtagaagcgtgtgctggaacccaaagagtactcctttgttaggcttatggactgagcagtctggaccttgcatggcttctggggcaaaaataaatctgaaccaaactgacggcatttgaagcctttcagccagttgcttctgagccagaccagctgtaagctgaaacctcaatgaataacaagaaaagactccaggccgactcatgatactctgcatctttcctacatgagaagcttctctgccacaaaagtgacttcaaagacggatgggttgagctggcagcctatgagattgtggacatataacaagaaacagaaatgccctcatgcttattttcatggtgattgtggttttacaagactgaagacccagagtatactttttctttccagaaataatttcataccgcctatgaaatatcagataaattaccttagcttttatgtagaatgggttcaaaagtgagtgtttctatttgagaaggacactttttcatcatctaaactgattcgcataggtggttagaatggccctcatattgcctgcctaaatcttgggtttattagatgaagtttactgaatcagaggaatcagacagaggaggatagctctttccagaatccacacttctgacctcagcctcggtctcatgaacacccgctgatctcaggagaacacctgggctagggaatgtggtcgagaaagggcagcccattgcccagaattaacacatattgtagagacttgtatgcaaaggttggcatatttatatgaaaattagttgctatagaaacatttgttgcatctgtccctctgcctgagcttagaaggttatagaaaaagggtatttataaacataaatgaccttttacttgcattgtatcttatactaaaggctttagaaattacaacatatcaggttcccctactactgaagtagccttccgtgagaacacaccacatgttaggactagaagaaaatgcacaatttgtaggggtttggatgaagcagctgtaactgccctagtgtagtttgaccaggacattgtcgtgctccttccaattgtgtaagattagttagcacatcatctcctactttagccatccggtgttggatttaagaggacggtgcttctttctattaaagtgctccatcccctaccatctacacattagcattgtctctagagctaagacagaaattaaccccgttcagtcacaaagcagggaatggttcatttactcttaatctttatgccctggagaagacctacttgaacagggcatattttttagacttctgaacatcagtatgttcgagggtactatgatattttggtttggaattgccctgcccaagtcactgtcttttaacttttaaactgaatattaaaatgtatctgtctttcctagtatgtttttatcttctcatgtattatccatggttttctctgtttgtgacagattagtaaaatttaatgagccctc

SEQ ID NO: 242563 - DNA, 4151 bp, Artificial Sequence
  derived and/or modified sequence
cgcggagccctgcgctgggaggtgcacggtgtgcacgctggactggacccccatgcaaccccgcgccctgcgccttaaccaggactgctccgcgcgcccctgagcctcgggctccggcccggacctgcagcctcccaggtggctgggaagaactctccaacaataaatacatttgataagaaagatggctttaaaagtgctactagaacaagagaaaacgtttttcactcttttagtattactaggctatttgtcatgtaaagtgacttgtgaatcaggagactgtagacagcaagaattcagggatcggtctggaaactgtgttccctgcaaccagtgtgggccaggcatggagttgtctaaggaatgtggcttcggctatggggaggatgcacagtgtgtgacgtgccggctgcacaggttcaaggaggactggggcttccagaaatgcaagccctgtctggactgcgcagtggtgaaccgctttcagaaggcaaattgttcagccaccagtgatgccatctgcggggactgcttgccaggattttataggaagacgaaacttgtcggctttcaagacatggagtgtgtgccttgtggagaccctcctcctccttacgaaccgcactgtgccagcaaggtcaacctcgtgaagatcgcgtccacggcctccagcccacgggacacggcgctggctgccgttatctgcagcgctctggccaccgtcctgctggccctgctcatcctctgtgtcatctattgtaagagacagtttatggagaagaaacccagctggtctctgcggtcacaggacattcagtacaacggctctgagctgtcgtgttttgacagacctcagctccacgaatatgcccacagagcctgctgccagtgccgccgtgactcagtgcagacctgcgggccggtgcgcttgctcccatccatgtgctgtgaggaggcctgcagccccaacccggcgactcttggttgtggggtgcattctgcagccagtcttcaggcaagaaacgcaggcccagccggggagatggtgccgactttcttcggatccctcacgcagtccatctgtggcgagttttcagatgcctggcctctgatgcagaatcccatgggtggtgacaacatctctttttgtgactcttatcctgaactcactggagaagacattcattctctcaatccagaacttgaaagctcaacgtctttggattcaaatagcagtcaagatttggttggtggggctgttccagtccagtctcattctgaaaactttacagcagctactgatttatctagatataacaacacactggtagaatcagcatcaactcaggatgcactaactatgagaagccagctagatcaggagagtggtgctgtcatccacccagccactcagacgtccctccaggaagcttaaagaacctgcttctttctgcagtagaagcgtgtgctggaacccaaagagtactcctttgttaggcttatggactgagcagtctggaccttgcatggcttctggggcaaaaataaatctgaaccaaactgacggcatttgaagcctttcagccagttgcttctgagccagaccagctgtaagctgaaacctcaatgaataacaagaaaagactccaggccgactcatgatactctgcatctttcctacatgagaagcttctctgccacaaaagtgacttcaaagacggatgggttgagctggcagcctatgagattgtggacatataacaagaaacagaaatgccctcatgcttattttcatggtgattgtggttttacaagactgaagacccagagtatactttttctttccagaaataatttcataccgcctatgaaatatcagataaattaccttagcttttatgtagaatgggttcaaaagtgagtgtttctatttgagaaggacactttttcatcatctaaactgattcgcataggtggttagaatggccctcatattgcctgcctaaatcttgggtttattagatgaagtttactgaatcagaggaatcagacagaggaggatagctctttccagaatccacacttctgacctcagcctcggtctcatgaacacccgctgatctcaggagaacacctgggctagggaatgtggtcgagaaagggcagcccattgcccagaattaacacatattgtagagacttgtatgcaaaggttggcatatttatatgaaaattagttgctatagaaacatttgttgcatctgtccctctgcctgagcttagaaggttatagaaaaagggtatttataaacataaatgaccttttacttgcattgtatcttatactaaaggctttagaaattacaacatatcaggttcccctactactgaagtagccttccgtgagaacacaccacatgttaggactagaagaaaatgcacaatttgtaggggtttggatgaagcagctgtaactgccctagtgtagtttgaccaggacattgtcgtgctccttccaattgtgtaagattagttagcacatcatctcctactttagccatccggtgttggatttaagaggacggtgcttctttctattaaagtgctccatcccctaccatctacacattagcattgtctctagagctaagacagaaattaaccccgttcagtcacaaagcagggaatggttcatttactcttaatctttatgccctggagaagacctacttgaacagggcatattttttagacttctgaacatcagtatgttcgagggtactatgatattttggtttggaattgccctgcccaagtcactgtcttttaacttttaaactgaatattaaaatgtatctgtctttcctagtatgtttttatcttctcatgtattatccatggttttctctgtttgtgacagattagtaaaatttaatgagccctctttcttgtggccgtttctccatagttttaggttttgatatgtgtttactagcttgcctgtgtctggtacatctcatgacctcaattccctcacctgaaataggaaatgagaatgtttcattgtagccccaagcggtcatgtcaacctagtgcctagtcataattaattgacttttcctgtattacttctttttttaagtataaaccaatgatcctttggtagtcaagaactcttaggaacattgccttttggacatgtaaaatatttaggatttgaccacacaatggctatgaaaatgcaagtagtttcctcgcgtgacctcaccatgattcacatacgtgccactgtttgaaatctggtctgtttgcatttctgttatgacagagagatgatgtttgcatttctgttatgacagagagatgatgaaagtaggcagggctgtgttcctttgtgtagcctgtatatattttccatatgtagagccctgattaacttcaaggacaaacactggctggagaaagccagactgatgggaatgagactttggccaaaaatcccaaaacatcattttcaatcagtagagaagtgcttagggttgaaaattgatttcatttgctactgaatttggtaaatcctgggtaacttttatcaagatgaagacattttaccctacctactctagaaatatacaacaatgttatattttacactccttggaaacatttgaggaaaaaaatgcaatttgcacttcactttgttggaatatcccatagcactcaataaactcagctgctagagtgccgatgtcaggagggctgtgtcgggtaatgcgtgtggctgaatgggcataaccactgtggcttcttgtgctgcagaagctcgttgacaagactgaggaggatttcaagagcaaccaagtaaagtcatgaattttctaattttgtgtatatggaatatatttttaaatagagatttttctactttagataatgtgttaatattgctattacctaggttaagcactattgtctgtgctagtaagaaaaagaaaggaaaaccatcattgctttatagtagcttatatcaatttagatttcatcattactattttgcatactggaatttataaatgtgtaaattatcattttcttagttttgtaataccttttttatttgtgaataaaattatcacctggtattctta

SEQ ID NO: 242564 - DNA, 1378 bp, Artificial Sequence
  derived and/or modified sequence
agcaactgattcactgatcagattacaggcatttcatctccctgctcgtctgcctttgatctgcatggttaattttattttcctggatttgaagtttcgtctgggcttgtgctgacatacatttttgggaaggtagaagcatttggcacagaagtgctgccaggagaaactaagttgctgaacgggaatgtggcttcggctatggggaggatgcacagtgtgtgacgtgccggctgcacaggttcaaggaggactggggcttccagaaatgcaagccctgtctggactgcgcagtggtgaaccgctttcagaaggcaaattgttcagccaccagtgatgccatctgcggggactgcttgccaggattttataggaagacgaaacttgtcggctttcaagacatggagtgtgtgccttgtggagaccctcctcctccttacgaaccgcactgtgccagcaaggtcaacctcgtgaagatcgcgtccacggcctccagcccacgggacacggcgctggctgccgttatctgcagcgctctggccaccgtcctgctggccctgctcatcctctgtgtcatctattgtaagagacagtttatggagaagaaacccagctggtctctgcggtcacaggacattcagtacaacggctctgagctgtcgtgttttgacagacctcagctccacgaatatgcccacagagcctgctgccagtgccgccgtgactcagtgcagacctgcgggccggtgcgcttgctcccatccatgtgctgtgaggaggcctgcagccccaacccggcgactcttggttgtggggtgcattctgcagccagtcttcaggcaagaaacgcaggcccagccggggagatggtgccgactttcttcggatccctcacgcagtccatctgtggcgagttttcagatgcctggcctctgatgcagaatcccatgggtggtgacaacatctctttttgtgactcttatcctgaactcactggagaagacattcattctctcaatccagaacttgaaagctcaacgtctttggattcaaatagcagtcaagatttggttggtggggctgttccagtccagtctcattctgaaaactttacagcagctactgatttatctagatataacaacacactggtagaatcagcatcaactcaggatgcactaactatgagaagccagctagatcaggagagtggtgctgtcatccacccagccactcagacgtccctccaggaagcttaaagaacctgcttctttctgcagtagaagcgtgtgctggaacccaaagagtactcctttgttaggcttatggactgagcagtctggaccttgcatggcttctggggcaaaaataaatctga

SEQ ID NO: 242565 - protein, 278 aa, Artificial Sequence
  derived and/or modified sequence
MKFRAKITGKGCLELFIHVSGTVARLAKVCVLRVRPDSLCFGPAGSGGLHEARLWCEVRQGAFQQFRMEGVSEDLDEIHLELTAEHLSRAARSAAGASSLKLQLTHKRRPSLTVAVELVSSLGRARSVVHDLPVRVLPRRVWRDCLPPSLRASDASIRLPRWRTLRSIVERMANVGSHVLVEANLSGRMTLSIETEVVSIQSYFKNLGNPPQSAVGVPENRDLESMVQVRVDNRKLLQFLEGQQIHPTTALCNIWDNTLLQLVLVQEDVSLQYFIPAL

SEQ ID NO: 242566 - DNA, 837 bp, Artificial Sequence
  derived and/or modified sequence
atgaaatttcgcgctaaaataaccggtaaggggtgcttggaactttttattcacgtgagcggaacagttgctcgcctggccaaggtttgtgtgctgagagtgcgacccgactccctatgctttggacctgcaggctctggggggctgcacgaggccaggctctggtgcgaagtcaggcagggagcttttcagcaatttcggatggaaggcgtctcagaagatctcgatgagatccacttggagttgactgccgagcacctcagccgcgctgcaagatcggcagctggggccagctctctcaaactccaactcactcacaagcgaagaccttctttgaccgtggctgtagagcttgtcagttcactgggaagggcccgctccgtggtgcacgatttgcctgtgcgggttctgccacgacgagtttggcgtgattgtctacctccttctctgagagcttccgacgcatcaatcaggctgcctaggtggcggactctgcgcagcatcgtagagagaatggccaatgtcggatctcatgtgcttgtggaagccaatctgtccggccgtatgaccctgtcaattgaaaccgaggtggtgagcattcagtcatatttcaagaatctaggaaatcctcctcagtccgctgtgggggtcccagagaatcgggatctcgagtcaatggtccaagtgcgagtggacaacaggaagcttctgcagttccttgaaggacaacaaattcacccaaccaccgcgctgtgtaatatctgggataacacactgctccagctggtgctggtccaggaggatgtaagcctgcagtattttattccggcgttgtag

SEQ ID NO: 242567 - DNA, 1025 bp, Artificial Sequence
  derived and/or modified sequence
ctgccttccctgtggcatcatgaagtttcgcgccaagatcaccggcaaaggctgtctagagctgttcattcacgtcagcggcaccgtcgcgaggctagcgaaggtctgcgtgctccgcgtgcgccctgacagcctgtgcttcggccccgcgggttccggcggcctccacgaggccaggctgtggtgcgaggtgcggcagggggccttccagcagtttcgcatggaaggtgtctcggaagatctcgatgagatccacctggagctgacggcggagcacctgtcccgggcggcgagaagcgcagcgggcgcgtcctccctgaagctgcagctgacccacaagcgccgcccctccctcacggtggcggtggagctggtctcgtccctgggccgcgctcgcagcgtggtgcacgatctgcccgtgcgggtgcttcccaggagagtgtggcgggactgcctgccgcccagcctgcgcgcctccgacgcgagcatccgcctgccgcgctggaggacgctgaggagcatcgtggagaggatggcgaacgtgggcagtcacgtgctggtggaagcaaacctcagtggcaggatgaccctgagtatagagacggaggtggtgtccattcaaagttattttaaaaatcttggaaaccctccccagtcggctgtgggtgtgcctgaaaacagagacctggagagcatggtgcaagtgcgggtggacaatcggaagcttctgcagtttttggagggacagcaaatacatcctacgacggccctgtgcaatatttgggacaatactcttcttcagcttgttttggttcaagaagatgtctctcttcagtatttcattcctgccttgtaaaaattcagccagcttagattttttttttaaggttttgatcttttcaaaactaaaacagaccctgagttaattgggttgaaaatttggaccttcactgacttatgcagggcgtatattttgttgagcccttcctcctttgcaaaatttatattaaagcattggtaaaaca

SEQ ID NO: 242568 - DNA, 837 bp, Artificial Sequence
  derived and/or modified sequence
atgaagttccgggccaagatcaccgggaagggctgcctggagctgttcatccacgtgtctggcaccgtggcccggctggccaaggtgtgtgtgctgcgggtgcggccagacagcctgtgctttggacctgctggcagcggcggcctgcacgaggcccggctgtggtgtgaggtgcggcagggcgccttccagcagttcaggatggagggcgtgtctgaggacctggatgagatccacctggagctgacagctgagcacctgagccgggccgcccggtctgctgctggggccagcagcctgaagctgcagctgacccacaagaggcggcccagcctgactgtggccgtggagctggtgagcagcctgggccgggcccggtctgtggtgcatgacctgcctgtgcgggtgctgcccaggagagtgtggagggactgcctgccccccagcctgcgggccagtgatgccagcatccggctgccccgctggaggaccctgcggagcatcgtggagaggatggccaacgtgggcagccacgtgctggtggaggccaacctgagcggccgcatgaccctgagcattgaaacagaggtggtgtccatccagagctacttcaagaacctgggcaaccccccccagagcgctgtgggcgtgcctgaaaatagagacctggagagcatggtgcaggtgcgggtggacaacaggaagctgctgcagttcctggagggccagcagatccaccccaccacagccctgtgcaacatctgggacaacaccctgctgcagctggtgctggtgcaggaggatgtgtccctgcagtacttcatcccagccctgtag

SEQ ID NO: 242569 - DNA, 837 bp, Artificial Sequence
  derived and/or modified sequence
atgaagttccgggccaagatcaccggcaagggctgcctggagctgttcattcacgtctccgggacagttgcaaggctggctaaggtctgtgtgctccgcgtcagacctgactccctgtgtttcgggcctgcgggttcaggagggcttcacgaggctaggctgtggtgcgaggtacgccagggtgcctttcagcagttccggatggagggtgtgtctgaggatctggatgaaattcatctggagcttacggcagagcacctcagtcgcgccgcccggtcggccgctggggcttccagtctcaagttgcagttgacgcataagcggcgccccagcctcaccgttgctgtggagttggttagtagcttggggcgggccaggtccgtagtccatgacctcccggtaagagtgctgcccaggagagtctggcgcgattgtctgccgccctctctccgcgcctcagacgcaagcatccgccttccaagatggcgtactcttcgcagcattgtcgagagaatggcgaacgtcggaagtcacgtcctcgtggaagctaacctatctgggagaatgactctctctattgagaccgaagtcgttagtattcagtcttattttaaaaacctcggtaatcccccccaaagcgcagtgggcgtgccagagaatcgcgatcttgagagcatggtccaagttagggtcgataaccggaagctgttgcagttcctggagggccagcagatccaccccacaactgcgctgtgcaatatttgggacaataccttactgcaactcgtccttgtgcaagaggatgtctctttacagtacttcatacctgcactgtag

SEQ ID NO: 242570 - DNA, 837 bp, Artificial Sequence
  derived and/or modified sequence
atgaaattcagggccaagattaccggaaagggctgcctggaactgtttatccacgtatcagggaccgtggcaagactcgctaaggtctgtgtactacgggttagacctgattctctctgtttcggcccagccggatccggcggtttgcacgaagcccgtctttggtgcgaagttaggcaaggtgctttccagcagtttcggatggagggtgtcagtgaagatctggacgaaattcaccttgagctgaccgccgagcatctctcccgggcagcaagatccgccgcaggggcatcatctctgaagttacagcttacccacaaacgcagaccttcactgaccgtagccgtcgaacttgtttcttcgttgggacgggctcgctcagtggtgcacgatctgccggtacgagtgctccctaggagagtgtggagggactgcctccctccttcactccgagcttccgacgcatctattaggctgcctagatggcgcaccctgcgtagtatcgtcgaacggatggccaacgtcgggtcccacgttctggttgaagccaacctgagcggccgaatgacgctgtcgattgaaactgaggtggtgtcgatccagtcctacttcaagaatctcggcaaccctccacagtcagctgtgggagtgccggaaaatagagatctggaaagtatggtgcaggttcgggttgacaatcggaagttgcttcaattcctggagggtcagcagattcatcctacgactgcgctgtgcaatatctgggacaacacactgctgcaattagtactcgttcaagaggacgtctcactacagtacttcatccccgctctgtag

SEQ ID NO: 242571 - DNA, 837 bp, Artificial Sequence
  derived and/or modified sequence
atgaagttcagagccaagatcaccggcaagggctgcctggagctgttcatccacgtgagcggcaccgtggccagactggccaaggtgtgcgtgctgagagtgagacccgacagcctgtgcttcggccccgccggcagcggcggcctgcacgaggccagactgtggtgcgaggtgagacagggcgccttccagcagttcagaatggagggcgtgagcgaggacctggacgagatccacctggagctgaccgccgagcacctgagcagagccgccagaagcgccgccggcgccagcagcctgaagctgcagctgacccacaagagaagacccagcctgaccgtggccgtggagctggtgagcagcctgggcagagccagaagcgtggtgcacgacctgcccgtgagagtgctgcccagaagagtgtggagagactgcctgccccccagcctgagagccagcgacgccagcatcagactgcccagatggagaaccctgagaagcatcgtggagagaatggccaacgtgggcagccacgtgctggtggaggccaacctgagcggcagaatgaccctgagcatcgagaccgaggtggtgagcatccagagctacttcaagaacctgggcaaccccccccagagcgccgtgggcgtgcccgagaacagagacctggagagcatggtgcaggtgagagtggacaacagaaagctgctgcagttcctggagggccagcagatccaccccaccaccgccctgtgcaacatctgggacaacaccctgctgcagctggtgctggtgcaggaggacgtgagcctgcagtacttcatccccgccctgtag

SEQ ID NO: 242572 - protein, 423 aa, Artificial Sequence
  derived and/or modified sequence
MLCHRGGQLIVPIIPLCPEHSCRGRRLQNLLSGPWPKQPMELHNLSSPSPSLSSSVLPPSFSPSPSSAPSAFTTVGGSSGGPCHPTSSSLVSAFLAPILALEFVLGLVGNSLALFIFCIHTRPWTSNTVFLVSLVAADFLLISNLPLRVDYYLLHETWRFGAAACKVNLFMLSTNRTASVVFLTAIALNRYLKVVQPHHVLSRASVGAAARVAGGLWVGILLLNGHLLLSTFSGPSCLSYRVGTKPSASLRWHQALYLLEFFLPLALILFAIVSIGLTIRNRGLGGQAGPQRAMRVLAMVVAVYTICFLPSIIFGMASMVAFWLSACRSLDLCTQLFHGSLAFTYLNSVLDPVLYCFSSPNFLHQSRALLGLTRGRQGPVSDESSYQPSRQWRYREASRKAEAIGKLKVQGEVSLEKEGSSQG

SEQ ID NO: 242573 - DNA, 1272 bp, Artificial Sequence
  derived and/or modified sequence
atgctgtgccacagaggcggccagctgatcgtgcccatcatccccctgtgccccgagcacagctgcagaggcagaagactgcagaacctgctgagcggcccctggcccaagcagcccatggagctgcacaacctgagcagccccagccccagcctgagcagcagcgtgctgccccccagcttcagccccagccccagcagcgcccccagcgccttcaccaccgtgggcggcagcagcggcggcccctgccaccccaccagcagcagcctggtgagcgccttcctggcccccatcctggccctggagttcgtgctgggcctggtgggcaacagcctggccctgttcatcttctgcatccacaccagaccctggaccagcaacaccgtgttcctggtgagcctggtggccgccgacttcctgctgatcagcaacctgcccctgagagtggactactacctgctgcacgagacctggagattcggcgccgccgcctgcaaggtgaacctgttcatgctgagcaccaacagaaccgccagcgtggtgttcctgaccgccatcgccctgaacagatacctgaaggtggtgcagccccaccacgtgctgagcagagccagcgtgggcgccgccgccagagtggccggcggcctgtgggtgggcatcctgctgctgaacggccacctgctgctgagcaccttcagcggccccagctgcctgagctacagagtgggcaccaagcccagcgccagcctgagatggcaccaggccctgtacctgctggagttcttcctgcccctggccctgatcctgttcgccatcgtgagcatcggcctgaccatcagaaacagaggcctgggcggccaggccggcccccagagagccatgagagtgctggccatggtggtggccgtgtacaccatctgcttcctgcccagcatcatcttcggcatggccagcatggtggccttctggctgagcgcctgcagaagcctggacctgtgcacccagctgttccacggcagcctggccttcacctacctgaacagcgtgctggaccccgtgctgtactgcttcagcagccccaacttcctgcaccagagcagagccctgctgggcctgaccagaggcagacagggccccgtgagcgacgagagcagctaccagcccagcagacagtggagatacagagaggccagcagaaaggccgaggccatcggcaagctgaaggtgcagggcgaggtgagcctggagaaggagggcagcagccagggctag

SEQ ID NO: 242574 - DNA, 1272 bp, Artificial Sequence
  derived and/or modified sequence
atgctgtgccacagggggggccaactgatcgtcccgataattccactttgccccgaacattcctgccgaggacggcgcctccagaatctcctttcaggcccatggcctaaacagccgatggagctccataacctttcgtccccctctccttcgctctccagctccgttctccctccatccttcagcccctcgcctagctctgcaccatctgcattcacgacggtgggaggctcttccggcgggccctgtcaccccacgtcttcctctttggtaagcgcattcctggctcccatcctggcccttgagtttgttctcggattagttggtaactccctggctctcttcattttttgcattcacactcggccttggacgagcaacacggtgtttttggtaagcttggtggctgccgacttcctcttgatctccaacctgccgctccgagttgactactaccttctgcacgaaacttggcggttcggagccgccgcctgtaaagtgaacctgttcatgctatccacaaacaggactgctagcgtggtctttctgactgccatcgccctgaatagatacctcaaggtggtccaacctcaccatgtgctgtcacgggccagcgtgggcgccgccgccagagtggctggtggcctgtgggtgggaatcctgctgctgaatggtcatttactgctttctactttttctggtccttcatgcctatcatatcgggtgggaaccaagccttctgcttcactaagatggcatcaggccctttatttgttggaatttttcttgccccttgccttaatactgtttgccatcgtcagcatcggtctgaccattaggaaccgaggtctgggaggacaggccggcccccaacgcgccatgcgagtgctggcaatggtcgttgctgtctatactatatgctttctaccctcaattatttttgggatggccagcatggtggctttttggctgagcgcatgcaggtctctagatctctgcactcaattgtttcatggttctctcgcgttcacatatttgaacagtgtcttagatcccgttctgtactgcttcagtagtccaaactttctgcaccaatcaagggcgctcctgggcctcacgaggggtaggcagggccctgtcagtgatgagagcagctatcagccctcgcgccaatggcggtatcgggaagctagccgtaaagcagaggctatcggtaagctgaaggtgcagggggaagtatccttagaaaaggaaggctcctcacagggttag

SEQ ID NO: 242575 - DNA, 1272 bp, Artificial Sequence
  derived and/or modified sequence
atgctgtgccaccggggcggccagctgattgtgcccatcatccccctgtgcccagagcacagctgccggggccgccgcctgcagaacctgctgagcggcccctggcccaagcagcccatggagctgcacaacctgagcagccccagccccagcctgagcagctctgtgctgccccccagcttcagccccagccccagcagcgcccccagcgccttcaccaccgtgggcggcagcagcggcggcccctgccaccccaccagcagcagcctggtgtctgccttcctggcccccatcctggccctggagtttgtgctgggcctggtgggcaacagcctggccctcttcatcttctgcatccacacccggccctggaccagcaacacagtgttcctggtgtccctggtggccgctgacttcctgctgatcagcaacctgcccctgcgggtggactactacctgctgcacgagacctggaggtttggagctgctgcctgcaaggtgaacctcttcatgctgagcaccaacagaacagcctctgtggtgttcctgacagccatcgccctgaaccgctacctgaaggtggtgcagccccaccacgtgctgagccgggcctctgtgggcgctgctgcccgggtggccggcggcctgtgggtgggcatcctgctgctgaatggccacctgctgctgagcaccttcagcggccccagctgcctgagctacagagtgggcaccaagcccagcgccagcctgcgctggcaccaggccctgtacctgctggagttcttcctgcccctggccctgatcctgtttgccatcgtgtccatcggcctgaccatccggaacagaggcctgggcggccaggccggcccccagagggccatgagggtgctggccatggtggtggccgtgtacaccatctgcttcctgcccagcatcatcttcggcatggcctccatggtggccttctggctgagcgcctgccgcagcctggacctgtgcacccagctgttccacggcagcctggccttcacctacctgaacagcgtgctggaccctgtgctgtactgcttcagcagccccaacttcctgcaccagagccgggccctgctgggcctgacccggggccggcagggccctgtgtctgatgagagcagctaccagcccagccggcagtggagataccgggaggccagcaggaaggccgaggccatcggcaagctgaaggtgcagggcgaggtgtccctggagaaggagggcagcagccagggctag

SEQ ID NO: 242576 - DNA, 1272 bp, Artificial Sequence
  derived and/or modified sequence
atgctgtgccaccggggcggccagctgatcgtgcccatcatccccctgtgtcccgaacatagttgtagaggtaggcgcttgcagaatctactgtccggcccatggccaaagcagccgatggaactgcacaatctgtctagtccctctccatctttgtcaagtagtgtcctccccccttcttttagtccctctccaagctctgcgcctagcgcgttcacaaccgtcggaggttccagcggcgggccatgtcaccctacaagctcgtcgctcgtcagcgcattcttggctcccattctcgctctagagttcgtactcggactggtgggtaattcactagctttattcattttttgtattcacacccggccctggacttccaataccgttttcctcgtctccctcgttgccgctgacttcctactcattagtaacttgcccctgcgtgttgactactatttacttcacgagacctggagattcggtgctgccgcctgcaaggtgaatctgtttatgctatcaactaacagaacagcctctgtagtgttcctcaccgccattgctctcaacaggtacctgaaagtggtacagccacaccacgtgctgagccgagcctcagtgggagctgctgcacgcgttgcgggtggcctctgggttggaatcctgctgttgaatggacatcttttactctctactttttcggggccatcctgtctgagttatcgcgtgggcaccaaaccgtcagcctccttgcggtggcaccaggctttataccttctcgaattttttctgccactggcccttatcctgtttgccatcgtcagtatcggactgacgatcaggaatcgcggattgggggggcaggcaggtccacaacgtgccatgagggtgctggccatggtagtggctgtgtatactatctgctttttgcctagtattattttcggaatggcctcaatggtcgctttttggctgagcgcttgtcgcagcctggatttatgtacccaactgttccacggctccctcgcatttacctacttaaattcagtcttagatcccgtcttatactgtttctcgagcccaaacttcctgcaccagtctagggcacttctgggactaacacgcggaaggcagggcccagtaagtgacgagtcctcgtatcagcctagtcgccagtggcggtaccgcgaggcttcaagaaaggccgaggcaatagggaagctcaaggtccaaggcgaggtgtctctggagaaggaggggtcttcacagggctag

SEQ ID NO: 242577 - DNA, 1760 bp, Artificial Sequence
  derived and/or modified sequence
ggctgcagggttccccttggcctgcaaacaggaacacagggtgtttctcagtggctgcgagaatgctgatgaaaaccccaggatgttgtgtcaccgtggtggccagctgatagtgccaatcatcccactttgccctgagcactcctgcaggggtagaagactccagaaccttctctcaggcccatggcccaagcagcccatggaacttcataacctgagctctccatctccctctctctcctcctctgttctccctccctccttctctccctcaccctcctctgctccctctgcctttaccactgtgggggggtcctctggagggccctgccaccccacctcttcctcgctggtgtctgccttcctggcaccaatcctggccctggagtttgtcctgggcctggtggggaacagtttggccctcttcatcttctgcatccacacgcggccctggacctccaacacggtgttcctggtcagcctggtggccgctgacttcctcctgatcagcaacctgcccctccgcgtggactactacctcctccatgagacctggcgctttggggctgctgcctgcaaagtcaacctcttcatgctgtccaccaaccgcacggccagcgttgtcttcctcacagccatcgcactcaaccgctacctgaaggtggtgcagccccaccacgtgctgagccgtgcttccgtgggggcagctgcccgggtggccgggggactctgggtgggcatcctgctcctcaacgggcacctgctcctgagcaccttctccggcccctcctgcctcagctacagggtgggcacgaagccctcggcctcgctccgctggcaccaggcactgtacctgctggagttcttcctgccactggcgctcatcctctttgctattgtgagcattgggctcaccatccggaaccgtggtctgggcgggcaggcaggcccgcagagggccatgcgtgtgctggccatggtggtggccgtctacaccatctgcttcttgcccagcatcatctttggcatggcttccatggtggctttctggctgtccgcctgccgatccctggacctctgcacacagctcttccatggctccctggccttcacctacctcaacagtgtcctggaccccgtgctctactgcttctctagccccaacttcctccaccagagccgggccttgctgggcctcacgcggggccggcagggcccagtgagcgacgagagctcctaccaaccctccaggcagtggcgctaccgggaggcctctaggaaggcggaggccatagggaagctgaaagtgcagggcgaggtctctctggaaaaggaaggctcctcccagggctgagggccagctgcagggctgcagcgctgtgggggtaagggctgccgcgctctggcctggagggacaaggccagcacacggtgcctcaaccaactggacaagggatggcggcagaccaggggccaggccaaagcactggcaggactcaggtgggtggcagggagagaaacccacctaggcctctcagtgtgtccaggatggcattcccagaatgcaggggagagcaggatgccgggtggaggagacaggcaaggtgccgttggcacaccagctcagacaggggcctgcgcagctgcaggggacagacgccaatcactgtcacagcagagtcaccttagaaattggacagctgcatgttctgtgctctccagtttgtcccttccaatattaataaacttcccttttaaat

SEQ ID NO: 242578 - DNA, 1272 bp, Artificial Sequence
  derived and/or modified sequence
atgctttgtcacaggggtggtcagctgatcgtgcctatcatccctttgtgtcccgagcacagttgcagaggcaggaggttacaaaacttactttctggtccctggcccaagcagcctatggaactgcataatctctcatcaccctcccccagcctgagtagtagcgttctgccccctagcttttcgccttcccccagctccgcccctagcgcgtttacaacggtgggaggatcctcaggcggaccttgtcacccgactagctctagtttagtgagcgcattcctcgccccaatcctggcactggaattcgtactcggcttggtaggtaatagcttggcccttttcattttttgcattcacacacgtccctggacctcaaatactgtgttcctcgtgagtctcgtggctgctgacttcttgttgatcagtaatttgccactgagggtggactactacttattgcatgagacatggagatttggcgctgccgcatgcaaggtgaatttatttatgctcagcaccaatagaaccgctagtgtcgtgtttctcactgcaatagctcttaaccggtacttgaaggtggtccagcctcaccacgttctgtcccgggctagtgtcggagctgctgccagggtggccggagggctctgggtcggcatactcctcctgaacggccacctgctgctgagcaccttttccggcccaagctgcctgtcctatcgggttgggaccaagccaagcgcctcactccgctggcaccaggccttgtacttactcgagtttttcttgcctcttgcgctgatattgttcgcaattgtgagtattgggctgaccatcaggaataggggacttgggggacaagctgggcctcaaagagcaatgcgcgtgttagcaatggtcgttgcagtctacacaatctgtttcctaccaagcatcatcttcggcatggcctccatggtggcattctggctgtctgcttgcagaagcctggatctatgcactcagctgtttcacggatccctagcgtttacatacttaaatagcgtgttagatccggttctgtactgtttctcgtcgcctaattttctccaccaaagccgggctctactcggattgacacgaggtagacagggccctgtgtctgacgaaagctcctatcagccatcccggcagtggcggtaccgcgaggccagccgcaaagctgaggcgattggcaaactgaaagtccagggcgaagtgtcactcgaaaaagaagggtcttctcaaggatag

SEQ ID NO: 242579 - protein, 88 aa, Artificial Sequence
  derived and/or modified sequence
MKVAFVAVLLICLVLSSSLFEVSMAGSAFCSSKCAKRCSRAGMKDRCTRFCGICCSKCRCVPSGTYGNKHECPCYRDMKNSKGKPKCP

SEQ ID NO: 242580 - protein, 88 aa, Artificial Sequence
  derived and/or modified sequence
MKVAFAAVLLICLVLSSSLFEVSMAGSAFCSSKCSKRCSRAGMKDRCMKFCGICCSKCNCVPSGTYGNKHECPCYRDMKNSKGKAKCP

SEQ ID NO: 242581 - protein, 88 aa, Artificial Sequence
  derived and/or modified sequence
MKLEFANVLLLCLVLSSSFLEISMAGSPFCDSKCAQRCAKAGVQDRCLRFCGICCEKCNCVPSGTYGNKDECPCYRDMKNSKGKDKCP

SEQ ID NO: 242582 - protein, 926 aa, Artificial Sequence
  derived and/or modified sequence
MAFLIILITCFVIILATSQPCQTPDDFVAATSPGHIIIGGLFAIHEKMLSSEDSPRRPQIQECVGFEISVFLQTLAMIHSIEMINNSTLLPGVKLGYEIYDTCTEVTVAMAATLRFLSKFNCSRETVEFKCDYSSYMPRVKAVIGSGYSEITMAVSRMLNLQLMPQVGYESTAEILSDKIRFPSFLRTVPSDFHQIKAMAHLIQKSGWNWIGIITTDDDYGRLALNTFIIQAEANNVCIAFKEVLPAFLSDNTIEVRINRTLKKIILEAQVNVIVVFLRQFHVFDLFNKAIEMNINKMWIASDNWSTATKITTIPNVKKIGKVVGFAFRRGNISSFHSFLQNLHLLPSDSHKLLHEYAMHLSACAYVKDTDLSQCIFNHSQRTLAYKANKAIERNFVMRNDFLWDYAEPGLIHSIQLAVFALGYAIRDLCQARDCQNPNAFQPWELLGVLKNVTFTDGWNSFHFDAHGDLNTGYDVVLWKEINGHMTVTKMAEYDLQNDVFIIPDQETKNEFRNLKQIQSKCSKECSPGQMKKTTRSQHICCYECQNCPENHYTNQTDMPHCLLCNNKTHWAPVRSTMCFEKEVEYLNWNDSLAILLLILSLLGIIFVLVVGIIFTRNLNTPVVKSSGGLRVCYVILLCHFLNFASTSFFIGEPQDFTCKTRQTMFGVSFTLCISCILTKSLKILLAFSFDPKLQKFLKCLYRPILIIFTCTGIQVVICTLWLIFAAPTVEVNVSLPRVIILECEEGSILAFGTMLGYIAILAFICFIFAFKGKYENYNEAKFITFGMLIYFIAWITFIPIYATTFGKYVPAVEIIVILISNYGILYCTFIPKCYVIICKQEINTKSAFLKMIYSYSSHSVSSIALSPASLDSMSGNVTMTNPSSSGKSATWQKSKDLQAQAFAHICRENATSVSKTLPRKRMSSI

SEQ ID NO: 242583 - DNA, 2781 bp, Artificial Sequence
  derived and/or modified sequence
atggccttcctgatcatcctgatcacctgcttcgtgatcatcctggccaccagccagccctgccagacccccgacgacttcgtggccgccaccagccccggccacatcatcatcggcggcctgttcgccatccacgagaagatgctgagcagcgaggacagccccagaagaccccagatccaggagtgcgtgggcttcgagatcagcgtgttcctgcagaccctggccatgatccacagcatcgagatgatcaacaacagcaccctgctgcccggcgtgaagctgggctacgagatctacgacacctgcaccgaggtgaccgtggccatggccgccaccctgagattcctgagcaagttcaactgcagcagagagaccgtggagttcaagtgcgactacagcagctacatgcccagagtgaaggccgtgatcggcagcggctacagcgagatcaccatggccgtgagcagaatgctgaacctgcagctgatgccccaggtgggctacgagagcaccgccgagatcctgagcgacaagatcagattccccagcttcctgagaaccgtgcccagcgacttccaccagatcaaggccatggcccacctgatccagaagagcggctggaactggatcggcatcatcaccaccgacgacgactacggcagactggccctgaacaccttcatcatccaggccgaggccaacaacgtgtgcatcgccttcaaggaggtgctgcccgccttcctgagcgacaacaccatcgaggtgagaatcaacagaaccctgaagaagatcatcctggaggcccaggtgaacgtgatcgtggtgttcctgagacagttccacgtgttcgacctgttcaacaaggccatcgagatgaacatcaacaagatgtggatcgccagcgacaactggagcaccgccaccaagatcaccaccatccccaacgtgaagaagatcggcaaggtggtgggcttcgccttcagaagaggcaacatcagcagcttccacagcttcctgcagaacctgcacctgctgcccagcgacagccacaagctgctgcacgagtacgccatgcacctgagcgcctgcgcctacgtgaaggacaccgacctgagccagtgcatcttcaaccacagccagagaaccctggcctacaaggccaacaaggccatcgagagaaacttcgtgatgagaaacgacttcctgtgggactacgccgagcccggcctgatccacagcatccagctggccgtgttcgccctgggctacgccatcagagacctgtgccaggccagagactgccagaaccccaacgccttccagccctgggagctgctgggcgtgctgaagaacgtgaccttcaccgacggctggaacagcttccacttcgacgcccacggcgacctgaacaccggctacgacgtggtgctgtggaaggagatcaacggccacatgaccgtgaccaagatggccgagtacgacctgcagaacgacgtgttcatcatccccgaccaggagaccaagaacgagttcagaaacctgaagcagatccagagcaagtgcagcaaggagtgcagccccggccagatgaagaagaccaccagaagccagcacatctgctgctacgagtgccagaactgccccgagaaccactacaccaaccagaccgacatgccccactgcctgctgtgcaacaacaagacccactgggcccccgtgagaagcaccatgtgcttcgagaaggaggtggagtacctgaactggaacgacagcctggccatcctgctgctgatcctgagcctgctgggcatcatcttcgtgctggtggtgggcatcatcttcaccagaaacctgaacacccccgtggtgaagagcagcggcggcctgagagtgtgctacgtgatcctgctgtgccacttcctgaacttcgccagcaccagcttcttcatcggcgagccccaggacttcacctgcaagaccagacagaccatgttcggcgtgagcttcaccctgtgcatcagctgcatcctgaccaagagcctgaagatcctgctggccttcagcttcgaccccaagctgcagaagttcctgaagtgcctgtacagacccatcctgatcatcttcacctgcaccggcatccaggtggtgatctgcaccctgtggctgatcttcgccgcccccaccgtggaggtgaacgtgagcctgcccagagtgatcatcctggagtgcgaggagggcagcatcctggccttcggcaccatgctgggctacatcgccatcctggccttcatctgcttcatcttcgccttcaagggcaagtacgagaactacaacgaggccaagttcatcaccttcggcatgctgatctacttcatcgcctggatcaccttcatccccatctacgccaccaccttcggcaagtacgtgcccgccgtggagatcatcgtgatcctgatcagcaactacggcatcctgtactgcaccttcatccccaagtgctacgtgatcatctgcaagcaggagatcaacaccaagagcgccttcctgaagatgatctacagctacagcagccacagcgtgagcagcatcgccctgagccccgccagcctggacagcatgagcggcaacgtgaccatgaccaaccccagcagcagcggcaagagcgccacctggcagaagagcaaggacctgcaggcccaggccttcgcccacatctgcagagagaacgccaccagcgtgagcaagaccctgcccagaaagagaatgagcagcatctag

SEQ ID NO: 242584 - DNA, 2860 bp, Artificial Sequence
  derived and/or modified sequence
actgagcaaatgagatagaaacatggcattcttaattatactaattacctgctttgtgattattcttgctacttcacagccttgccagacccctgatgactttgtggctgccacttctccgggacatatcataattggaggtttgtttgctattcatgaaaaaatgttgtcctcagaagactctcccagacgaccacaaatccaggagtgtgttggctttgaaatatcagtttttcttcaaactcttgccatgatacacagcattgagatgatcaacaattcaacactcttacctggagtcaaactggggtatgaaatctatgacacttgtacagaagtcacagtggcaatggcagccactctgaggtttctttctaaattcaactgctccagagaaactgtggagtttaagtgtgactattccagctacatgccaagagttaaggctgtcataggttctgggtactcagaaataactatggctgtctccaggatgttgaatttacagctcatgccacaggtgggttatgaatcaactgcagaaatcctgagtgacaaaattcgctttccttcatttttacggactgtgcccagtgacttccatcaaattaaagcaatggctcacctgattcagaaatctggttggaactggattggcatcataaccacagatgatgactatggacgattggctcttaacacttttataattcaggctgaagcaaataacgtgtgcatagccttcaaagaggttcttccagcctttctttcagataataccattgaagtcagaatcaatcggacactgaagaaaatcattttagaagcccaggttaatgtcattgtggtatttctgaggcaattccatgtttttgatctcttcaataaagccattgaaatgaatataaataagatgtggattgctagtgataattggtcaactgccaccaagattaccaccattcctaatgttaaaaagattggcaaagttgtagggtttgcctttagaagagggaatatatcctctttccattcctttcttcaaaatctgcacttgcttcccagtgacagtcacaaactcttacatgaatatgccatgcatttatctgcctgcgcatatgtcaaggacactgatttgagtcaatgcatattcaatcattctcaaaggactttggcctacaaggctaacaaggctatagaaaggaacttcgtcatgagaaatgacttcctctgggactatgctgagccaggactcattcatagtattcagcttgcagtgtttgcccttggttatgccattcgggatctgtgtcaagctcgtgactgtcagaaccccaacgcctttcaaccatgggagttacttggtgtgctaaaaaatgtgacattcactgatggatggaattcatttcattttgatgctcacggggatttaaatactggatatgatgttgtgctctggaaggagatcaatggacacatgactgtcactaagatggcagaatatgacctacagaatgatgtcttcatcatcccagatcaggaaacaaaaaatgagttcaggaatcttaagcaaattcaatctaaatgctccaaggaatgcagtcctgggcaaatgaagaaaactacaagaagtcaacacatctgttgctatgaatgtcagaactgtcctgaaaatcattacactaatcagacagatatgcctcactgccttttatgcaacaacaaaactcactgggcccctgttaggagcactatgtgctttgaaaaggaagtggaatatctcaactggaatgactccttggccatcctactcctgattctctccctactgggaatcatatttgttctggttgttggcataatatttacaagaaacctgaacacacctgttgtgaaatcatccgggggattaagagtctgctatgtgatccttctctgtcatttcctcaattttgccagcacgagctttttcattggagaaccacaagacttcacatgtaaaaccaggcagacaatgtttggagtgagctttactctttgcatctcctgcattttgacgaagtctctgaaaattttgctagccttcagctttgatcccaaattacagaaatttctgaagtgcctctatagaccgatccttattatcttcacttgcacgggcatccaggttgtcatttgcacactctggctaatctttgcagcacctactgtagaggtgaatgtctccttgcccagagtcatcatcctggagtgtgaggagggatccatacttgcatttggcaccatgctgggctacattgccatcctggccttcatttgcttcatatttgctttcaaaggcaaatatgagaattacaatgaagccaaattcattacatttggcatgctcatttacttcatagcttggatcacattcatccctatctatgctaccacatttggcaaatatgtaccagctgtggagattattgtcatattaatatctaactatggaatcctgtattgcacattcatccccaaatgctatgttattatttgtaagcaagagattaacacaaagtctgcctttctcaagatgatctacagttattcttcccatagtgtgagcagcattgccctgagtcctgcttcactggactccatgagcggcaatgtcacaatgaccaatcccagctctagtggcaagtctgcaacctggcagaaaagcaaagatcttcaggcacaagcatttgcacacatatgcagggaaaatgccacaagtgtatctaaaactttgcctcgaaaaagaatgtcaagtatatgaataagccttaggagatgccacattccagaataaaatgtttccagggtctttgcatct

SEQ ID NO: 242585 - DNA, 2781 bp, Artificial Sequence
  derived and/or modified sequence
atggccttcctgatcatcctgattacctgtttcgttataattctggccactagtcagccatgtcagaccccagacgactttgtcgcggctacatcgccgggacacatcatcattggtgggttgtttgcaattcacgagaaaatgctgtcctcagaggattcccctcgtcggccgcagattcaggaatgtgtagggtttgagatctccgtctttcttcagacgcttgcaatgatccattcgattgagatgataaacaacagtacactgctgccgggcgtgaagctgggctatgaaatatatgacacgtgcaccgaagtcactgtcgccatggccgccaccctgaggttcttgtcaaaattcaactgcagccgggagaccgtcgagtttaagtgtgactacagcagctacatgcccagagtgaaagccgtcatcgggtctggatacagcgaaattaccatggccgtgtctcgtatgttaaatctccagttgatgccccaagtggggtatgagtctacagccgagatcttatcggacaaaatccgcttccccagcttcttgcgaacggtgccctctgattttcatcagattaaggctatggcccacttaatccaaaagtctggttggaattggatcggtattattacaacagatgacgattacggtcgcctcgctctgaacacctttataatccaggcagaggctaataatgtgtgtatcgcatttaaggaggtgctccctgcttttttgagtgataatacgattgaagtccgaattaatcgcacactcaagaagattatcctggaagcccaggtcaacgtgattgtggtctttctgcgtcagtttcacgtctttgacctatttaacaaggcgatcgagatgaacatcaataagatgtggatcgcttcagacaactggtccacagcaacaaaaataaccaccatccctaacgtcaagaaaatcggtaaggtggtcggcttcgcattccgccgcgggaatatctccagttttcactcattcctgcagaacctgcatctgcttccttccgatagccataagttactccatgagtacgctatgcacctgagtgcctgcgcctatgtgaaggacactgatttgagccaatgtatattcaaccattcccaacggaccttggcctacaaggctaacaaggctatagaaagaaatttcgtgatgaggaatgacttcctgtgggactacgccgaaccaggactgatccattccatacagctcgccgtttttgcactcggctatgcaattcgcgacctgtgtcaggccagggactgccagaatcccaacgcctttcaaccttgggagctgttaggtgtattgaaaaacgtgacattcaccgacggctggaactcttttcattttgacgcacatggggatttaaacacggggtacgacgtcgtgctctggaaagaaattaatggccatatgacagtcacaaaaatggccgagtatgacctgcaaaatgatgtatttattatcccggaccaggagactaagaacgaattccgaaaccttaagcagatacaaagcaaatgctccaaggagtgttcccccgggcagatgaaaaagaccaccagatcgcagcacatttgctgttatgaatgtcagaactgccctgagaaccactataccaatcagacagatatgccgcactgtctcctatgtaacaataaaactcactgggcccctgtgcgctctacaatgtgttttgagaaagaggtggagtacttaaattggaacgactcactcgctatcctgttgttgatcttatcgctgctcggcatcatctttgtcctggtggtcggaatcatttttacccggaatctgaacacccccgtcgtgaagagctcagggggtctgagggtgtgttacgtgatccttttatgccactttctgaacttcgcctccacctctttttttatcggggagccacaggattttacatgtaagactcgacaaacaatgtttggggtcagtttcactttatgcatttcgtgcatattaactaagtccctaaagatcctcctagccttctctttcgaccccaaacttcagaagttcctgaagtgtctctatcgaccaattctaataatcttcacctgcacagggatacaggtggtgatatgcaccctgtggcttatcttcgccgcacctaccgtggaagttaatgtgagcttaccacgcgtaatcatacttgaatgtgaagagggcagcattctagccttcggcacaatgcttggctacattgcaatactggcttttatatgttttatttttgccttcaaggggaagtatgagaactataatgaagccaaattcatcactttcggcatgctgatttacttcatcgcctggatcacattcatcccgatctatgctactacctttgggaaatatgtgccggccgtcgagattatagtaattctcatctctaattacgggatactgtattgtacattcatccctaaatgctacgtgatcatctgtaagcaggagataaatactaagagcgcatttcttaagatgatttacagctattcctcccactctgtatcgagcattgcactgtccccagcctccctcgattccatgtccggaaacgtgaccatgacaaatccatcttcctctggcaaatcagccacttggcaaaaatcaaaggacttacaggcacaagccttcgctcatatatgcagagagaacgcaacatctgtttcaaaaactctgcctagaaagaggatgtcctctatatag

SEQ ID NO: 242586 - DNA, 2781 bp, Artificial Sequence
  derived and/or modified sequence
atggccttcctgatcatcctgatcacctgctttgtgatcatcctggccaccagccagccctgccagaccccagatgactttgtggccgccaccagccctggccacatcatcatcggcggcctgtttgccatccacgagaagatgctgagcagcgaggacagcccccggcggccccagatccaggagtgtgtgggctttgagatctctgtgttcctgcagaccctggccatgatccacagcattgagatgatcaacaacagcaccctgctgcccggggtgaagctgggctatgagatctatgacacctgcacagaggtgacagtggccatggccgccaccctgcgcttcctgagcaagttcaactgcagccgggagaccgtggagttcaagtgtgactacagcagctacatgccccgggtgaaggccgtcatcggcagcggctacagcgagatcaccatggctgtgtccaggatgctgaacctgcagctgatgccccaggtgggctatgagagcacagctgagatcctgagtgacaagatccgcttccccagcttcctgaggacagtgcccagcgacttccaccagatcaaggccatggcccacctgatccagaagagcggctggaactggattggcatcatcaccacagatgatgattatggccgcctggccctgaacaccttcatcatccaggccgaggccaacaacgtgtgcatcgccttcaaggaggtgctgcctgccttcctgagtgacaacaccatcgaggtgcgcatcaacagaaccctgaagaagatcatcctggaggcccaggtgaatgtcatcgtggtgttcctgcggcagttccacgtgtttgacctcttcaacaaggccatcgagatgaacatcaacaagatgtggatcgccagtgacaactggagcacagccaccaagatcaccaccatccccaacgtgaagaagattggcaaggtggtgggctttgccttcagaagaggcaacatcagcagcttccacagcttcctgcagaacctgcacctgctgcccagcgacagccacaagctgctgcatgaatatgccatgcacctgagcgcctgtgcctacgtgaaggacacagacctgagccagtgcatcttcaaccacagccagaggaccctggcctacaaggccaacaaggccatcgagaggaactttgtgatgagaaatgacttcctgtgggactatgcagagcccggcctcatccacagcatccagctggccgtgtttgccctgggctacgccatccgggacctgtgccaggcccgggactgccagaaccccaatgccttccagccctgggagctgctgggcgtgctgaagaatgtgaccttcacagatggctggaacagcttccactttgatgcccatggagacctgaacacaggctatgatgtggtgctgtggaaggagatcaatggccacatgacagtgaccaagatggccgagtatgacctgcagaatgatgtgttcatcatcccagaccaggagaccaagaatgagttcaggaacctgaagcagatccagagcaagtgcagcaaagaatgttctcctggccagatgaagaagaccaccaggagccagcacatctgctgctatgagtgccagaactgcccagagaaccactacaccaaccagacagacatgccccactgcctgctgtgcaacaacaagacccactgggcccctgtgcgcagcaccatgtgctttgagaaggaggtggagtacctgaactggaatgacagcctggccatcctgctgctgatcctgagcctgctgggcatcatctttgtgctggtggtgggcatcatcttcaccaggaacctgaacacccctgtggtgaagagcagcggcggcctgcgggtgtgctacgtgatcctgctgtgccacttcctgaactttgccagcaccagcttcttcatcggggagccccaggacttcacctgcaagacccggcagaccatgtttggagtgtccttcaccctgtgcatcagctgcatcctgaccaagagcctgaagatcctgctggccttctcctttgaccccaagctgcagaagttcctgaagtgcctgtaccggcccatcctgatcatcttcacctgcaccggcatccaggtggtgatctgcaccctgtggctgatctttgctgcccccaccgtggaggtgaatgtgtccctgcccagggtcatcatcctggagtgtgaggagggcagcatcctggccttcggcaccatgctgggctacatcgccatcctggccttcatctgcttcatctttgccttcaagggcaagtatgagaactacaatgaggccaagttcatcaccttcggcatgctgatctacttcatcgcctggatcaccttcatccccatctatgccaccaccttcggcaagtatgtgcctgctgtggagatcatcgtcatcctgatcagcaactacggcatcctgtactgcaccttcatccccaagtgctacgtgatcatctgcaagcaggagatcaacaccaagagcgccttcctgaagatgatctacagctacagcagccacagcgtgagcagcatcgccctgagccctgccagcctggacagcatgtctggaaatgtgaccatgaccaaccccagcagcagcggcaagagcgccacctggcagaagagcaaggacctgcaggcccaggcctttgcccacatctgcagagaaaatgccacctctgtgtccaagaccctgcccaggaagaggatgagcagcatctag

SEQ ID NO: 242587 - DNA, 2781 bp, Artificial Sequence
  derived and/or modified sequence
atggccttcctgatcatcctgatcacctgcttcgtgatcatcctggcaactagtcaaccctgtcaaacccccgacgatttcgtggcggctactagtcccgggcatattatcataggtgggctctttgcgatacatgaaaaaatgctatcttcagaggatagtccgaggagaccgcagatccaggagtgtgtagggtttgagatctccgtctttctccaaacgttagccatgatccactctatagagatgataaacaactccacccttttgcccggcgttaaactggggtatgaaatatatgatacttgtaccgaagtaaccgtggccatggccgctacattacgcttcttgagcaagtttaattgtagccgagagactgtagaatttaagtgtgattactcaagttacatgccacgtgtgaaagctgtcatcggctccggttatagtgaaatcactatggccgtcagtcgaatgctcaacctgcagctgatgcctcaggtcggctacgaatccactgccgagattttgtctgataagatcagattcccgtctttcctgagaacagtgccatccgattttcaccagatcaaggcgatggcgcacttgatccagaaatcagggtggaattggatcggtataattacaaccgacgatgattacggtcgactagcgctgaacactttcatcattcaggcagaggccaacaatgtgtgcatcgcattcaaagaggtgctgcccgcctttctgtcggacaatacaattgaggtgcggatcaatcgcactttgaagaaaatcatccttgaagctcaagtgaatgtgattgtggtgttcctgcggcagttccacgttttcgacttattcaataaagcgatagaaatgaacattaacaaaatgtggatagccagcgataactggagcacggccactaagatcaccacaatacccaacgtaaaaaagatagggaaggtcgtgggatttgcctttaggagaggcaatatctccagcttccatagtttcctgcagaatcttcatctgctgccttccgactcacacaagcttctgcacgagtacgccatgcacctgtctgcctgtgcgtacgtgaaggatacagacctttcccaatgtatcttcaaccactcacagaggaccctggcctataaagctaataaagctatcgaacggaactttgtgatgagaaacgattttttatgggattatgctgaaccagggctgattcattctatccagctggccgtgtttgccctgggatacgctattagggacctgtgccaggccagagactgccaaaatccaaacgcgtttcaaccgtgggagctcctcggcgtcctaaagaacgttaccttcactgatggctggaattcctttcattttgacgcccacggagacctgaatacaggatatgacgtggtgctctggaaggagattaacggccacatgactgtgacgaagatggctgagtacgatctgcagaatgacgtatttatcatccctgatcaggaaaccaaaaacgagttccgaaacctgaaacaaattcagtcaaaatgctctaaggaatgtagcccgggtcagatgaaaaaaacaacccgaagccagcatatctgttgttatgaatgtcagaattgccctgaaaaccactataccaatcagacggacatgcctcactgtcttctctgcaacaataagacccactgggctcctgtccgcagtaccatgtgttttgagaaggaggtcgagtatctaaattggaacgattccctggctatattgcttctgatcctaagtctactcggtatcatttttgtcctcgttgtcgggattattttcacgcgaaacctcaatactcccgtggtgaaatcttccgggggcctgcgcgtctgctatgtgatcctcctgtgtcatttcttgaacttcgcctctacctccttcttcattggcgagccacaagatttcacttgtaagacaagacagactatgtttggcgtgtccttcaccctctgtatctcttgtattcttactaaaagtctcaagattcttttggcattctcatttgaccctaagctgcagaagtttctgaagtgcctgtataggcctatccttatcatcttcacctgcacagggattcaggtggtgatctgcaccctatggttgatctttgctgctcctaccgtggaagtcaacgttagccttccacgggtgatcattctggagtgcgaggagggctcaattctggccttcggcacgatgttgggttatatcgccatcctggcatttatctgcttcatctttgcttttaaaggcaagtatgagaactataatgaggccaagttcattacttttggtatgctcatttattttatcgcatggattacttttatacccatctacgcaaccactttcgggaagtatgtgccagccgttgaaattatcgtgatccttatatcaaactacggcatcctttattgtactttcatcccaaagtgttacgtgatcatctgtaagcaagagataaataccaaatccgcctttctgaagatgatttactcctactccagccatagcgtgtctagtatcgcactatctccagcgagtcttgatagtatgtccggaaatgtgaccatgaccaatccctcgtccagcggtaagagtgctacctggcagaagtcaaaagacctacaagcccaggcctttgcccacatttgcagagaaaacgcaaccagcgtctccaaaacactgccccgcaaacggatgtcatccatctag

SEQ ID NO: 242588 - DNA, 2781 bp, Artificial Sequence
  derived and/or modified sequence
atggcatttctcattatcctcattacttgcttcgttattattctggcaaccagccaaccatgtcagaccccagacgatttcgtagcagccacatcccccggacacattatcatcggagggctgtttgccattcacgaaaagatgctgtctagtgaagactctccgaggcgacctcagattcaggaatgtgtgggcttcgaaattagtgtatttcttcagacattagcaatgatccattcaatagaaatgataaacaacagcacactactgccaggtgttaaactgggctacgagatttacgacacgtgcacagaggtgacagtcgctatggccgcaactctgcggttcctgtctaagtttaattgttctcgtgaaacggtggaattcaagtgtgactacagtagctatatgcctagggtgaaagcagtcatcgggagtggatacagcgaaatcacgatggccgtgtccagaatgttaaatttgcaattgatgcctcaagtcggctatgagtccaccgctgagatcttaagcgacaagattcggtttccttcttttcttcgtaccgtgcccagcgactttcaccagatcaaggctatggcccaccttattcagaaatccgggtggaattggatcggaatcatcacaaccgacgatgactacggtagactcgccttaaacacctttattatacaggctgaggcgaacaatgtctgtatcgctttcaaggaggtcttacccgcattcctctcagacaacacaatagaagtgaggatcaatagaacccttaagaagatcatcttagaggctcaggtgaacgtgattgtggtgtttctgagacagtttcatgtgtttgacctcttcaataaggcaattgagatgaacatcaataagatgtggatcgccagcgataactggagcactgccactaaaatcaccaccatcccgaacgtcaaaaaaatcggtaaagtcgtgggattcgcatttcggagggggaacatctctagtttccacagctttttacagaacttgcatctccttccgtctgactcccataagctcctacacgaatatgccatgcacctgagcgcctgcgcctatgttaaagacaccgatctgagccagtgtattttcaatcatagtcagaggactttggcatataaagccaataaggccatcgaaaggaacttcgtgatgaggaacgactttctgtgggattatgcagagcccggactaattcatagcatacaactggccgtttttgccctgggctatgctattagggatctgtgtcaggctcgggattgccagaatcctaatgcctttcaaccatgggaactgctgggagtgctgaaaaacgttacctttactgatgggtggaacagcttccactttgacgcccatggcgacttaaacacggggtacgacgttgtcctgtggaaagaaatcaatggccacatgacagttacaaagatggctgaatacgatctgcagaacgatgtctttattattcctgatcaagagacaaagaatgaatttaggaacctcaagcaaatacagtctaagtgttccaaagagtgcagccccggacagatgaagaagactacccgctcccagcatatttgctgttacgagtgccagaattgtcctgagaaccattacaccaatcagaccgacatgccccactgcttattgtgtaataataagacacactgggcccctgtaaggtcaaccatgtgctttgaaaaagaagtcgagtacttgaactggaacgactctctagccatcctacttcttattctctcactcctggggattatattcgttctcgttgtgggaattattttcacccggaacctgaacacgcctgttgtgaagagctctggcggactccgggtgtgttacgtcatcctgttgtgccactttcttaattttgccagtacatccttcttcatcggcgagccacaggattttacctgcaaaactcgccagactatgtttggggtatccttcacactgtgcatcagttgcattctgaccaaatctttaaaaatcttgttagcctttagcttcgatccaaaactccagaagttcttgaaatgcctgtatcggccaattttaattatatttacctgcaccggtatacaagtggtcatttgcaccttatggcttattttcgcagctccaaccgtggaggtaaacgtgagcttgccccgagttattatcttggagtgtgaggaagggagcattttggcatttgggacgatgcttggatacatcgccatcctagcctttatttgctttatcttcgcattcaagggcaaatacgaaaattacaatgaagccaagttcataacattcggtatgcttatttattttatcgcctggataacttttattcctatttacgcgaccacgtttggaaagtacgtccccgcagttgaaatcattgtgatactcatcagcaattacggcatcctgtactgtaccttcatcccaaagtgttatgtcattatttgcaagcaggagatcaacacaaagagcgcattcctgaaaatgatttactcatattcctcccacagcgtcagcagcatcgccctgtctccagcaagcctcgattcgatgtctggcaatgtcactatgaccaacccaagctccagcggtaaatcagcaacatggcagaaaagcaaggatcttcaggcacaagccttcgcacatatttgccgggagaacgcgacatcggtcagcaagactttgccacgcaagaggatgagcagcatctag

SEQ ID NO: 242589 - DNA, 94 bp, Artificial Sequence
  derived and/or modified sequence
agaaattaacagcaaaagaaggatgcagtgcaactcaggacaacacatacaattcaagcaacaaatgtatagtggctgggcaccaaggatacag

SEQ ID NO: 242590 - protein, 363 aa, Artificial Sequence
  derived and/or modified sequence
MKTLLLLLLVLLELGEAQGSLHRVPLRRHPSLKKKLRARSQLSEFWKSHNLDMIQFTESCSMDQSAKEPLINYLDMEYFGTISIGSPPQNFTVIFDTGSSNLWVPSVYCTSPACKTHSRFQPSQSSTYSQPGQSFSIQYGTGSLSGIIGADQVSVEGLTVVGQQFGESVTEPGQTFVDAEFDGILGLGYPSLAVGGVTPVFDNMMAQNLVDLPMFSVYMSSNPEGGAGSELIFGGYDHSHFSGSLNWVPVTKQAYWQIALDNMLWSVPTLTSCRMSPSPLTESPIPSAQLPTPYWTSWMECSSAAVAFKDLTSTLQLGPSGSWGMSSFDSFTQSLTVGITVWDWPQQSPKEGPCVCACLSDRP

SEQ ID NO: 242591 - protein, 288 aa, Artificial Sequence
  derived and/or modified sequence
MEYFGTISIGSPPQNFTVIFDTGSSNLWVPSVYCTSPACKTHSRFQPSQSSTYSQPGQSFSIQYGTGSLSGIIGADQVSVEGLTVVGQQFGESVTEPGQTFVDAEFDGILGLGYPSLAVGGVTPVFDNMMAQNLVDLPMFSVYMSSNPEGGAGSELIFGGYDHSHFSGSLNWVPVTKQAYWQIALDNMLWSVPTLTSCRMSPSPLTESPIPSAQLPTPYWTSWMECSSAAVAFKDLTSTLQLGPSGSWGMSSFDSFTQSLTVGITVWDWPQQSPKEGPCVCACLSDRP

SEQ ID NO: 242592 - DNA, 1092 bp, Artificial Sequence
  derived and/or modified sequence
atgaagactctgctactgctcctcttggtgctgcttgaattgggagaggcacagggatctctgcaccgggtgccactgagaaggcacccttctttgaaaaaaaagctgagagctcggagccaactgtccgagttctggaaaagccataacctggatatgatccaattcacagaatcatgtagcatggaccaatctgcaaaggaacctctgataaactacctcgatatggaatactttggcacaatctctataggatcccccccccaaaatttcacagtcattttcgacaccggtagtagcaatttgtgggtgcctagcgtctattgcaccagtcccgcatgtaaaacccactctagatttcaaccgtcacagtcttctacgtatagtcagcccggtcaaagcttttccattcaatatggcacagggtccctgagcggaatcatcggtgcagaccaagtgagtgtggagggcctgaccgtggtcggacaacagtttggtgagtccgtgacagagcccggacagacctttgttgacgcggagtttgacgggatcctcggacttggctatccttctttggccgtcgggggggtgaccccagtgtttgacaacatgatggcacagaacctggtggacctccccatgttttcagtttatatgtccagcaatccggagggaggagccggcagcgagttaatcttcgggggctatgatcactctcacttctctggaagcctgaattgggtgcctgttacaaaacaggcctattggcagattgccctagataacatgctgtggtccgtgccaaccctcacaagctgtcgtatgtcaccttcacccttgaccgagtcccctattcctagcgcacagctgcctactccatattggacatcctggatggagtgtagttcagctgccgtcgcttttaaggacctgacatccactctgcagttaggccccagcggatcttgggggatgagctcctttgactctttcactcagagcctcacggttggcattacagtgtgggactggcctcagcagagcccaaaagagggtccctgtgtttgcgcttgtctgtcagatcgtccctag

SEQ ID NO: 242593 - DNA, 1092 bp, Artificial Sequence
  derived and/or modified sequence
atgaagaccctgctgctgctgctgctggtgctgctggagctgggggaggcccagggcagcctgcaccgggtgcccctgcggcggcaccccagcctgaagaagaagctgcgggcccggagccagctgtctgagttctggaagagccacaacctggacatgatccagttcacagagagctgcagcatggaccagagcgccaaggagcccctcatcaactacctggacatggagtacttcggcaccatcagcatcggcagccccccccagaacttcaccgtcatctttgacaccggcagcagcaacctgtgggtgcccagcgtgtactgcaccagccctgcctgcaagacccacagccgcttccagcccagccagagcagcacctacagccagcccggccagagcttcagcatccagtatggaacaggcagcctgagcggcatcatcggggctgaccaggtgtctgtggagggcctgactgtggtgggccagcagtttggagagagcgtgacagagcccggccagacctttgtggatgctgagtttgatggcatcctgggcctgggctaccccagcctggccgtgggcggcgtgacccctgtgtttgacaacatgatggcccagaacctggtggacctgcccatgttttctgtgtacatgagcagcaaccctgagggcggggccggcagcgagctgatctttggaggctatgaccacagccacttcagcggcagcctgaactgggtgcctgtgaccaagcaggcctactggcagatcgccctggacaacatgctgtggagcgtgcccaccctgaccagctgcaggatgagccccagccccctgacagagagccccatccccagcgcccagctgcccaccccctactggacctcctggatggagtgcagcagcgctgctgtggccttcaaggacctgaccagcaccctgcagctgggccccagcggctcctggggcatgagcagctttgacagcttcacccagagcctgactgtgggcatcaccgtgtgggactggccccagcagagccccaaggagggcccctgtgtgtgtgcctgcctgagtgaccggccctag

SEQ ID NO: 242594 - DNA, 1092 bp, Artificial Sequence
  derived and/or modified sequence
atgaagaccctgctgctgctgctgctggtgctgctggagctgggcgaggctcagggaagcttacaccgcgtccctcttcgccggcacccctccctgaaaaaaaagctgcgagcaaggtctcagctctctgagttttggaagtcccataatctggatatgattcaatttacagaatcctgttcaatggatcagagtgccaaggaaccgctgattaattacctggacatggagtatttcggaacaatctccattggatctcctccgcagaacttcactgttatcttcgataccgggagcagcaacctttgggtcccttccgtttattgcacctctccagcgtgtaaaacacactcccgattccaaccatcccagagcagcacctatagtcagcccggccagagctttagcattcaatacggcacgggctcattgtctgggatcattggtgctgaccaagtcagcgtcgagggattaacggtggtgggtcaacaattcggcgagagcgtgactgagccgggccagacttttgtcgacgctgagttcgatggtatcctagggcttggctatcctagcctcgctgtgggcggtgtgacacctgtgttcgacaatatgatggctcagaaccttgtggacctgcccatgttcagtgtctacatgagttcaaacccggagggcggagctggatccgagctgatctttgggggatatgatcacagtcatttctcagggtcgctgaattgggtgcccgtgacgaagcaggcttattggcagattgcattagataacatgctgtggtctgttcccacattgacttcttgccgcatgtcaccctcacctcttacagagtcaccaattccatccgcccagctgcctactccctactggacctcatggatggagtgcagctccgcggccgtggcctttaaggatctgacatccactctgcaattaggcccctccgggagttgggggatgtcaagctttgacagtttcactcaatccctaacagtcggtataaccgtctgggattggccccagcagtcccctaaggagggaccttgcgtctgtgcctgtttgtctgacagaccctag

SEQ ID NO: 242595 - DNA, 1092 bp, Artificial Sequence
  derived and/or modified sequence
atgaaaactctgctgctgctcctgctggtgctgctggagttaggggaggcccaaggctcactgcatcgggtgcccctccgacgtcatccaagtttaaagaaaaagctgcgcgcacggtcccagcttagcgagttttggaagtcccataatctggatatgatccagttcaccgaatcttgcagcatggatcagagtgccaaggagcctctgattaattatctcgatatggagtattttggcactattagcatcgggtcacccccacagaactttaccgtgatctttgataccggcagcagcaacctgtgggtgccaagtgtatactgtacatctccggcttgtaagacccactctaggttccagccttctcaatcctccacatattctcagcccggtcagagcttttcaatccagtacggcaccggaagcctgtccggaattatcggcgcagatcaggtgagtgtggagggtctgacagtggtgggtcagcagtttggcgagtccgtaactgagcctgggcagactttcgtggatgccgagtttgatggcatcctgggattagggtatccttccctggcagtcggaggtgtcacccccgttttcgataacatgatggctcagaatctggtggacctgccgatgttctctgtgtatatgtctagtaacccagagggtggggcaggatctgagctgatctttggtggctacgaccatagccatttttctgggagcctgaattgggtgcccgttactaaacaggcctactggcagattgcgctcgataacatgctgtggtctgtgccaacactgacgtcatgtcgcatgagcccgtctccccttaccgagagccccatcccttcagctcagctgcctactccctactggacaagctggatggaatgttccagtgctgccgtcgccttcaaagaccttacttcgaccctgcaactgggacctagcgggagctgggggatgagtagctttgatagtttcacgcagagcctgaccgtaggaattaccgtgtgggattggcctcaacagagcccaaaggaagggccttgcgtgtgtgcatgtctgtcggatcgaccatag

SEQ ID NO: 242596 - DNA, 2071 bp, Artificial Sequence
  derived and/or modified sequence
agactgggctgggcaggtctgagagttagggaaagtccgttcccactgccctcggggagagaagaaaggagggggcaagggagaagctgctggtcggactcacaatgaaaacgctccttcttttgctgctggtgctcctggagctgggagaggcccaaggatcccttcacagggtgcccctcaggaggcatccgtccctcaagaagaagctgcgggcacggagccagctctctgagttctggaaatcccataatttggacatgatccagttcaccgagtcctgctcaatggaccagagtgccaaggaacccctcatcaactacttggatatggaatacttcggcactatctccattggctccccaccacagaacttcactgtcatcttcgacactggctcctccaacctctgggtcccctctgtgtactgcactagcccagcctgcaagacgcacagcaggttccagccttcccagtccagcacatacagccagccaggtcaatctttctccattcagtatggaaccgggagcttgtccgggatcattggagccgaccaagtctctgtggaaggactaaccgtggttggccagcagtttggagaaagtgtcacagagccaggccagacctttgtggatgcagagtttgatggaattctgggcctgggatacccctccttggctgtgggaggagtgactccagtatttgacaacatgatggctcagaacctggtggacttgccgatgttttctgtctacatgagcagtaacccagaaggtggtgcggggagcgagctgatttttggaggctacgaccactcccatttctctgggagcctgaattgggtcccagtcaccaagcaagcttactggcagattgcactggataatatgctgtggagtgtgccaaccttaacgtcatgccggatgtcaccttcaccattaacggagtcccctataccctcagcccaactgcctacaccctactggacttcgtggatggaatgcagttctgcagcagtggctttcaaggacttgacatccaccctccagctgggcccctctggatcctgggggatgtcttcattcgacagttttactcagtctttgaccgtgggaataaccgtgtgggactggccccagcagtcccctaaggaggggccttgtgtctgtgcctgcctgtctgacagaccttgaatatgttaggctggggcattctttacacctacaaaaagttattttccagagaatgtagctgtttccagggttgcaacttgaattaagaccaaacagaacatgagaatacacacacacacacacatatacacacacacacacttcacacatacacaccactcccaccaccgtcatgatggaggaattacgttatacattcatattttgtattgatttttgattatgaaaatcaaaaattttcacatttgattatgaaaatctccaaacatatgcacaagcagagatcatggtataataaatccctttgcaactccactcagccctgacaacccatccacacacggccaggcctgtttatctacactgctgcccactcctctctccagctccacatgctgtacctggatcattctgaagcaaattccgagcattacatcattttgtccataaatatttctaacatccttaaatatacaatcggaattcaagcatctcccattgtcccacaaatgtttggctgtttttgtagttggattgtttgtattaggattcaagcaaggcccatatattgcatttatttgaaatgtctgtaagtctctttccatctacagagtttagcacatttgaacgttgctggttgaaatcccgaggtgtcatttgacatggttctctgaacttatctttcctataaaatggtagttagatctggaggtctgattttgtggcaaaaatacttcctaggtggtgctgggtacttcttgttgcatcctgtcaggaggcagataatgctggtgcctctctattggtaatgttaagactgctgggtgggtttggagttcttggctttaatcattcattacaaagttcagcatttt

SEQ ID NO: 242597 - DNA, 1092 bp, Artificial Sequence
  derived and/or modified sequence
atgaagaccctgctgctgctgctgctggtgctgctggagctgggcgaggcccagggcagcctgcacagagtgcccctgagaagacaccccagcctgaagaagaagctgagagccagaagccagctgagcgagttctggaagagccacaacctggacatgatccagttcaccgagagctgcagcatggaccagagcgccaaggagcccctgatcaactacctggacatggagtacttcggcaccatcagcatcggcagccccccccagaacttcaccgtgatcttcgacaccggcagcagcaacctgtgggtgcccagcgtgtactgcaccagccccgcctgcaagacccacagcagattccagcccagccagagcagcacctacagccagcccggccagagcttcagcatccagtacggcaccggcagcctgagcggcatcatcggcgccgaccaggtgagcgtggagggcctgaccgtggtgggccagcagttcggcgagagcgtgaccgagcccggccagaccttcgtggacgccgagttcgacggcatcctgggcctgggctaccccagcctggccgtgggcggcgtgacccccgtgttcgacaacatgatggcccagaacctggtggacctgcccatgttcagcgtgtacatgagcagcaaccccgagggcggcgccggcagcgagctgatcttcggcggctacgaccacagccacttcagcggcagcctgaactgggtgcccgtgaccaagcaggcctactggcagatcgccctggacaacatgctgtggagcgtgcccaccctgaccagctgcagaatgagccccagccccctgaccgagagccccatccccagcgcccagctgcccaccccctactggaccagctggatggagtgcagcagcgccgccgtggccttcaaggacctgaccagcaccctgcagctgggccccagcggcagctggggcatgagcagcttcgacagcttcacccagagcctgaccgtgggcatcaccgtgtgggactggccccagcagagccccaaggagggcccctgcgtgtgcgcctgcctgagcgacagaccctag

SEQ ID NO: 242598 - protein, 68 aa, Artificial Sequence
  derived and/or modified sequence
MHQTYSRHCRPEERWSQEGWNIPANGFNICRCLNIGMKLRLWNNLNKSNILGALKIKRREIRAPFLLP

SEQ ID NO: 242599 - protein, 239 aa, Artificial Sequence [sequence omitted]

SEQ ID NO: 242600 - protein, 220 aa, Artificial Sequence
  derived and/or modified sequence
MTTMQGMEQAMPGAGPGVPQLGNMAVIHSHLWKGLQEKFLKGEPKVLGVVQILTALMSLSMGITMMCMASNTYGSNPISVYIGYTIWGSVMFIISGSLSIAAGIRTTKGLVRGSLGMNITSSVLAASGILINTFSLAFYSFHHPYCNYYGNSNNCHGTMSILMGLDGMVLLLSVLEFCIAVSLSAFGCKVLCCTPGGVVLILPSHSHMAETASPTPLNEV

SEQ ID NO: 242601 - DNA, 720 bp, Artificial Sequence
  derived and/or modified sequence
atgcatcagacttactcacgacattgtaggccagaagaatcaacattctccgctgctatgactactatgcaaggcatggagcaggccatgcccggtgctggaccaggggttccacagctcgggaatatggccgtcatacactctcacctgtggaaaggacttcaggaaaagttcctgaagggggaaccaaaagtccttggagttgtgcagatcctaaccgcgcttatgtccctgagcatgggaattacgatgatgtgcatggcttcaaacacctacggctcaaatcctataagtgtgtacatcggctatactatctggggtagcgtgatgttcatcataagcggaagtctgtccatcgccgcaggaatccgcacgacaaaaggactggtgcgcgggagccttggcatgaacataacgtcatcagtcctggccgcatctgggattctgatcaacacgttttcactcgccttttattcctttcatcacccatactgcaactattatggaaatagtaataattgtcacggcacaatgagtattctaatgggacttgacggtatggtgttgttactgtctgtccttgagttttgtatcgcagtgtcactttccgccttcgggtgtaaggtcctctgctgcactccagggggtgtcgtgctgatcctgcctagtcactcacacatggccgagacagcgtcaccaaccccacttaacgaagtctag

SEQ ID NO: 242602 - DNA, 720 bp, Artificial Sequence
  derived and/or modified sequence
atgcaccagacctacagccgccactgcaggcctgaggagagcaccttctctgctgccatgaccaccatgcagggcatggagcaggccatgcctggagctggccctggggtgccccagctgggcaacatggccgtcatccacagccacctgtggaagggcctgcaggagaagttcctgaagggggagcccaaggtgctgggcgtggtgcagatcctgacagccctgatgagcctgtccatgggcatcaccatgatgtgcatggccagcaacacctacggcagcaaccccatctctgtgtacatcggctacaccatctggggctctgtgatgttcatcatcagcggcagcctgagcattgctgctggcatccgcaccaccaagggcctggtgcggggcagcctgggcatgaacatcaccagctctgtgctggccgccagcggcatcctgatcaacaccttcagcctggccttctacagcttccaccacccctactgcaactactacggcaacagcaacaactgccacggcaccatgagcatcctgatgggcctggatggcatggtgctgctgctgtctgtgctggagttctgcatcgctgtgtccctgagcgccttcggctgcaaggtgctgtgctgcacccctgggggcgtggtgctgatcctgcccagccacagccacatggccgagacagccagccccacccccctgaatgaggtgtag

SEQ ID NO: 242603 - DNA, 1676 bp, Artificial Sequence
  derived and/or modified sequence
gaacttgcccagagccctgcatgcatcagacctacagcagacattgcaggcctgaagaaaggtggtcacaagaggggtggaacattcctgcaaatggtttcaatatatgcagatgtctcaatataggaatgaaattacgtctttggaacaacttaaataagtcaaatatacttggagctttaaaaattaaaaggagagagattcgagcaccttttctgctgccatgacaaccatgcaaggaatggaacaggccatgccaggggctggccctggtgtgccccagctgggaaacatggctgtcatacattcacatctgtggaaaggattgcaagagaagttcttgaagggagaacccaaagtccttggggttgtgcagattctgactgccctgatgagccttagcatgggaataacaatgatgtgtatggcatctaatacttatggaagtaaccctatttccgtgtatatcgggtacacaatttgggggtcagtaatgtttattatttcaggatccttgtcaattgcagcaggaattagaactacaaaaggcctggtccgaggtagtctaggaatgaatatcaccagctctgtactggctgcatcagggatcttaatcaacacatttagcttggcgttttattcattccatcacccttactgtaactactatggcaactcaaataattgtcatgggactatgtccatcttaatgggtctggatggcatggtgctcctcctaagtgtgctggaattctgcattgctgtgtccctctctgcctttggatgtaaagtgctctgttgtacccctggtggggttgtgttaattctgccatcacattctcacatggcagaaacagcatctcccacaccacttaatgaggtttgaggccaccaaaagatcaacagacaaatgctccagaaatctatgctgactgtgacacaagagcctcacatgagaaattaccagtatccaacttcgatactgatagacttgttgatattattattatatgtaatccaattatgaactgtgtgtgtatagagagataataaattcaaaattatgttctcatttttttccctggaactcaataactcatttcactggctctttatcgagagtactagaagttaaattaataaataatgcatttaatgaggcaacagcacttgaaagtttttcattcatcataagaactttatataaaggcattacattggcaaataaggtttggaagcagaagagcaaaaaaaagatattgttaaaatgaggcctccatgcaaaacacatacttccctcccatttatttaactttttttttctcctacctatggggaccaaagtgctttttccttcaggaagtggagatgcatggccatctccccctccctttttccttctcctgcttttctttccccatagaaagtaccttgaagtagcacagcccgtccttgcatgtgcacgagctatcatttgagtaaaagtatacatggagtaaaaatcatattaagcatcagattcaacttatattttctatttcatcttcttcctttcccttctcccaccttctactgggcataattatatcttaatcatatatggaaatgtgcaacatatggtatttgttaaatacgtttgtttttattgcagagcaaaaataaatcaaattagaagc

SEQ ID NO: 242604 - DNA, 1604 bp, Artificial Sequence
  derived and/or modified sequence
aatgcagatttaaactgagtgaggtgtggagtgggggaagttgattgggtctagaccaaagaactttgaggaacttgcccagagccctgcatgcatcagacctacagcagacattgcaggcctgaagaaagcaccttttctgctgccatgacaaccatgcaaggaatggaacaggccatgccaggggctggccctggtgtgccccagctgggaaacatggctgtcatacattcacatctgtggaaaggattgcaagagaagttcttgaagggagaacccaaagtccttggggttgtgcagattctgactgccctgatgagccttagcatgggaataacaatgatgtgtatggcatctaatacttatggaagtaaccctatttccgtgtatatcgggtacacaatttgggggtcagtaatgtttattatttcaggatccttgtcaattgcagcaggaattagaactacaaaaggcctggtccgaggtagtctaggaatgaatatcaccagctctgtactggctgcatcagggatcttaatcaacacatttagcttggcgttttattcattccatcacccttactgtaactactatggcaactcaaataattgtcatgggactatgtccatcttaatgggtctggatggcatggtgctcctcctaagtgtgctggaattctgcattgctgtgtccctctctgcctttggatgtaaagtgctctgttgtacccctggtggggttgtgttaattctgccatcacattctcacatggcagaaacagcatctcccacaccacttaatgaggtttgaggccaccaaaagatcaacagacaaatgctccagaaatctatgctgactgtgacacaagagcctcacatgagaaattaccagtatccaacttcgatactgatagacttgttgatattattattatatgtaatccaattatgaactgtgtgtgtatagagagataataaattcaaaattatgttctcatttttttccctggaactcaataactcatttcactggctctttatcgagagtactagaagttaaattaataaataatgcatttaatgaggcaacagcacttgaaagtttttcattcatcataagaactttatataaaggcattacattggcaaataaggtttggaagcagaagagcaaaaaaaagatattgttaaaatgaggcctccatgcaaaacacatacttccctcccatttatttaactttttttttctcctacctatggggaccaaagtgctttttccttcaggaagtggagatgcatggccatctccccctccctttttccttctcctgcttttctttccccatagaaagtaccttgaagtagcacagcccgtccttgcatgtgcacgagctatcatttgagtaaaagtatacatggagtaaaaatcatattaagcatcagattcaacttatattttctatttcatcttcttcctttcccttctcccaccttctactgggcataattatatcttaatcatatatggaaatgtgcaacatatggtatttgttaaatacgtttgtttttattgcagagcaaaaataaatcaaattagaagcaata

SEQ ID NO: 242605 - DNA, 1596 bp, Artificial Sequence
  derived and/or modified sequence
aacattcctgcaaatggtttcaatatatgcagatgtctcaatataggaatgaaattacgtctttggaacaacttaaataagtcaaatatacttggagctttaaaaattaaaaggagagagattcgagcaccttttctgctgccatgacaaccatgcaaggaatggaacaggccatgccaggggctggccctggtgtgccccagctgggaaacatggctgtcatacattcacatctgtggaaaggattgcaagagaagttcttgaagggagaacccaaagtccttggggttgtgcagattctgactgccctgatgagccttagcatgggaataacaatgatgtgtatggcatctaatacttatggaagtaaccctatttccgtgtatatcgggtacacaatttgggggtcagtaatgtttattatttcaggatccttgtcaattgcagcaggaattagaactacaaaaggcctggtccgaggtagtctaggaatgaatatcaccagctctgtactggctgcatcagggatcttaatcaacacatttagcttggcgttttattcattccatcacccttactgtaactactatggcaactcaaataattgtcatgggactatgtccatcttaatgggtctggatggcatggtgctcctcctaagtgtgctggaattctgcattgctgtgtccctctctgcctttggatgtaaagtgctctgttgtacccctggtggggttgtgttaattctgccatcacattctcacatggcagaaacagcatctcccacaccacttaatgaggtttgaggccaccaaaagatcaacagacaaatgctccagaaatctatgctgactgtgacacaagagcctcacatgagaaattaccagtatccaacttcgatactgatagacttgttgatattattattatatgtaatccaattatgaactgtgtgtgtatagagagataataaattcaaaattatgttctcatttttttccctggaactcaataactcatttcactggctctttatcgagagtactagaagttaaattaataaataatgcatttaatgaggcaacagcacttgaaagtttttcattcatcataagaactttatataaaggcattacattggcaaataaggtttggaagcagaagagcaaaaaaaagatattgttaaaatgaggcctccatgcaaaacacatacttccctcccatttatttaactttttttttctcctacctatggggaccaaagtgctttttccttcaggaagtggagatgcatggccatctccccctccctttttccttctcctgcttttctttccccatagaaagtaccttgaagtagcacagcccgtccttgcatgtgcacgagctatcatttgagtaaaagtatacatggagtaaaaatcatattaagcatcagattcaacttatattttctatttcatcttcttcctttcccttctcccaccttctactgggcataattatatcttaatcatatatggaaatgtgcaacatatggtatttgttaaatacgtttgtttttattgcagagcaaaaataaatcaaattagaagc

SEQ ID NO: 242606 - DNA, 720 bp, Artificial Sequence
  derived and/or modified sequence
atgcaccagacctacagccggcactgccggcccgaggagagcaccttttcagccgcaatgacaaccatgcaaggcatggagcaggccatgcctggggccggccccggcgtgcctcaactgggaaatatggctgtcattcactcgcatttgtggaagggcttgcaggagaagtttcttaagggtgagccaaaggtgttgggcgtggtgcagatactgacggcactgatgagtctatcaatgggcatcaccatgatgtgtatggcctccaacacatacggatccaatccaatttcagtctacatcgggtacaccatctggggctccgttatgttcatcattagcgggtccctgtctatcgccgccggcataaggaccacgaaagggctggtgaggggctctttggggatgaatattacctcaagcgtcctagctgcctccggcattctcattaacaccttctctctggccttttatagctttcaccatccttattgtaattattacgggaattctaacaattgtcacggtaccatgtccatccttatgggcctggatggtatggtgctgcttctgagcgtgctggaattttgcatcgcagtttccctatccgcatttggttgtaaagtcttgtgctgcacaccaggcggcgttgtactcattctgccctctcactcccacatggctgagaccgcatccccaactccactcaatgaggtgtag

SEQ ID NO: 242607 - DNA, 720 bp, Artificial Sequence
  derived and/or modified sequence
atgcaccaaacatatagtcggcattgtaggcctgaggaatctactttctcagcagccatgactactatgcaaggaatggagcaagcgatgccgggagctggaccaggtgtgccacagctgggaaacatggcagtcatccactcgcatttgtggaaagggctgcaggagaaatttctcaagggcgagccaaaggtgctgggggtcgtacaaatcctcacagccttaatgagcttatcaatgggaatcactatgatgtgcatggcgtctaatacatacgggtccaacccaatttcagtgtatatcggctatacaatctggggctctgtgatgttcatcatttctggatccttgtcaatcgcagccggtatccggactaccaagggactcgtacgcggatcacttggcatgaacatcacttcttccgtgcttgctgctagcggcatcctcattaatacgttcagcctcgccttctacagttttcaccatccttactgcaattactacggaaactccaataactgccatggaacaatgtcaatcctaatgggacttgatggaatggtgctgctgttgagcgtcttggaattctgcatcgctgtaagtctctctgcgttcggctgcaaggtgctgtgctgtacacctggtggcgtggtgcttatactgccgagccattcacacatggcagagacagcctcacccacccctctgaacgaggtctag

SEQ ID NO: 242608 - DNA, 720 bp, Artificial Sequence
  derived and/or modified sequence
atgcaccagacctacagcagacactgcagacccgaggagagcaccttcagcgccgccatgaccaccatgcagggcatggagcaggccatgcccggcgccggccccggcgtgccccagctgggcaacatggccgtgatccacagccacctgtggaagggcctgcaggagaagttcctgaagggcgagcccaaggtgctgggcgtggtgcagatcctgaccgccctgatgagcctgagcatgggcatcaccatgatgtgcatggccagcaacacctacggcagcaaccccatcagcgtgtacatcggctacaccatctggggcagcgtgatgttcatcatcagcggcagcctgagcatcgccgccggcatcagaaccaccaagggcctggtgagaggcagcctgggcatgaacatcaccagcagcgtgctggccgccagcggcatcctgatcaacaccttcagcctggccttctacagcttccaccacccctactgcaactactacggcaacagcaacaactgccacggcaccatgagcatcctgatgggcctggacggcatggtgctgctgctgagcgtgctggagttctgcatcgccgtgagcctgagcgccttcggctgcaaggtgctgtgctgcacccccggcggcgtggtgctgatcctgcccagccacagccacatggccgagaccgccagccccacccccctgaacgaggtgtag

SEQ ID NO: 242609 - protein, 269 aa, Artificial Sequence
  derived and/or modified sequence
MQLSKVKFRNQYDNDVTVWSPQGRIHQIEYAMEAVKQGSATVGLKSKTHAVLVALKRAQSELAAHQKKILHVDNHIGISIAGLTADARLLCNFMRQECLDSRFVFDRPLPVSRLVSLIGSKTQIPTQRYGRRPYGVGLLIAGYDDMGPHIFQTCPSANYFDCRAMSIGARSQSARTYLERHMSEFMECNLNELVKHGLRALRETLPAEQDLTTKNVSIGIVGKDLEFTIYDDDDVSPFLEGLEERPQRKAQPAQPADEPAEKADEPMEH

SEQ ID NO: 242610 - DNA, 810 bp, Artificial Sequence
  derived and/or modified sequence
atgcagctgtctaaagtgaagttccgcaatcaatacgacaacgatgttacggtctggtcccctcagggtaggatccatcagattgaatacgcaatggaggcggtgaagcagggctccgccaccgtcggccttaagagcaagacccacgcagtgctcgtggctttgaagagagcccagtctgagctggccgcccaccaaaagaagatcctacacgtggataatcatatcggcatttcgattgccgggttgaccgcagacgcccgcctgctgtgcaattttatgcgtcaagagtgtctcgactcccgctttgtgtttgatcgaccccttcctgtctccaggctcgtgagtcttattggaagtaaaacccaaatcccaactcagaggtacggtagacgcccttatggcgtcgggctactcattgctggctacgatgacatggggcctcacattttccagacttgtccatctgcgaactactttgattgtagggccatgtcaatcggcgctcgatcacagtccgcgcgtacctatttggaaaggcatatgtctgagttcatggagtgtaatttgaatgaactggtcaaacatggccttagagccctgcgagagacactgccggcagagcaggatctgactaccaagaacgtctcgataggaattgtgggtaaggacctggagttcacaatctacgacgatgatgacgtaagccctttcctggagggcctggaggagcggccccaacggaaagctcagcccgctcagcctgcagatgagcccgcagagaaagctgatgaacccatggagcactag

SEQ ID NO: 242611 - DNA, 810 bp, Artificial Sequence
  derived and/or modified sequence
atgcagctgagcaaggtgaagttcaggaaccagtatgacaatgatgtgacagtgtggagcccccagggccgcatccaccagatcgagtatgccatggaggccgtgaagcagggcagcgccaccgtgggcctgaagagcaagacccatgctgtgctggtggccctgaagagggcccagagcgagctggccgcccaccagaagaagatcctgcacgtggacaaccacatcggcatcagcattgctggcctgacagcagatgcccggctgctgtgcaacttcatgaggcaggagtgcctggacagcagatttgtgtttgaccggcccctgcctgtgtcccggctggtgtccctcatcggcagcaagacccagatccccacccagagatatggaagaagaccctacggcgtgggcctgctgattgctggctatgatgacatgggcccccacatcttccagacctgccccagcgccaactactttgactgccgggccatgagcattggagcccggagccagagcgcccggacctacctggagcggcacatgtctgagttcatggagtgcaacctgaatgagctggtgaagcacggcctgcgggccctgcgggagaccctgcctgctgagcaggacctgaccaccaagaatgtgtccatcggcatcgtgggcaaggacctggagttcaccatctatgatgatgatgatgtgagccccttcctggagggcctggaggagcggccccagaggaaggcccagcctgcccagcctgcagatgagcctgctgagaaggcagatgagcccatggagcactag

SEQ ID NO: 242612 - DNA, 810 bp, Artificial Sequence
  derived and/or modified sequence
atgcagctgagcaaggtgaagttccggaaccagtacgacaacgacgtgactgtgtggtccccccagggacggattcaccagattgaatacgctatggaggccgtcaaacagggatccgctactgttggattaaagtccaaaacccacgctgtactggtggctctgaaacgcgcccagagcgagctggctgctcaccagaagaagattttacacgtggacaaccacattgggatttccatagcagggctgaccgccgatgctaggctcctttgtaattttatgaggcaggagtgcttagacagcagattcgtgttcgatcggcctctacctgtatctcggctggtcagcctaattggcagcaagacccagatcccaacacagcggtatggtaggagaccatacggagtgggcctcttaatagcgggctacgatgacatgggaccccacattttccagacctgcccatctgccaactatttcgactgccgcgccatgagtatcggagcgcgaagtcaaagtgctcgtacatatttagagcgacatatgtcagaatttatggaatgcaacctgaatgaactcgtcaagcatggcctgagagctctgcgggaaaccctgcccgctgaacaggacttgaccacaaagaatgtgtctatcgggatagtcggaaaggatctcgagtttacaatatatgatgatgatgatgtgtctccttttctcgaaggtctcgaagagagacctcagagaaaagcccagcccgcacagccggccgatgaacctgcagaaaaggcagacgagccaatggagcactag

SEQ ID NO: 242613 - DNA, 810 bp, Artificial Sequence
  derived and/or modified sequence
atgcaattgtctaaggtaaaattccgaaaccagtacgacaacgatgttactgtctggtccccgcagggtcggatccaccaaatcgagtacgcaatggaggcagtcaagcagggctctgctaccgtcggtctcaaatctaaaacgcatgccgtgctcgtagctttgaagcgggctcagtcagagctcgccgcacatcagaaaaaaattctccatgtcgataatcacatcggtattagtatcgccggactgaccgcggacgctagactcctctgcaattttatgcgccaggaatgcctcgatagtcggtttgtattcgacaggccgctaccggtcagccggttggtgtccctgatcggctcaaaaacgcagatacctacccagcgatatgggagaagaccatacggtgtgggacttttgatagccggttatgacgatatggggccacacatatttcaaacatgtcccagcgccaactactttgactgtcgggcaatgtccatcggagcgagaagccaatctgcacgcacttatttggagcggcacatgagcgaattcatggaatgtaatttaaacgagctagtgaagcacggccttagggccctcagagaaactctgcccgctgaacaggatctcacaactaagaatgtctccatcggaattgttggtaaagatctggaattcaccatttatgatgacgacgatgtgagtccttttttggaagggctggaggaacgaccccaaaggaaagcacagcccgctcaaccagcagacgagccagcagagaaggcggatgagcccatggagcattag

SEQ ID NO: 242614 - DNA, 1266 bp, Artificial Sequence
  derived and/or modified sequence
cgcgagccgggaccacgccgacccagcgtgcccaggccgaggaaagcgcggcggcggcagtccgaagacccaccgggactgaaagagaaggacgaggtcatcttcggacgggaggggcaagccagccatcctgggaccccaggcgtgcaggttctctttgagggtattccaccctgcaaaaagcatgtattcatggtcagctctcagcaaggccagtagcagagtggtaaaggccttggccctccaaggctgggaaaagacaatgacaagtcaaatccagacctatgttgtatgttggtctactaggtgactgtctcctggaaatgttatgcagctcagcaaggtgaagtttcgaaatcagtatgacaatgatgtcactgtttggagcccccagggcaggattcatcaaattgaatatgcaatggaagctgttaaacaaggttcagccacagttggtctgaaatcaaaaactcatgcagttttggttgcattgaaaagggcgcaatcagagcttgcagctcatcagaaaaaaattctccatgttgacaaccatattggtatctcaattgcggggcttactgctgatgctagactgttatgtaattttatgcgtcaggagtgtttggattccagatttgtattcgatagaccactgcctgtgtctcgtcttgtatctctaattggaagcaagacccagataccaacacaacgatatggccggagaccatatggtgttggtctccttattgctggttatgatgatatgggccctcacattttccaaacctgtccatctgctaactattttgactgcagagccatgtccattggagcccgttcccaatcagctcgtacttacttggagagacatatgtctgaatttatggagtgtaatttaaatgaactagttaaacatggtctgcgtgccttaagagagacgcttcctgcagaacaggacctgactacaaagaatgtttccattggaattgttggtaaagacttggagtttacaatctatgatgatgatgatgtgtctccattcctggaaggtcttgaagaaagaccacagagaaaggcacagcctgctcaacctgctgatgaacctgcagaaaaggctgatgaaccaatggaacattaagtgataagccagtctatatatgtattatcaaatatgtaagaatacaggcaccacatactgatgacaataatctatactttgaaccaaaagttgcagagtggtggaatgctatgttttaggaatcagtc

SEQ ID NO: 242615 - DNA, 810 bp, Artificial Sequence
  derived and/or modified sequence
atgcagctgagcaaggtgaagttcagaaaccagtacgacaacgacgtgaccgtgtggagcccccagggcagaatccaccagatcgagtacgccatggaggccgtgaagcagggcagcgccaccgtgggcctgaagagcaagacccacgccgtgctggtggccctgaagagagcccagagcgagctggccgcccaccagaagaagatcctgcacgtggacaaccacatcggcatcagcatcgccggcctgaccgccgacgccagactgctgtgcaacttcatgagacaggagtgcctggacagcagattcgtgttcgacagacccctgcccgtgagcagactggtgagcctgatcggcagcaagacccagatccccacccagagatacggcagaagaccctacggcgtgggcctgctgatcgccggctacgacgacatgggcccccacatcttccagacctgccccagcgccaactacttcgactgcagagccatgagcatcggcgccagaagccagagcgccagaacctacctggagagacacatgagcgagttcatggagtgcaacctgaacgagctggtgaagcacggcctgagagccctgagagagaccctgcccgccgagcaggacctgaccaccaagaacgtgagcatcggcatcgtgggcaaggacctggagttcaccatctacgacgacgacgacgtgagccccttcctggagggcctggaggagagaccccagagaaaggcccagcccgcccagcccgccgacgagcccgccgagaaggccgacgagcccatggagcactag

SEQ ID NO: 242616 - protein, 598 aa, Artificial Sequence
  derived and/or modified sequence
MLKLVGGGGGQDWACSVAGTSLGGEEAAFEVARPGDQGKAGGGSPGWGCAGIPDSAPGAGVLQAGAVGPARGGQGAEEVGESAGGGEERRVRHPQAPALRLLNRKPQGGSGEIKTPENDLQRGRLSRGPRTAPPAPGMGDRSGQQERSVPHSPGAPVGTSAAAVNGLLHNGFHPPPVQPPHVCSRGPVGGSDAAPQRLPLLPELQPQPLLPQHDSPAKKCRLRRRMDSGRKNRPPFPWFGMDIGGTLVKLVYFEPKDITAEEEQEEVENLKSIRKYLTSNTAYGKTGIRDVHLELKNLTMCGRKGNLHFIRFPSCAMHRFIQMGSEKNFSSLHTTLCATGGGAFKFEEDFRMIADLQLHKLDELDCLIQGLLYVDSVGFNGKPECYYFENPTNPELCQKKPYCLDNPYPMLLVNMGSGVSILAVYSKDNYKRVTGTSLGGGTFLGLCCLLTGCETFEEALEMAAKGDSTNVDKLVKDIYGGDYERFGLQGSAVASSFGNMMSKEKRDSISKEDLARATLVTITNNIGSIARMCALNENIDRVVFVGNFLRINMVSMKLLAYAMDFWSKGQLKALFLEHEGYFGAVGALLELFKMTDDK

SEQ ID NO: 242617 - protein, 400 aa, Artificial Sequence
  derived and/or modified sequence
MAKSKHALLPFCHGMMQQEGLHQMQSLDLGLLSLQNSFPWFGMDIGGTLVKLVYFEPKDITAEEEQEEVENLKSIRKYLTSNTAYGKTGIRDVHLELKNLTMCGRKGNLHFIRFPSCAMHRFIQMGSEKNFSSLHTTLCATGGGAFKFEEDFRMIADLQLHKLDELDCLIQGLLYVDSVGFNGKPECYYFENPTNPELCQKKPYCLDNPYPMLLVNMGSGVSILAVYSKDNYKRVTGTSLGGGTFLGLCCLLTGCETFEEALEMAAKGDSTNVDKLVKDIYGGDYERFGLQGSAVASSFGNMMSKEKRDSISKEDLARATLVTITNNIGSIARMCALNENIDRVVFVGNFLRINMVSMKLLAYAMDFWSKGQLKALFLEHEGYFGAVGALLELFKMTDDK

SEQ ID NO: 242618 - protein, 461 aa, Artificial Sequence
  derived and/or modified sequence
MGDRSGQQERSVPHSPGAPVGTSAAAVNGLLHNGFHPPPVQPPHVCSRGPVGGSDAAPQRLPLLPELQPQPLLPQHDSPAKKCRLRRRMDSGRKNRPPFPWFGMDIGGTLVKLVYFEPKDITAEEEQEEVENLKSIRKYLTSNTAYGKTGIRDVHLELKNLTMCGRKGNLHFIRFPSCAMHRFIQMGSEKNFSSLHTTLCATGGGAFKFEEDFRMIADLQLHKLDELDCLIQGLLYVDSVGFNGKPECYYFENPTNPELCQKKPYCLDNPYPMLLVNMGSGVSILAVYSKDNYKRVTGTSLGGGTFLGLCCLLTGCETFEEALEMAAKGDSTNVDKLVKDIYGGDYERFGLQGSAVASSFGNMMSKEKRDSISKEDLARATLVTITNNIGSIARMCALNENIDRVVFVGNFLRINMVSMKLLAYAMDFWSKGQLKALFLEHEGYFGAVGALLELFKMTDDK

SEQ ID NO: 242619 - DNA, 1797 bp, Artificial Sequence
  derived and/or modified sequence
atgctcaagctggttggaggcggcggcggacaggattgggcgtgttctgtggctggcacatcattgggcggagaggaggccgcattcgaggttgccaggcccggagaccagggaaaagcaggcgggggatctcccggctggggctgcgcgggtatccctgactctgctccaggcgcaggggtcctgcaggccggcgcagtgggccctgcgcggggagggcagggtgccgaggaggtgggggagagtgccggcggaggcgaagagcgcagggttcgccacccccaagcacctgctctccgcctgctgaatcgcaagccgcaggggggaagcggggaaatcaaaacaccagaaaacgatctccagcgaggaagactctcacgaggtccccggaccgctccaccggccccaggaatgggagaccggtctgggcaacaggaaaggtccgtaccccatagccctggagcccctgtcggcactagcgcagctgctgtcaacggcctcctgcacaacggcttccaccccccaccagtgcaaccgccccacgtatgctcgaggggccccgtggggggaagcgacgccgcaccgcagaggttgcccttgctccctgagttacagccacagcccctgctaccccagcatgactcccccgctaaaaagtgtcgccttcggcggcgcatggattctggaaggaaaaaccggcccccttttccatggttcgggatggatattggcggtaccctggtgaagttagtttacttcgagcccaaagatattactgccgaggaggaacaggaagaagtagagaatctcaagtccattcgcaagtacttaacaagtaacaccgcctatgggaaaaccggcatcagagacgtacacctggagctgaagaatctgacaatgtgtggtaggaaaggcaacttgcatttcatacgtttccccagttgcgccatgcaccgattcatacagatgggttccgaaaaaaacttcagctccttgcacaccactctgtgcgcaacaggcgggggggccttcaagttcgaggaagacttccgcatgatcgcggatctacaactgcacaaactagacgagctggattgcctaattcagggtctattgtacgtagactcagtgggattcaatgggaagcctgaatgttactacttcgagaacccaactaatccagagttatgtcaaaaaaagccctattgtctggataatccatacccaatgctcctcgtgaacatgggatccggcgtatctatactcgcagtatattcaaaggacaattataaacgcgttacaggcaccagcctgggcggggggacgtttctgggcctgtgctgtctcttgacaggatgcgagacattcgaagaagccctggaaatggccgccaaaggtgattccaccaatgtggataaactcgtaaaggacatttacggcggggactatgagcgtttcggcttgcagggcagcgctgtcgcaagctctttcggcaacatgatgagtaaggaaaagcgcgattctatctcgaaagaagatctggcacgagctacactagtaacaatcaccaacaacattggctctattgcccgtatgtgcgccctgaatgagaacatcgaccgcgtggtgtttgtcggcaattttctcagaattaatatggtgtcgatgaagctcttggcgtacgcgatggatttttggtcaaaaggccaactgaaagcgctgtttctcgaacacgaaggctacttcggcgcggtaggcgcacttctagaactgtttaagatgactgatgacaaatag

SEQ ID NO: 242620 - DNA, 1386 bp, Artificial Sequence
  derived and/or modified sequence
atgggcgatcgctctggccaacaggaacgatctgtcccccactcccctggagcccccgtcggcacctctgctgccgctgttaatggcctactgcacaatggctttcacccccctcccgttcagcctccccatgtgtgttcaagggggcctgtgggtggtagcgacgccgccccccagagattacccctgcttcctgaattgcagccccaaccactgctccctcaacacgatagcccagcgaaaaaatgccgcttgagaaggagaatggactctggacggaagaaccgtcctccttttccctggtttgggatggatataggaggcactctggtgaagctcgtgtacttcgagccgaaggacataacagctgaggaggaacaggaggaggtggaaaacctgaaatcaattagaaaatacctaacctctaacaccgcttatggaaaaacgggcattagggatgtgcatttggaactcaagaacctgactatgtgcggaaggaagggaaatctgcatttcatccgcttccccagctgcgccatgcatcgcttcatacaaatggggtctgagaaaaacttttcctctctgcatactacgctgtgcgccaccggaggaggtgccttcaagttcgaagaggatttcagaatgatcgccgacctgcagctgcataaacttgacgagctggactgcctgatccagggtctgctatatgttgactctgtgggatttaatgggaaacccgaatgttactacttcgaaaatcctacaaatccagaactatgtcagaaaaagccctactgcctggataatccatacccaatgctgcttgtgaatatgggatctggggtgagcattctggcagtgtatagtaaggataactataaaagggttacaggcaccagtcttggaggagggacattcctaggtctgtgctgtctgctcacaggatgcgagacatttgaggaggcacttgaaatggcagcaaaaggcgactctacgaacgtcgacaaactagttaaggacatctacggcggagattacgaaaggttcggattacagggtagcgccgtcgcttctagtttcggaaatatgatgtccaaagagaaacgtgacagcatatcaaaagaagacctagctagagctaccttggttaccatcacgaataacattgggagcatcgcccgtatgtgcgcgttgaacgagaatatcgacagggtagtgtttgttggaaacttcttaagaatcaatatggtctctatgaagctgcttgcctatgcaatggacttttggagtaaaggccagctgaaagcattgtttctggagcacgaggggtattttggagcagtcggggcacttcttgagctcttcaagatgaccgatgacaaatag

SEQ ID NO: 242621 - DNA, 1797 bp, Artificial Sequence
  derived and/or modified sequence
atgctgaagctggtgggcggcggcggcggccaggactgggcctgcagcgtggccggcaccagcctgggcggggaggaggccgcctttgaggtggcccggcctggggaccagggcaaggccggcggcggcagccctggctggggctgtgccggcatcccagattctgcccctggagctggggtgctgcaggccggggctgtgggccctgcccggggcggccagggcgctgaggaggtgggggagagcgctgggggcggggaggagaggagagtgcgccacccccaggccccagccctgcggctgctgaacaggaagccccagggcggcagcggggagatcaagaccccagaaaatgacctgcagaggggccgcctgagccggggccccaggacagcccccccagcccctggcatgggagacaggagcggccagcaggagaggtctgtgccccacagccctggggcccctgtgggcaccagcgctgctgctgtgaatggcctgctgcacaacggcttccaccccccacctgtgcagccccctcatgtgtgcagccggggccctgtgggcggcagtgatgctgccccccagaggctgcccctgctgcctgagctgcagccccagcccctgctgccccagcacgacagccctgccaagaagtgccgcctgcggcggaggatggacagcggcaggaagaaccggccccccttcccctggtttggcatggacattggaggcaccctggtgaagctggtgtactttgagcccaaggacatcacagctgaggaggagcaggaggaggtggagaacctgaagagcatcaggaagtacctgaccagcaacacagcctacggcaagacaggcatcagagatgtgcacctggagctgaagaacctgaccatgtgtggcaggaagggcaacctgcacttcatccgcttccccagctgtgccatgcaccgcttcatccagatgggcagcgagaagaacttcagcagcctgcacaccaccctgtgtgccactggaggaggagccttcaagtttgaggaggacttcaggatgattgctgacctgcagctgcacaagctggatgagctggactgcctgatccagggcctgctgtatgtggacagcgtgggcttcaacgggaagccagagtgctactactttgagaaccccaccaaccctgagctgtgccagaagaagccctactgcctggacaacccctaccccatgctgctggtgaacatgggcagcggcgtgtccatcctggccgtgtacagcaaggacaactacaagagggtgacaggcaccagcctgggcggcggcaccttcctgggcctgtgctgcctgctgaccggctgtgagacctttgaggaggccctggagatggccgccaagggggacagcaccaacgtggacaagctggtgaaggacatctatggaggagactatgagcgcttcggcctgcagggcagcgctgtggccagcagctttggaaacatgatgagcaaggagaagagggacagcatcagcaaggaggacctggcccgggccaccctggtgaccatcaccaacaacatcggcagcatcgccaggatgtgtgccctgaatgaaaatattgacagagtggtgtttgtgggcaacttcctgcgcatcaacatggtgtccatgaagctgctggcctatgccatggacttctggagcaagggccagctgaaggccctcttcctggagcacgagggctactttggagctgtgggcgccctgctggagctgttcaagatgacagatgacaagtag

SEQ ID NO: 242622 - DNA, 1386 bp, Artificial Sequence
  derived and/or modified sequence
atgggagacagaagtggccagcaggagaggtctgtgccccacagccctggggcccctgtgggcaccagcgctgctgctgtgaatggcctgctgcacaacggcttccaccccccacctgtgcagcccccccacgtgtgcagccggggccctgtgggcggcagtgatgctgccccccagaggctgcccctgctgcctgagctgcagccccagcccctgctgccccagcacgacagccctgccaagaagtgccgcctgcggcggaggatggattctggcaggaagaacagaccacccttcccctggtttggcatggacatcggcggcaccctggtgaagctggtgtactttgagcccaaggacatcacagctgaggaggagcaggaggaggtggagaacctgaagagcatcaggaagtacctgaccagcaacacagcctacggcaagacaggcatcagagatgtgcacctggagctgaagaacctgaccatgtgtggcaggaaaggaaacctgcacttcatccgcttccccagctgtgccatgcaccgcttcatccagatgggcagcgagaagaacttcagcagcctgcacaccaccctgtgtgccaccggcggcggggccttcaagtttgaggaggacttcaggatgattgctgacctgcagctgcacaagctggatgagctggactgcctgatccagggcctgctgtatgtggacagcgtgggcttcaacgggaagccagagtgctactactttgagaaccccaccaaccctgagctgtgccagaagaagccctactgcctggacaacccctaccccatgctgctggtgaacatgggcagcggcgtgtccatcctggccgtgtacagcaaggacaactacaagagggtgacaggcaccagcctgggcggcggcaccttcctgggcctgtgctgcctgctgaccggctgtgagacctttgaggaggccctggagatggccgccaagggggacagcaccaacgtggacaagctggtgaaggacatctacggcggggactatgaaagatttggcctgcagggcagcgctgtggccagcagctttggaaacatgatgagcaaggagaagagggacagcatcagcaaagaagacctggcccgggccaccctggtgaccatcaccaacaacatcggcagcatcgccaggatgtgtgccctgaatgaaaacatcgacagagtggtgtttgtgggcaacttcctgcgcatcaacatggtgtccatgaagctgctggcctatgccatggacttctggagcaagggccagctgaaggccctcttcctggagcacgagggctactttggagctgtgggcgccctgctggagctgttcaagatgacagatgacaagtag

SEQ ID NO: 242623 - DNA, 1797 bp, Artificial Sequence
  derived and/or modified sequence
atgctgaagctggtgggcggcggcggcggccaggactgggcctgctcggtggccggtacttcactcggaggggaggaagctgcttttgaggtggcgcgcccaggggatcaaggcaaagccggagggggatctccgggatggggatgtgccggcattcctgactctgcacccggcgccggcgtgctgcaggccggggctgtcggccctgcccgaggcggccagggggccgaggaggtgggagagagcgctgggggcggagaggaaagacgggttcgccacccacaggccccggccctaaggttgttgaatcgtaagccacagggtgggagcggggagatcaaaacccctgaaaacgatttacagcggggacgactgagtcgtggtcccagaacagccccccccgcaccgggaatgggggatcggtcaggccagcaggagagatcggttccccactcgccgggcgcccctgttggcacctccgccgctgcagtcaacggcctcctgcacaacgggttccacccgccaccggtccagccaccacatgtgtgcagcaggggaccagtcggaggctccgacgccgcccctcaacggcttcctctgttgcccgagctacaaccgcagcctctgctgccccaacacgactccccagcaaaaaaatgtcgacttcgaaggcgcatggactccggcaggaaaaaccgccccccctttccatggtttggtatggacattggagggacactggtcaaattggtgtactttgagcccaaggatattactgccgaggaagagcaggaagaggtggaaaacttaaagagtattagaaaatatctgactagcaatacagcttacggaaagactggtattagggatgttcacctcgagctcaagaacctcaccatgtgcggacgcaaggggaatttacattttattaggttcccaagctgcgctatgcatcgatttattcaaatgggatctgaaaagaacttctcttccctgcataccacactatgcgcaactggcggtggtgccttcaaatttgaagaggattttcggatgatcgccgacttgcagctacataagctagacgagctggactgcctaatccaagggctgctgtacgtggactccgttgggtttaatggtaagccagaatgctattacttcgagaatcccactaatcccgagctctgccagaaaaagccatactgtctggacaatccctatcccatgcttctggtgaatatgggatccggggtttcaattctggccgtctatagtaaagataactataagcgggtcactggtacttctctcggcggtgggacttttctgggtctctgctgtcttctgacgggctgtgagactttcgaggaagcgcttgaaatggcagcaaaaggcgactccactaacgtggataaactggttaaggatatctacggcggagactacgagcgctttgggctccagggctcggccgttgcatcttcctttgggaatatgatgagcaaggagaaaagagatagtatctccaaggaggaccttgcacgcgccacactggtgacgataaccaacaatattggctcaattgctagaatgtgtgctctgaacgagaacatcgatcgggttgtttttgttggcaattttctaagaatcaacatggtgtctatgaaattactcgcctacgccatggatttttggagtaaaggccagctgaaagcattatttctagagcatgagggatattttggagctgtgggtgctttgttagagctgtttaagatgactgacgataagtag

SEQ ID NO: 242624 - DNA, 1386 bp, Artificial Sequence
  derived and/or modified sequence
atgggcgaccggagcggccagcaggagcggagcgtgccccacagccccggggcgccagtgggtacatcagcagcagccgtgaacggattgcttcacaacggatttcacccaccacccgtgcagccaccccatgtgtgctcacgcggcccagttgggggaagcgatgcagctccgcagagactgcctcttctgccagaattgcagccacagcctctgttgccacagcatgatagcccggccaagaagtgcagattgcgacgccgtatggattcaggcagaaagaataggcctcccttcccttggttcggaatggacatcggtggcactctggtgaaactggtctacttcgaaccaaaagatatcaccgctgaagaggaacaggaagaggtagaaaacctgaagtccattcgcaagtacctgacctccaacaccgcttacgggaaaaccgggatccgcgacgtgcacctcgaacttaaaaatttaactatgtgtgggagaaaaggaaacctgcatttcattagattcccctcctgcgcaatgcatagattcatccagatgggctccgagaagaattttagctctcttcataccactttgtgcgctaccggtggaggagcattcaaattcgaggaggactttcgtatgatagccgacctgcagctgcacaagctcgacgagctcgactgtctgattcagggcttactgtacgtggatagcgtgggtttcaatggtaaacccgagtgctattacttcgaaaatccaaccaaccccgaactctgtcagaaaaagccttattgcctggataatccatacccaatgctactggtgaatatgggttccggggtttccattctggctgtctacagcaaggataattacaaacgggtgaccgggacaagcctggggggaggtacattcctgggcttgtgttgccttctgaccggatgcgaaacatttgaggaggccttggagatggctgccaaaggtgacagcaccaacgtcgacaaactcgtgaaggatatttatggcggcgattacgagagattcggtctgcaaggtagcgctgtggcaagcagttttggaaacatgatgagtaaggagaaaagagactcaattagcaaggaggacctggcaagggccacattggtgacaattaccaataatatcggaagcatcgctaggatgtgtgcgctgaacgaaaatatcgatcgcgtcgtcttcgttgggaacttccttagaattaacatggtatctatgaagttgctggcctatgccatggatttttggtccaaggggcagctaaaggccttgtttttggagcatgagggttactttggagcggtcggcgccttgcttgagctgttcaaaatgaccgatgataagtag

SEQ ID NO: 242625 - DNA, 3367 bp, Artificial Sequence
  derived and/or modified sequence
cctgacacctctgcaaataattgtcttcctcccgtattcctcctgaaacggttcgctcctttcgctgtctctcccagacccatctggttttcacatcgccatacaaagcccaacccgcccatctcctctctgcaagcccagagaacttgattccccatgttgaaactcgtcggtggcggtggcgggcaggactgggcatgctcagtggcggggaccagtctgggaggcgaggaagccgcgtttgaagtcgcgcggcctggggatcaggggaaggcgggcggcgggagccccggctgggggtgcgcggggatccccgattccgcgcccggggctggcgtgctccaggccggcgccgtggggccggcgcgcggggggcagggcgcagaggaggtgggggagtcggcaggaggaggggaggagcgccgggttcgccatccccaggcgccggctctgcggctgctgaatcggaagccgcagggaggatccggggaaataaagacgccggagaatgacctccagcgaggccgcctgagccggggcccgcgcacagccccgccagcccccggcatgggcgaccgcagcgggcagcaggagcgctcggtcccgcactctccaggggcccccgtgggcaccagcgccgccgctgtgaacgggctgctgcacaacggcttccatccgccgccagtccagccgccgcacgtctgcagccggggtccagtgggcggcagcgacgcggcgccccagcgcctcccgctcctgccggagctgcagccgcagccactgctccctcagcatgactccccggccaagaaatgccggctgcggaggaggatggactcggggagaaagaacaggccgccattcccatggtttggcatggacatcggtggaacgctggttaaattggtgtatttcgagccgaaggatattacagccgaagaggagcaagaggaagtggagaacctgaagagcatccggaagtatttgacttctaatactgcttatgggaaaactgggatccgagacgtccacctggaactgaaaaacctgaccatgtgtggacgcaaagggaacctgcacttcatccgctttcccagctgtgctatgcacaggttcattcagatgggcagcgagaagaacttctctagccttcacaccaccctctgtgccacaggaggcggggctttcaaattcgaagaggacttcagaatgattgctgacctgcagctgcataaactggatgaactggactgtctgattcagggcctgctttatgtcgactctgttggcttcaacggcaagccagaatgttactattttgaaaatcccacaaatcctgaattgtgtcaaaaaaagccgtactgccttgataacccataccctatgttgctggttaacatgggctcaggtgtcagcattctagccgtgtactccaaggacaactataaaagagttacagggaccagtcttggaggtggaacattcctaggcctatgttgcttgctgactggttgtgagacctttgaagaagctctggaaatggcagctaaaggcgacagcaccaatgttgataaactggtgaaggacatttacggaggagactatgaacgatttggccttcaaggatctgctgtagcatcaagctttggcaacatgatgagtaaagaaaagcgagattccatcagcaaggaagacctcgcccgggccacattggtcaccatcaccaacaacattggctccattgctcggatgtgcgcgttgaatgagaacatagacagagttgtgtttgttggaaattttctcagaatcaatatggtctccatgaagctgctggcatatgccatggatttttggtccaaaggacaactgaaagctctgtttttggaacatgagggttattttggagccgttggggcactgttggaactgttcaaaatgactgatgacaagtagagacgagcagtggaggaaacagcctcccaaaaggacagagaactaaaaaattgctgctggagaaggtgaaagtcgctttgggacggaagccaagccattatggcagatgaacctgctggatttgtaaataatttaaaatccttccagatgatcttttactcttaggttttgagctaatgattcaaaacgggggaatataaaaggttttttttctgtatactgtatttttttaaaaaaatggtgcagcgtggccaaacctaccaattgtatgcattaactttgaaaagttgtttgatgtttaagaaggacctgatatgtaagcgctggtcatttttcttctggggtttactgatcagtgtggtgattttaacttcatttagtaattactctaggagattttaccttgacttatatttttcatgacgtttcatgatttgctgttggtttcaaatgaaactacaaatctggcatgttttactgtgaacacttttgttatttgttttgtacccttttttgtcttgtttttctgttttagttgtcttctgaaaaaagagtcgttccctctgtttctgtcctcagatgatgtccctccccctacctgtaacctttctttgacataattgttcatatcaatgaaggtgctgaccagctcaatacaaagttaagcacaagatctaaagctcttgaaaatgcccgtgaagagaagactgaatgtgttaatgaatttaatgagtctggcaaaagttgcaaattatatgcaagtttgtcctatcgcttataaatgtagtgtttcattggatttattttatgctaggttatattaagttgaaatagtctgtgattaaatgtcctcatccatgcacagaatatgaatggcagcaaatctttgtgcaagaaatttgaaacttattgggaaaagcctcccagtagattaattgttcatatcaggagatttagggtaagtcatgggttgaggtgtcagatagtaatatctatttgttttgtacatgtatatatctaggaactttgtaacaacacatctttaataatgttaaaggttttttcatttttaatattttaaactaaaaactgtacttcaatctcagtttctaaaattaaaaataatttatactgatctatatattttttctttttgaaagatttcattaagactgatgggtaactttcaaatgagggtcatgtacaaatattgggatgcatgagatcccatgatcttgtgtattgagcttattgttgaaagggatttttgaaggacagaacaattactccatgatgaatcttcctttctctgccttctgagcaccgtctttaatttccatatcttcaagtcttgaagaagttgatgttaattgaagaattcacttgtctggttgaaataaagcctgtttctgtt

SEQ ID NO: 242626 - DNA, 2780 bp, Artificial Sequence
  derived and/or modified sequence
gaagtcgcgcggcctggggatcaggggaaggcgggcggcgggagccccggctgggggtgcgcggggggcagggcgcagaggaggtgggggagtcggcaggaggaggggaggagcgccgggttcgccatccccaggcgccggctctgcggctgctgaatcggaagccgcagggaggatccggggaaataaagacgccggagaatgacctccagcgaggccgcctgagccggggcccgcgcacagccccgccagcccccggcatgggcgaccgcagcgggcagcaggagcgctcggtcccgcactctccaggggcccccgtgggcaccagcgccgccgctgtgaacgggctgctgcacaacggcttccatccgccgccagtccagccgccgcacgtctgcagccggggtccagtgggcggcagcgacgcggcgccccagcgcctcccgctcctgccggagctgcagccgcagccactgctccctcagcatgactccccggccaagaaatgccggctgcggaggaggatggactcggggagaaagaacaggccgccattcccatggtttggcatggacatcggtggaacgctggttaaattggtgtatttcgagccgaaggatattacagccgaagaggagcaagaggaagtggagaacctgaagagcatccggaagtatttgacttctaatactgcttatgggaaaactgggatccgagacgtccacctggaactgaaaaacctgaccatgtgtggacgcaaagggaacctgcacttcatccgctttcccagctgtgctatgcacaggttcattcagatgggcagcgagaagaacttctctagccttcacaccaccctctgtgccacaggaggcggggctttcaaattcgaagaggacttcagaatgattgctgacctgcagctgcataaactggatgaactggactgtctgattcagggcctgctttatgtcgactctgttggcttcaacggcaagccagaatgttactattttgaaaatcccacaaatcctgaattgtgtcaaaaaaagccgtactgccttgataacccataccctatgttgctggttaacatgggctcaggtgtcagcattctagccgtgtactccaaggacaactataaaagagttacagggaccagtcttggaggtggaacattcctaggcctatgttgcttgctgactggttgtgagacctttgaagaagctctggaaatggcagctaaaggcgacagcaccaatgttgataaactggtgaaggacatttacggaggagactatgaacgatttggccttcaaggatctgctgtagcatcaagctttggcaacatgatgagtaaagaaaagcgagattccatcagcaaggaagacctcgcccgggccacattggtcaccatcaccaacaacattggctccattgctcggatgtgcgcgttgaatgagaacatagacagagttgtgtttgttggaaattttctcagaatcaatatggtctccatgaagctgctggcatatgccatggatttttggtccaaaggacaactgaaagctctgtttttggaacatgagggttattttggagccgttggggcactgttggaactgttcaaaatgactgatgacaagtagagacgagcagtggaggaaacagcctcccaaaaggacagagaactaaaaaattgctgctggagaaggtgaaagtcgctttgggacggaagccaagccattatggcagatgaacctgctggatttgtaaataatttaaaatccttccagatgatcttttactcttaggttttgagctaatgattcaaaacgggggaatataaaaggttttttttctgtatactgtatttttttaaaaaaatggtgcagcgtggccaaacctaccaattgtatgcattaactttgaaaagttgtttgatgtttaagaaggacctgatatgtaagcgctggtcatttttcttctggggtttactgatcagtgtggtgattttaacttcatttagtaattactctaggagattttaccttgacttatatttttcatgacgtttcatgatttgctgttggtttcaaatgaaactacaaatctggcatgttttactgtgaacacttttgttatttgttttgtacccttttttgtcttgtttttctgttttagttgtcttctgaaaaaagagtcgttccctctgtttctgtcctcagatgatgtccctccccctacctgtaacctttctttgacataattgttcatatcaatgaaggtgctgaccagctcaatacaaagttaagcacaagatctaaagctcttgaaaatgcccgtgaagagaagactgaatgtgttaatgaatttaatgagtctggcaaaagttgcaaattatatgcaagtttgtcctatcgcttataaatgtagtgtttcattggatttattttatgctaggttatattaagttgaaatagtctgtgattaaatgtcctcatccatgcacagaatatgaatggcagcaaatctttgtgcaagaaatttgaaacttattgggaaaagcctcccagtagattaattgttcatatcaggagatttagggtaagtcatgggttgaggtgtcagatagtaatatctatttgttttgtacatgtatatatctaggaactttgtaacaacacatctttaataatgttaaaggttttttcatttttaatattttaaactaaaaactgtacttcaatctcagtttctaaaattaaaaataatttatactg

SEQ ID NO: 242627 - DNA, 1797 bp, Artificial Sequence
  derived and/or modified sequence
atgctgaaacttgtgggaggcggaggcggacaggattgggcctgctcagttgccggtaccagcttaggcggtgaggaggcggctttcgaggtcgccagacccggagaccaaggtaaggcaggagggggatcaccgggatgggggtgcgcaggaattcctgactcagctccaggtgccggtgttctccaggcaggcgctgtgggccctgccagggggggacagggggctgaagaggtgggcgagagtgccggaggtggcgaagaaaggcgcgtgcgtcatcctcaggcgccagctctgcgtcttctcaaccgaaagccccagggagggagcggagaaattaaaacgcccgaaaacgatcttcagaggggacggctgtcacggggaccacgcactgcccctcctgctcctgggatgggggatcgcagcggacagcaggaacggagtgtgccacattctcctggcgctcctgtaggaacgagcgcagccgcagtaaatgggctgctgcacaatggatttcaccctccacccgtacagcctcctcatgtctgttcacgcggtcccgtggggggaagcgatgcggctccacagcggttgccgctcctccctgagctccagcctcagcccctactgccccagcatgacagtcctgctaagaagtgccgattgcgaaggaggatggacagcggcagaaaaaaccggcctccctttccatggttcgggatggatatcggaggaacactcgtgaaacttgtgtactttgaacccaaagatatcaccgccgaagaggaacaggaggaagttgaaaatctgaaatcaattagaaaatatttgacctctaacacagcatatggaaagactgggattagagacgtgcatttagagctgaagaatctaacaatgtgtggtcggaagggaaatctacattttatcaggttcccatcatgcgccatgcaccggtttatccaaatggggtctgagaaaaacttttcatccctgcatacgacactgtgtgctactgggggtggtgcattcaaatttgaagaagattttcgcatgatcgccgatctgcagctgcataaactggacgagctggactgtttaatccaaggactactgtatgtggattctgtcggcttcaatgggaagcccgagtgctactacttcgaaaaccctaccaaccccgagctctgccagaagaagccatattgtctcgataacccatacccaatgctgttggtaaacatggggtccggggtttcaatacttgccgtctattcaaaggataattataagagggtgactggtacttccttgggtggcggaactttcctgggtctctgctgcctgttaaccggctgcgagacctttgaagaagctttggagatggccgcaaaaggcgactccacaaacgtcgataaactggtgaaggatatttacgggggtgactacgaacggtttgggctgcaaggaagtgcagttgcatcaagctttggaaacatgatgagtaaggagaaacgagattccatctccaaggaggacctggccagagccaccctggtgacaattaccaacaatatagggtcgatcgcaaggatgtgcgcccttaacgaaaatattgaccgtgtggtcttcgtgggaaactttctgcggattaacatggtgtcaatgaagctcctggcttatgctatggatttctggtcaaagggacaacttaaagcattatttctggaacatgagggatattttggagcagttggggcactcctggaactgtttaaaatgaccgatgacaaatag

SEQ ID NO: 242628 - DNA, 1386 bp, Artificial Sequence
  derived and/or modified sequence
atgggcgacaggtctggccagcaagagaggagcgtgccccacagcccaggtgcacccgtcggcacctcagcagccgcagtcaacgggctgctccacaatggttttcacccaccacctgttcagcctccccacgtgtgttctaggggacccgtcgggggaagcgatgcggctccgcagaggctgcccctgcttcccgagttacagccacaacctctcttgccccagcacgattctcccgctaaaaaatgtagactgagacgcaggatggactcggggagaaagaacaggccaccatttccatggttcggcatggatatagggggtacgctggtgaaattagtctattttgagcccaaggacatcactgccgaggaggagcaagaagaagtcgaaaatctcaagagcatccgtaagtacctcacaagcaatacagcctacggcaaaaccggaatccgcgacgtccacctggaactgaaaaacctcacaatgtgcggccgtaaggggaacttgcattttatccgtttcccaagttgcgcaatgcaccgattcatccagatgggatcagaaaaaaacttctcctcattacacaccaccctgtgcgccacaggcggaggtgcattcaaattcgaagaagacttccgaatgatcgcagacctccaactgcataagttggacgagctcgattgtctgatccagggactcctttacgtggactccgttggtttcaatggtaaaccagagtgctattacttcgagaatcccactaacccagagctgtgtcagaaaaaaccttactgcctggataacccgtaccctatgctgctggtgaacatggggtctggtgtcagcatcctggccgtgtattcgaaagacaactataaacgcgttacggggactagtttaggtggaggcacctttctcggcctgtgctgtctgctcacgggatgcgagacctttgaagaagcactggagatggccgcaaagggagactccaccaacgttgataagctcgtgaaggacatctatggcggtgattatgagcgatttgggcttcagggctccgcggtggctagcagtttcggcaatatgatgtccaaggagaaaagggactcaatcagcaaggaggatttggcaagggcgacgctggtgacgattactaataatatcgggagtatcgcacggatgtgtgccctgaacgaaaacattgacagagtggtgtttgtcggtaactttctgaggatcaatatggtgtccatgaagctgctggcatatgccatggacttctggtctaagggccagttaaaagctctgtttttggagcatgaagggtatttcggcgcagttggggcattattggaactgttcaaaatgactgatgacaaatag

SEQ ID NO: 242629 - DNA, 1797 bp, Artificial Sequence
  derived and/or modified sequence
atgctgaagctggtgggcggcggcggcggccaggactgggcctgcagcgtggccggcaccagcctgggcggcgaggaggccgccttcgaggtggccagacccggcgaccagggcaaggccggcggcggcagccccggctggggctgcgccggcatccccgacagcgcccccggcgccggcgtgctgcaggccggcgccgtgggccccgccagaggcggccagggcgccgaggaggtgggcgagagcgccggcggcggcgaggagagaagagtgagacacccccaggcccccgccctgagactgctgaacagaaagccccagggcggcagcggcgagatcaagacccccgagaacgacctgcagagaggcagactgagcagaggccccagaaccgccccccccgcccccggcatgggcgacagaagcggccagcaggagagaagcgtgccccacagccccggcgcccccgtgggcaccagcgccgccgccgtgaacggcctgctgcacaacggcttccaccccccccccgtgcagcccccccacgtgtgcagcagaggccccgtgggcggcagcgacgccgccccccagagactgcccctgctgcccgagctgcagccccagcccctgctgccccagcacgacagccccgccaagaagtgcagactgagaagaagaatggacagcggcagaaagaacagaccccccttcccctggttcggcatggacatcggcggcaccctggtgaagctggtgtacttcgagcccaaggacatcaccgccgaggaggagcaggaggaggtggagaacctgaagagcatcagaaagtacctgaccagcaacaccgcctacggcaagaccggcatcagagacgtgcacctggagctgaagaacctgaccatgtgcggcagaaagggcaacctgcacttcatcagattccccagctgcgccatgcacagattcatccagatgggcagcgagaagaacttcagcagcctgcacaccaccctgtgcgccaccggcggcggcgccttcaagttcgaggaggacttcagaatgatcgccgacctgcagctgcacaagctggacgagctggactgcctgatccagggcctgctgtacgtggacagcgtgggcttcaacggcaagcccgagtgctactacttcgagaaccccaccaaccccgagctgtgccagaagaagccctactgcctggacaacccctaccccatgctgctggtgaacatgggcagcggcgtgagcatcctggccgtgtacagcaaggacaactacaagagagtgaccggcaccagcctgggcggcggcaccttcctgggcctgtgctgcctgctgaccggctgcgagaccttcgaggaggccctggagatggccgccaagggcgacagcaccaacgtggacaagctggtgaaggacatctacggcggcgactacgagagattcggcctgcagggcagcgccgtggccagcagcttcggcaacatgatgagcaaggagaagagagacagcatcagcaaggaggacctggccagagccaccctggtgaccatcaccaacaacatcggcagcatcgccagaatgtgcgccctgaacgagaacatcgacagagtggtgttcgtgggcaacttcctgagaatcaacatggtgagcatgaagctgctggcctacgccatggacttctggagcaagggccagctgaaggccctgttcctggagcacgagggctacttcggcgccgtgggcgccctgctggagctgttcaagatgaccgacgacaagtag

SEQ ID NO: 242630 - DNA, 1386 bp, Artificial Sequence
  derived and/or modified sequence
atgggcgacagaagcggccagcaggagagaagcgtgccccacagccccggcgcccccgtgggcaccagcgccgccgccgtgaacggcctgctgcacaacggcttccaccccccccccgtgcagcccccccacgtgtgcagcagaggccccgtgggcggcagcgacgccgccccccagagactgcccctgctgcccgagctgcagccccagcccctgctgccccagcacgacagccccgccaagaagtgcagactgagaagaagaatggacagcggcagaaagaacagaccccccttcccctggttcggcatggacatcggcggcaccctggtgaagctggtgtacttcgagcccaaggacatcaccgccgaggaggagcaggaggaggtggagaacctgaagagcatcagaaagtacctgaccagcaacaccgcctacggcaagaccggcatcagagacgtgcacctggagctgaagaacctgaccatgtgcggcagaaagggcaacctgcacttcatcagattccccagctgcgccatgcacagattcatccagatgggcagcgagaagaacttcagcagcctgcacaccaccctgtgcgccaccggcggcggcgccttcaagttcgaggaggacttcagaatgatcgccgacctgcagctgcacaagctggacgagctggactgcctgatccagggcctgctgtacgtggacagcgtgggcttcaacggcaagcccgagtgctactacttcgagaaccccaccaaccccgagctgtgccagaagaagccctactgcctggacaacccctaccccatgctgctggtgaacatgggcagcggcgtgagcatcctggccgtgtacagcaaggacaactacaagagagtgaccggcaccagcctgggcggcggcaccttcctgggcctgtgctgcctgctgaccggctgcgagaccttcgaggaggccctggagatggccgccaagggcgacagcaccaacgtggacaagctggtgaaggacatctacggcggcgactacgagagattcggcctgcagggcagcgccgtggccagcagcttcggcaacatgatgagcaaggagaagagagacagcatcagcaaggaggacctggccagagccaccctggtgaccatcaccaacaacatcggcagcatcgccagaatgtgcgccctgaacgagaacatcgacagagtggtgttcgtgggcaacttcctgagaatcaacatggtgagcatgaagctgctggcctacgccatggacttctggagcaagggccagctgaaggccctgttcctggagcacgagggctacttcggcgccgtgggcgccctgctggagctgttcaagatgaccgacgacaagtag

SEQ ID NO: 242631 - protein, 373 aa, Artificial Sequence
  derived and/or modified sequence
MKLINGKKQTFPWFGMDIGGTLVKLVYFEPKDITAEEEQEEVENLKSIRKYLTSNTAYGKTGIRDVHLELKNLTMCGRKGNLHFIRFPSCAMHRFIQMGSEKNFSSLHTTLCATGGGAFKFEEDFRMIADLQLHKLDELDCLIQGLLYVDSVGFNGKPECYYFENPTNPELCQKKPYCLDNPYPMLLVNMGSGVSILAVYSKDNYKRVTGTSLGGGTFLGLCCLLTGCETFEEALEMAAKGDSTNVDKLVKDIYGGDYERFGLQGSAVASSFGNMMSKEKRDSISKEDLARATLVTITNNIGSIARMCALNENIDRVVFVGNFLRINMVSMKLLAYAMDFWSKGQLKALFLEHEGYFGAVGALLELFKMTDDK

SEQ ID NO: 242632 - DNA, 1122 bp, Artificial Sequence
  derived and/or modified sequence
atgaagctgatcaatggtaaaaagcagacttttccctggttcggcatggatatcgggggaactctggtcaaacttgtgtattttgagcccaaggacatcaccgcagaggaagaacaggaggaggtggaaaacctgaagagcatccggaagtacctcacctccaatactgcgtatggcaaaacgggtatacgggatgtacaccttgaacttaagaacctgacaatgtgcggtaggaagggcaacctgcacttcatacggtttccctcatgcgccatgcaccgcttcatccaaatgggttctgaaaaaaactttagcagcctccacactaccctttgtgccactggaggaggcgctttcaagtttgaggaagatttcagaatgatcgcagatctccagctgcacaaactggatgaactcgactgtttaattcagggactgttgtatgtggattctgtgggcttcaatggcaagcccgagtgctactattttgagaatccgacaaatcctgagctgtgtcagaagaagccctactgcctcgacaatccgtacccaatgcttttggtgaatatgggctctggcgtttccatactcgcggtgtacagcaaagacaattacaagcgggtgacaggaacctctctggggggcggcacctttctcgggctttgctgtctattgactggttgtgaaacctttgaggaagctctggaaatggccgctaagggagattccactaacgtagataagctcgtcaaagacatttatggaggcgactacgaacgattcggcttgcaggggagcgctgtggcgtctagttttgggaacatgatgtctaaggagaagcgggatagcattagcaaagaggatctcgcgagggccactctcgttacgatcaccaacaacattggaagcatcgctcgaatgtgtgctctcaacgagaatatcgatcgggtggtgtttgtcggcaactttttacgcattaacatggtgtcaatgaagcttctcgcatacgctatggatttttggagtaagggccagctgaaggcactgtttctggaacatgagggctattttggcgccgttggtgctttgctagaactgtttaaaatgaccgatgacaaatag

SEQ ID NO: 242633 - DNA, 1203 bp, Artificial Sequence
  derived and/or modified sequence
atggccaaaagcaagcacgcactgcttccattctgccacggaatgatgcagcaagagggtctccaccaaatgcagtccctcgatctcgggctgctcagccttcaaaacagtttcccctggttcggaatggacatcggaggaacacttgtgaaattggtgtattttgagcccaaagatattacagcggaggaagagcaggaagaggttgaaaatttgaaaagcatccgtaagtatctgacgagcaacaccgcctacggcaaaacagggatccgagacgtccatctggaactcaagaacctgactatgtgtggtcgcaagggaaacttgcacttcatcaggttcccgtcttgcgccatgcaccggttcattcagatgggaagcgagaagaactttagcagcctacacaccaccctttgtgccaccgggggaggggccttcaagtttgaagaggacttccgtatgatcgccgacctacaacttcacaaactggatgagctggattgcctgattcaggggttgctgtacgtggacagcgtagggtttaacggaaagccagaatgttattactttgagaaccctacaaatcccgaactctgccagaaaaaaccctactgcctggataacccctatcccatgttgctggtgaacatgggttccggggtctccattttagctgtgtattcgaaagacaattataagagggtgaccggaacctccctcggcgggggaacttttctgggactttgctgcttattgacagggtgcgagacctttgaagaggctctggagatggcagccaaaggagatagtacaaacgtggataagctcgtcaaagatatctacggcggagattatgaaagatttggcctgcaggggtccgccgtggcctcatccttcgggaacatgatgtccaaagagaaaagagatagcatcagcaaggaagacttggctagagccaccctggttacaattactaataatatcgggtccattgctcggatgtgcgctctgaatgagaacattgatagggtagtgttcgtggggaacttcctgcgtattaatatggtctccatgaaattgctggcctatgctatggacttctggtccaaagggcagttaaaagccttgttcctggagcacgagggctacttcggcgccgttggtgccttgctggaactgttcaaaatgactgatgacaagtag

SEQ ID NO: 242634 - DNA, 1122 bp, Artificial Sequence
  derived and/or modified sequence
atgaagctgatcaatggcaagaagcagaccttcccctggtttggcatggacatcggcggcaccctggtgaagctggtgtactttgagcccaaggacatcacagctgaggaggagcaggaggaggtggagaacctgaagagcatcaggaagtacctgaccagcaacacagcctacggcaagacaggcatcagagatgtgcacctggagctgaagaacctgaccatgtgtggcaggaaaggaaacctgcacttcatccgcttccccagctgtgccatgcaccgcttcatccagatgggcagcgagaagaacttcagcagcctgcacaccaccctgtgtgccaccggcggcggggccttcaagtttgaggaggacttcaggatgattgctgacctgcagctgcacaagctggatgagctggactgcctgatccagggcctgctgtatgtggacagcgtgggcttcaacgggaagccagagtgctactactttgagaaccccaccaaccctgagctgtgccagaagaagccctactgcctggacaacccctaccccatgctgctggtgaacatgggcagcggcgtgtccatcctggccgtgtacagcaaggacaactacaagagggtgacaggcaccagcctgggcggcggcaccttcctgggcctgtgctgcctgctgaccggctgtgagacctttgaggaggccctggagatggccgccaagggggacagcaccaacgtggacaagctggtgaaggacatctacggcggggactatgaaagatttggcctgcagggcagcgctgtggccagcagctttggaaacatgatgagcaaggagaagagggacagcatcagcaaagaagacctggcccgggccaccctggtgaccatcaccaacaacatcggcagcatcgccaggatgtgtgccctgaatgaaaacatcgacagagtggtgtttgtgggcaacttcctgcgcatcaacatggtgtccatgaagctgctggcctatgccatggacttctggagcaagggccagctgaaggccctcttcctggagcacgagggctactttggagctgtgggcgccctgctggagctgttcaagatgacagatgacaagtag

SEQ ID NO: 242635 - DNA, 1203 bp, Artificial Sequence
  derived and/or modified sequence
atggccaagagcaagcacgccctgctgcccttctgccacggcatgatgcagcaggagggcctgcaccagatgcagagcctggacctgggcctgctgagcctgcagaacagcttcccctggtttggcatggacattggaggcaccctggtgaagctggtgtactttgagcccaaggacatcacagctgaggaggagcaggaggaggtggagaacctgaagagcatcaggaagtacctgaccagcaacacagcctacggcaagacaggcatcagagatgtgcacctggagctgaagaacctgaccatgtgtggcaggaagggcaacctgcacttcatccgcttccccagctgtgccatgcaccgcttcatccagatgggcagcgagaagaacttcagcagcctgcacaccaccctgtgtgccactggaggaggagccttcaagtttgaggaggacttcaggatgattgctgacctgcagctgcacaagctggatgagctggactgcctgatccagggcctgctgtatgtggacagcgtgggcttcaacgggaagccagagtgctactactttgagaaccccaccaaccctgagctgtgccagaagaagccctactgcctggacaacccctaccccatgctgctggtgaacatgggcagcggcgtgtccatcctggccgtgtacagcaaggacaactacaagagggtgacaggcaccagcctgggcggcggcaccttcctgggcctgtgctgcctgctgaccggctgtgagacctttgaggaggccctggagatggccgccaagggggacagcaccaacgtggacaagctggtgaaggacatctatggaggagactatgagcgcttcggcctgcagggcagcgctgtggccagcagctttggaaacatgatgagcaaggagaagagggacagcatcagcaaggaggacctggcccgggccaccctggtgaccatcaccaacaacatcggcagcatcgccaggatgtgtgccctgaatgaaaatattgacagagtggtgtttgtgggcaacttcctgcgcatcaacatggtgtccatgaagctgctggcctatgccatggacttctggagcaagggccagctgaaggccctcttcctggagcacgagggctactttggagctgtgggcgccctgctggagctgttcaagatgacagatgacaagtag

SEQ ID NO: 242636 - DNA, 1122 bp, Artificial Sequence
  derived and/or modified sequence
atgaagctgatcaacggcaagaagcagaccttcccctggttcggcatggatataggaggcacattagtgaaattggtctatttcgaacccaaagatatcacggcggaggaagagcaggaggaggttgaaaacctcaagagcatacgaaagtacctgacatctaacaccgcttacggtaagacaggtatacgtgatgtccacctcgaactcaaaaatctgaccatgtgtggtcggaaaggaaacctccatttcattaggttcccctcctgcgctatgcataggtttatccagatgggaagcgagaagaacttcagcagtctccacactacattatgcgccactggcggcggggcctttaagtttgaggaagatttccgaatgatcgcagacctccagctccacaaacttgatgagttggactgcctgatccaggggctcctgtatgtagattcagtggggtttaatggaaaaccagagtgctattacttcgagaaccccactaatcccgaattgtgccagaagaaaccgtattgtctggataacccctacccaatgctccttgtgaacatgggttccggagtcagcatattagccgtatactccaaggataattataaacgtgtgaccggcaccagcctaggcggaggtacatttttgggcctgtgttgtctcttgacgggctgtgagaccttcgaagaagccctcgaaatggcggctaaaggtgactccacaaatgtggataaactcgtgaaagacatatatgggggggactatgagaggttcggcctgcagggaagtgccgttgcctccagctttggaaacatgatgagtaaggagaaacgggattccattagcaaggaagatcttgccagagctacccttgtgaccatcacaaataacataggctctattgctcggatgtgcgccttaaatgagaatatcgaccgcgttgtatttgtaggaaattttctgcggatcaatatggtttctatgaagctgctggcctacgccatggatttttggagcaaaggtcagctgaaagccctgtttttggagcatgagggatatttcggcgccgtaggggcactcctcgagctgtttaaaatgaccgacgataaatag

SEQ ID NO: 242637 - DNA, 1203 bp, Artificial Sequence
  derived and/or modified sequence
atggccaagagcaagcacgccctgctgcccttctgccacggcatgatgcagcaggagggcctgcatcagatgcagtcccttgacctcggtttactctcgctgcagaattcattcccatggtttggcatggatattggcggcacgctggtcaaactggtctattttgagcccaaggacatcacagccgaagaagagcaagaagaggtggagaatttgaaatctatcaggaaatatcttacgtcgaacacggcttatggcaagaccggaattagagacgtgcatctcgagctgaagaacctcaccatgtgtggccggaaaggaaatttgcatttcattcgcttccccagctgcgctatgcacagatttatacagatgggatcagagaagaatttctcgtcacttcacacaacgttgtgcgctaccggggggggcgccttcaagttcgaagaagatttccgaatgattgcagacctgcaactgcacaagctggatgagttggactgcctgattcagggtttgctgtacgtggactccgtggggtttaacgggaaaccagaatgttattacttcgagaatcccaccaaccccgagctctgtcagaaaaaaccttattgtctcgacaacccttatccaatgcttctggtgaatatgggttcgggcgtctccattctggccgtgtactctaaagataattataagagggtgactgggacgagtttgggaggagggaccttcctgggtttgtgttgtctgcttaccggctgcgagacctttgaggaagcgctggaaatggccgctaagggcgactcaaccaatgtggacaaactggtgaaagacatctacggcggagactatgagagatttgggcttcagggttctgctgtggcaagtagtttcggtaatatgatgtcaaaggaaaagcgggactctatatctaaggaggacttggccagggcaaccttggtgaccattacaaataacattggctctattgcccgcatgtgcgctttgaatgaaaacatcgacagggttgtgtttgtggggaatttcttgcgcatcaacatggtttcgatgaagctgctggcatacgcaatggacttctggtcaaaaggccagctcaaagccctcttcctcgagcatgaggggtatttcggagctgtgggcgcactccttgaattgttcaaaatgaccgatgataaatag

SEQ ID NO: 242638 - DNA, 2703 bp, Artificial Sequence
  derived and/or modified sequence
aagtgcattatttcacaatctaaagcttgtatatataatggtagtttgtaaagtgtaccttccccacaggacgctgtgggatgtaaatttgtaggtcgagtttacagctggtttttcttgactgaagctcattcaactggttacttctttgtgggtgtctttaatgaagcttataaatggcaaaaagcaaacattcccatggtttggcatggacatcggtggaacgctggttaaattggtgtatttcgagccgaaggatattacagccgaagaggagcaagaggaagtggagaacctgaagagcatccggaagtatttgacttctaatactgcttatgggaaaactgggatccgagacgtccacctggaactgaaaaacctgaccatgtgtggacgcaaagggaacctgcacttcatccgctttcccagctgtgctatgcacaggttcattcagatgggcagcgagaagaacttctctagccttcacaccaccctctgtgccacaggaggcggggctttcaaattcgaagaggacttcagaatgattgctgacctgcagctgcataaactggatgaactggactgtctgattcagggcctgctttatgtcgactctgttggcttcaacggcaagccagaatgttactattttgaaaatcccacaaatcctgaattgtgtcaaaaaaagccgtactgccttgataacccataccctatgttgctggttaacatgggctcaggtgtcagcattctagccgtgtactccaaggacaactataaaagagttacagggaccagtcttggaggtggaacattcctaggcctatgttgcttgctgactggttgtgagacctttgaagaagctctggaaatggcagctaaaggcgacagcaccaatgttgataaactggtgaaggacatttacggaggagactatgaacgatttggccttcaaggatctgctgtagcatcaagctttggcaacatgatgagtaaagaaaagcgagattccatcagcaaggaagacctcgcccgggccacattggtcaccatcaccaacaacattggctccattgctcggatgtgcgcgttgaatgagaacatagacagagttgtgtttgttggaaattttctcagaatcaatatggtctccatgaagctgctggcatatgccatggatttttggtccaaaggacaactgaaagctctgtttttggaacatgagggttattttggagccgttggggcactgttggaactgttcaaaatgactgatgacaagtagagacgagcagtggaggaaacagcctcccaaaaggacagagaactaaaaaattgctgctggagaaggtgaaagtcgctttgggacggaagccaagccattatggcagatgaacctgctggatttgtaaataatttaaaatccttccagatgatcttttactcttaggttttgagctaatgattcaaaacgggggaatataaaaggttttttttctgtatactgtatttttttaaaaaaatggtgcagcgtggccaaacctaccaattgtatgcattaactttgaaaagttgtttgatgtttaagaaggacctgatatgtaagcgctggtcatttttcttctggggtttactgatcagtgtggtgattttaacttcatttagtaattactctaggagattttaccttgacttatatttttcatgacgtttcatgatttgctgttggtttcaaatgaaactacaaatctggcatgttttactgtgaacacttttgttatttgttttgtacccttttttgtcttgtttttctgttttagttgtcttctgaaaaaagagtcgttccctctgtttctgtcctcagatgatgtccctccccctacctgtaacctttctttgacataattgttcatatcaatgaaggtgctgaccagctcaatacaaagttaagcacaagatctaaagctcttgaaaatgcccgtgaagagaagactgaatgtgttaatgaatttaatgagtctggcaaaagttgcaaattatatgcaagtttgtcctatcgcttataaatgtagtgtttcattggatttattttatgctaggttatattaagttgaaatagtctgtgattaaatgtcctcatccatgcacagaatatgaatggcagcaaatctttgtgcaagaaatttgaaacttattgggaaaagcctcccagtagattaattgttcatatcaggagatttagggtaagtcatgggttgaggtgtcagatagtaatatctatttgttttgtacatgtatatatctaggaactttgtaacaacacatctttaataatgttaaaggttttttcatttttaatattttaaactaaaaactgtacttcaatctcagtttctaaaattaaaaataatttatactgatctatatattttttctttttgaaagatttcattaagactgatgggtaactttcaaatgagggtcatgtacaaatattgggatgcatgagatcccatgatcttgtgtattgagcttattgttgaaagggatttttgaaggacagaacaattactccatgatgaatcttcctttctctgccttctgagcaccgtctttaatttccatatcttcaagtcttgaagaagttgatgttaattgaagaattcacttgtctggttgaaataaagcctgtttctgttgtga

SEQ ID NO: 242639 - DNA, 2800 bp, Artificial Sequence
  derived and/or modified sequence
gccgaagtgcattatttcacaatctaaagcttgtatatataatggtagtttgtaaagtgtaccttccccacaggacgctgtgggatgtaaatttgtaggtcgagtttacagctggtttttcttgactgaagctcattcaactggttacttctttgtgggtgtctttaatgaagcttataaatggcaaaaagcaaacatgctcttttgcctttctgccatgggatgatgcagcaagaaggccttcaccagatgcagtccctcgatcttggacttctcagcctccagaactcattcccatggtttggcatggacatcggtggaacgctggttaaattggtgtatttcgagccgaaggatattacagccgaagaggagcaagaggaagtggagaacctgaagagcatccggaagtatttgacttctaatactgcttatgggaaaactgggatccgagacgtccacctggaactgaaaaacctgaccatgtgtggacgcaaagggaacctgcacttcatccgctttcccagctgtgctatgcacaggttcattcagatgggcagcgagaagaacttctctagccttcacaccaccctctgtgccacaggaggcggggctttcaaattcgaagaggacttcagaatgattgctgacctgcagctgcataaactggatgaactggactgtctgattcagggcctgctttatgtcgactctgttggcttcaacggcaagccagaatgttactattttgaaaatcccacaaatcctgaattgtgtcaaaaaaagccgtactgccttgataacccataccctatgttgctggttaacatgggctcaggtgtcagcattctagccgtgtactccaaggacaactataaaagagttacagggaccagtcttggaggtggaacattcctaggcctatgttgcttgctgactggttgtgagacctttgaagaagctctggaaatggcagctaaaggcgacagcaccaatgttgataaactggtgaaggacatttacggaggagactatgaacgatttggccttcaaggatctgctgtagcatcaagctttggcaacatgatgagtaaagaaaagcgagattccatcagcaaggaagacctcgcccgggccacattggtcaccatcaccaacaacattggctccattgctcggatgtgcgcgttgaatgagaacatagacagagttgtgtttgttggaaattttctcagaatcaatatggtctccatgaagctgctggcatatgccatggatttttggtccaaaggacaactgaaagctctgtttttggaacatgagggttattttggagccgttggggcactgttggaactgttcaaaatgactgatgacaagtagagacgagcagtggaggaaacagcctcccaaaaggacagagaactaaaaaattgctgctggagaaggtgaaagtcgctttgggacggaagccaagccattatggcagatgaacctgctggatttgtaaataatttaaaatccttccagatgatcttttactcttaggttttgagctaatgattcaaaacgggggaatataaaaggttttttttctgtatactgtatttttttaaaaaaatggtgcagcgtggccaaacctaccaattgtatgcattaactttgaaaagttgtttgatgtttaagaaggacctgatatgtaagcgctggtcatttttcttctggggtttactgatcagtgtggtgattttaacttcatttagtaattactctaggagattttaccttgacttatatttttcatgacgtttcatgatttgctgttggtttcaaatgaaactacaaatctggcatgttttactgtgaacacttttgttatttgttttgtacccttttttgtcttgtttttctgttttagttgtcttctgaaaaaagagtcgttccctctgtttctgtcctcagatgatgtccctccccctacctgtaacctttctttgacataattgttcatatcaatgaaggtgctgaccagctcaatacaaagttaagcacaagatctaaagctcttgaaaatgcccgtgaagagaagactgaatgtgttaatgaatttaatgagtctggcaaaagttgcaaattatatgcaagtttgtcctatcgcttataaatgtagtgtttcattggatttattttatgctaggttatattaagttgaaatagtctgtgattaaatgtcctcatccatgcacagaatatgaatggcagcaaatctttgtgcaagaaatttgaaacttattgggaaaagcctcccagtagattaattgttcatatcaggagatttagggtaagtcatgggttgaggtgtcagatagtaatatctatttgttttgtacatgtatatatctaggaactttgtaacaacacatctttaataatgttaaaggttttttcatttttaatattttaaactaaaaactgtacttcaatctcagtttctaaaattaaaaataatttatactgatctatatattttttctttttgaaagatttcattaagactgatgggtaactttcaaatgagggtcatgtacaaatattgggatgcatgagatcccatgatcttgtgtattgagcttattgttgaaagggatttttgaaggacagaacaattactccatgatgaatcttcctttctctgccttctgagcaccgtctttaatttccatatcttcaagtcttgaagaagttgatgttaattgaagaattcacttgtctggttgaaataaagcctgtttctgttgtg

SEQ ID NO: 242640 - DNA, 1122 bp, Artificial Sequence
  derived and/or modified sequence
atgaaattgatcaatggaaaaaagcagactttcccctggttcggcatggacattggcggaactctcgtgaaactggtgtactttgagccgaaagacatcaccgctgaggaggagcaagaggaagtggagaacctcaagtctataagaaaatacctgacttctaatactgcttatgggaagactggcattcgcgatgtgcacctggaactcaaaaacttaacgatgtgcggtcgcaagggcaacttacacttcatccgattcccctcttgcgccatgcacaggtttatacagatgggatccgagaagaatttttctagcctccacaccactttgtgcgctacagggggtggagcttttaaatttgaagaggattttaggatgattgccgaccttcaactgcataaactggacgagttggattgcttgatccagggactgctgtatgtcgattccgtgggattcaatggtaaaccggagtgttattactttgaaaaccccaccaaccccgaactgtgtcaaaagaaaccttattgcctggacaacccctacccgatgctgcttgtcaacatgggatcgggtgtgagtatcctggccgtgtattctaaagacaactacaagagagtcactggcacaagcctggggggtgggacgtttctgggtctgtgctgtctcctgacgggatgcgagaccttcgaggaagcactagagatggcagcaaaaggagacagcacaaacgtcgacaagttagttaaggatatctacggcggtgactacgagcgctttggcctgcaggggagcgctgtcgcttcatcctttggtaatatgatgtctaaagaaaaacgggattctatttcgaaggaggatttagcaagagccaccttggtgactatcactaacaacattggctctatcgcccgtatgtgcgccctgaatgaaaatatagaccgggtggtattcgtcggtaattttctgcgaattaacatggtgtctatgaagcttctagcatatgccatggacttttggtccaagggacagctcaaagctctctttttagaacacgagggttactttggagcggttggcgcactgttagagcttttcaagatgacagatgacaagtag

SEQ ID NO: 242641 - DNA, 1203 bp, Artificial Sequence
  derived and/or modified sequence
atggcaaagtccaagcacgcattattgccattttgccacgggatgatgcagcaggaggggttacaccaaatgcagagcctggacctcggactgctgtccctgcagaacagcttcccttggttcggcatggatatcggagggactctggttaaactggtctacttcgagcccaaagatatcactgctgaggaggaacaggaagaggtggaaaatttaaagagtataaggaaatacctgaccagtaacacagcatatggcaagaccggcatcagagatgttcatctggagctcaagaaccttacaatgtgtgggcgaaagggtaaccttcactttatccgcttccctagttgcgccatgcacagattcatacaaatgggcagtgagaagaactttagctctctccacacaacactatgcgctacagggggaggtgctttcaagttcgaagaggactttaggatgatagccgacctgcagcttcacaagctggacgagctggactgccttatccaaggtctgctgtatgtggattccgtaggattcaatggcaaacccgagtgttattactttgaaaacccaacaaacccagaactttgtcaaaagaaaccctactgccttgataacccttatccgatgctcctggtcaatatgggctcaggggttagcatcctcgctgtttactctaaggataattacaagagggtgactgggacatctctggggggtggtacattcttagggctgtgctgcttgctcaccgggtgcgaaacttttgaggaagccttagaaatggctgccaaaggcgacagtaccaacgtggacaagttggtaaaagatatatacggaggggattacgaacgttttggcctgcaaggaagcgcggtcgcctccagcttcggtaacatgatgtcgaaagaaaagagagacagcatctccaaggaagacctagcccgtgcaaccctggtgactattacgaacaatataggatccatcgcaaggatgtgtgccttaaatgagaatatcgatcgcgtggtgtttgtaggcaatttcctgagaatcaatatggtctccatgaagctgcttgcttacgcaatggatttctggagcaaaggacagctgaaggccctgtttctcgagcatgagggttatttcggcgctgtaggggcattgcttgagttattcaaaatgaccgacgacaagtag

SEQ ID NO: 242642 - DNA, 1122 bp, Artificial Sequence
  derived and/or modified sequence
atgaagctgatcaacggcaagaagcagaccttcccctggttcggcatggacatcggcggcaccctggtgaagctggtgtacttcgagcccaaggacatcaccgccgaggaggagcaggaggaggtggagaacctgaagagcatcagaaagtacctgaccagcaacaccgcctacggcaagaccggcatcagagacgtgcacctggagctgaagaacctgaccatgtgcggcagaaagggcaacctgcacttcatcagattccccagctgcgccatgcacagattcatccagatgggcagcgagaagaacttcagcagcctgcacaccaccctgtgcgccaccggcggcggcgccttcaagttcgaggaggacttcagaatgatcgccgacctgcagctgcacaagctggacgagctggactgcctgatccagggcctgctgtacgtggacagcgtgggcttcaacggcaagcccgagtgctactacttcgagaaccccaccaaccccgagctgtgccagaagaagccctactgcctggacaacccctaccccatgctgctggtgaacatgggcagcggcgtgagcatcctggccgtgtacagcaaggacaactacaagagagtgaccggcaccagcctgggcggcggcaccttcctgggcctgtgctgcctgctgaccggctgcgagaccttcgaggaggccctggagatggccgccaagggcgacagcaccaacgtggacaagctggtgaaggacatctacggcggcgactacgagagattcggcctgcagggcagcgccgtggccagcagcttcggcaacatgatgagcaaggagaagagagacagcatcagcaaggaggacctggccagagccaccctggtgaccatcaccaacaacatcggcagcatcgccagaatgtgcgccctgaacgagaacatcgacagagtggtgttcgtgggcaacttcctgagaatcaacatggtgagcatgaagctgctggcctacgccatggacttctggagcaagggccagctgaaggccctgttcctggagcacgagggctacttcggcgccgtgggcgccctgctggagctgttcaagatgaccgacgacaagtag

SEQ ID NO: 242643 - DNA, 1203 bp, Artificial Sequence
  derived and/or modified sequence
atggccaagagcaagcacgccctgctgcccttctgccacggcatgatgcagcaggagggcctgcaccagatgcagagcctggacctgggcctgctgagcctgcagaacagcttcccctggttcggcatggacatcggcggcaccctggtgaagctggtgtacttcgagcccaaggacatcaccgccgaggaggagcaggaggaggtggagaacctgaagagcatcagaaagtacctgaccagcaacaccgcctacggcaagaccggcatcagagacgtgcacctggagctgaagaacctgaccatgtgcggcagaaagggcaacctgcacttcatcagattccccagctgcgccatgcacagattcatccagatgggcagcgagaagaacttcagcagcctgcacaccaccctgtgcgccaccggcggcggcgccttcaagttcgaggaggacttcagaatgatcgccgacctgcagctgcacaagctggacgagctggactgcctgatccagggcctgctgtacgtggacagcgtgggcttcaacggcaagcccgagtgctactacttcgagaaccccaccaaccccgagctgtgccagaagaagccctactgcctggacaacccctaccccatgctgctggtgaacatgggcagcggcgtgagcatcctggccgtgtacagcaaggacaactacaagagagtgaccggcaccagcctgggcggcggcaccttcctgggcctgtgctgcctgctgaccggctgcgagaccttcgaggaggccctggagatggccgccaagggcgacagcaccaacgtggacaagctggtgaaggacatctacggcggcgactacgagagattcggcctgcagggcagcgccgtggccagcagcttcggcaacatgatgagcaaggagaagagagacagcatcagcaaggaggacctggccagagccaccctggtgaccatcaccaacaacatcggcagcatcgccagaatgtgcgccctgaacgagaacatcgacagagtggtgttcgtgggcaacttcctgagaatcaacatggtgagcatgaagctgctggcctacgccatggacttctggagcaagggccagctgaaggccctgttcctggagcacgagggctacttcggcgccgtgggcgccctgctggagctgttcaagatgaccgacgacaagtag

SEQ ID NO: 242644 - protein, 248 aa, Artificial Sequence
  derived and/or modified sequence
MSSIGTGYDLSASTFSPDGRVFQVEYAMKAVENSSTAIGIRCKDGVVFGVEKLVLSKLYEEGSNKRLFNVDRHVGMAVAGLLADARSLADIAREEASNFRSNFGYNIPLKHLADRVAMYVHAYTLYSAVRPFGCSVNDGAQLYMIDPSGVSYGYWGCAIGKARQAAKTEIEKLQMKEMTCRDIVKEVAKIIYIVHDEVKDKAFELELSWVGELTNGRHEIVPKDIREEAEKYAKESLKEEDESDDDNM

SEQ ID NO: 242645 - DNA, 747 bp, Artificial Sequence
  derived and/or modified sequence
atgtctagtataggcactgggtacgatttgagcgcctctaccttttcccccgacggaagagtcttccaggttgagtacgctatgaaggcagttgagaattctagtaccgccataggaattaggtgtaaggacggcgtcgtgttcggagtcgaaaagctggtcttatctaaattgtatgaagaaggttctaacaaaaggttgtttaacgtggaccgacacgtcggcatggctgtggctggcctcttggcagacgctcgctctctggccgatatagcacgagaagaagcaagcaatttccgctccaacttcggttacaatatacccctcaagcatttagctgaccgagtcgccatgtacgttcacgcgtacaccctctatagtgccgtacggccattcggctgtagcgttaatgacggcgcacagttgtacatgatagatccttcaggggtgagctacggctactgggggtgcgcaattgggaaggcacggcaggccgctaaaacagagatcgaaaaattgcaaatgaaagagatgacttgtcgggacattgtcaaggaagtggctaagattatctacattgtgcacgatgaagtcaaggataaggctttcgagctcgagctcagttgggtgggcgagctcaccaacggtagacacgaaatcgtgcctaaggacatcagggaagaggccgaaaaatatgccaaggagtcgctcaaggaggaggatgaaagcgacgacgacaatatgtag

SEQ ID NO: 242646 - DNA, 747 bp, Artificial Sequence
  derived and/or modified sequence
atgagcagcatcggcaccggctatgacctgagcgccagcaccttctccccagatggccgggtcttccaggtggagtatgccatgaaggctgtggagaacagcagcacagccatcggcatccgctgcaaggatggagtggtgtttggagtggagaagctggtgctgagcaagctgtatgaggagggcagcaacaagaggctcttcaacgtggacagacatgtgggcatggctgtggccggcctgctggctgatgcccggagcctggccgacatcgcccgggaggaggccagcaacttccgcagcaactttggctacaacatccccctgaagcacctggccgacagagtggccatgtatgtgcacgcctacaccctgtacagcgctgtgcggcccttcggctgcagcgtgaatgatggagcccagctgtacatgattgaccccagcggcgtgtcctatggctactggggctgtgccatcggcaaggcccggcaggccgccaagacagaaattgagaagctgcagatgaaggagatgacctgccgggacatcgtgaaggaggtggccaagatcatctacatcgtgcatgatgaggtgaaggacaaggcctttgagctggagctgtcctgggtgggggagctgaccaacggcagacatgagatcgtgcccaaggacatccgggaggaggccgagaagtatgccaaggagagcctgaaggaggaggatgaaagtgatgatgacaacatgtag

SEQ ID NO: 242647 - DNA, 747 bp, Artificial Sequence
  derived and/or modified sequence
atgagcagcatcggcaccggctacgacctgagcgccagcaccttctcccccgacggacgcgtgtttcaagtggaatatgctatgaaagcagtagagaatagctctaccgccatcggcataagatgcaaggatggggttgtttttggggtggagaaactggtactgtctaagctgtatgaggagggctctaacaagaggctattcaacgttgaccggcatgtgggtatggcggtggccggactgctggcagacgcgcggtcattggcggacatcgcccgggaagaggcttcaaattttcgctccaactttggatataatattccgttgaagcatctggctgacagagttgccatgtacgtgcacgcatacacgctgtactccgcagtgaggcccttcggatgctcagtgaacgatggagctcagttatatatgatcgatcccagcggggtgtcatatgggtactggggctgcgccatagggaaagctaggcaggcagccaagacagagatcgagaagctacagatgaaagagatgacgtgtcgcgacatcgtgaaggaggtcgcaaaaatcatatatatcgttcatgatgaggtgaaagacaaagcgtttgagctcgagctgagctgggtcggtgagctgactaacggccgacacgaaattgtcccaaaggacatccgtgaagaagccgagaaatacgcaaaggaaagtctgaaggaggaggacgagtcggatgatgacaacatgtag

SEQ ID NO: 242648 - DNA, 747 bp, Artificial Sequence
  derived and/or modified sequence
atgagctctatcggtacaggctatgatctgtcagcctctaccttcagccctgatgggagagtgttccaggtcgaatatgccatgaaagccgtggagaactcatccacggccatcgggatacgctgcaaggatggggttgtctttggagtggagaagttggtgctgtcgaaactgtatgaagaggggagcaacaagcggctttttaacgtagatcggcatgttggaatggcggtcgccggtctgcttgccgacgccaggagtctggctgatattgctcgcgaggaggccagcaactttagaagcaacttcggctataacatcccactgaagcacctggcagacagggttgcaatgtatgtgcacgcttatacgctgtacagtgcagtgcgtccctttggctgtagcgtaaacgacggagcccaattatatatgatcgatccttccggcgtctcctatggatactggggttgcgctattgggaaagccaggcaagcagccaagaccgagatcgagaagctccagatgaaagagatgacctgcagagatatcgtaaaggaagtagccaagatcatatatatcgtgcacgacgaggtcaaggataaggcgttcgagctcgaactgtcctgggtcggggaactgaccaacggcaggcacgaaatcgtccccaaagacattcgcgaggaggccgagaaatacgctaaggagagcctgaaggaggaagatgagtctgatgacgataacatgtag

SEQ ID NO: 242649 - DNA, 908 bp, Artificial Sequence
  derived and/or modified sequence
gctccgggcctggaatccctacgcgtccctttgggtttagcacgatgagctcaatcggcactgggtatgacctgtcagcctctacattctctcctgacggaagagtttttcaagttgaatatgctatgaaggctgtggaaaatagtagtacagctattggaatcagatgcaaagatggtgttgtctttggggtagaaaaattagtcctttctaaactttatgaagaaggttccaacaaaagactttttaatgttgatcggcatgttggaatggcagtagcaggtttgttggcagatgctcgttctttagcagacatagcaagagaagaagcttccaacttcagatctaactttggctacaacattccactaaaacatcttgcagacagagtggccatgtatgtgcatgcatatacactctacagtgctgttagaccttttggctgcagtgtgaatgacggtgcgcaactctacatgattgacccatcaggtgtttcatacggttattggggctgtgccatcggcaaagccaggcaagctgcaaagacggaaatagagaagcttcagatgaaagaaatgacctgccgtgatatcgttaaagaagttgcaaaaataatttacatagtacatgacgaagttaaggataaagcttttgaactagaactcagctgggttggtgaattaactaatggaagacatgaaattgttccaaaagatataagagaagaagcagagaaatatgctaaggaatctctgaaggaagaagatgaatcagatgatgataatatgtaacatttactccagcatctattgtattttaaatttctactccagtccaatgtaactatttagccctggattatacatactgtccaattttcattaaatttttgtcttataactattgaa

SEQ ID NO: 242650 - DNA, 747 bp, Artificial Sequence
  derived and/or modified sequence
atgagcagcatcggcaccggctacgacctgagcgccagcaccttcagccccgacggcagagtgttccaggtggagtacgccatgaaggccgtggagaacagcagcaccgccatcggcatcagatgcaaggacggcgtggtgttcggcgtggagaagctggtgctgagcaagctgtacgaggagggcagcaacaagagactgttcaacgtggacagacacgtgggcatggccgtggccggcctgctggccgacgccagaagcctggccgacatcgccagagaggaggccagcaacttcagaagcaacttcggctacaacatccccctgaagcacctggccgacagagtggccatgtacgtgcacgcctacaccctgtacagcgccgtgagacccttcggctgcagcgtgaacgacggcgcccagctgtacatgatcgaccccagcggcgtgagctacggctactggggctgcgccatcggcaaggccagacaggccgccaagaccgagatcgagaagctgcagatgaaggagatgacctgcagagacatcgtgaaggaggtggccaagatcatctacatcgtgcacgacgaggtgaaggacaaggccttcgagctggagctgagctgggtgggcgagctgaccaacggcagacacgagatcgtgcccaaggacatcagagaggaggccgagaagtacgccaaggagagcctgaaggaggaggacgagagcgacgacgacaacatgtag

SEQ ID NO: 242651 - DNA, 828 bp, Artificial Sequence
  derived and/or modified sequence
atggccaccgccgccggcctggacagcgccggcccccaggacgccagagaggtgagccccgagcccatcgtgagcaccgtggccagactgaagagcagcctggcccagcccgacagaagatacagcgagcccagcatgcccagcagccaggagtgcctggagagcagagtgaccaaccagaccctgaccaagagcgagggcgacttccccgtgcccagagtgggcagcagactggagagcgaggaggccgaggaccccttccccgaggaggtgttccccgccgtgcagggcaagaccaagagacccgtggacctgaagatcaagaacctggcccccggcagcgtgctgcccagagccctggtgctgaaggccttcagcagcagcagcctggacgccagcagcgacagcagccccgtggccagccccagcagccccaagagaaacttcttcagcagacaccagagcttcaccaccaagaccgagaagggcaagcccagcagagagatcaagaagcacagcatgagcttcaccttcgccccccacaagaaggtgctgaccaagaacctgagcgccggcagcggcaagagccaggacttcaccagagaccacgtgcccagaggcgtgagaaaggagagccagctggccggcagaatcgtgcaggagaacggctgcgagacccacaaccagaccgccagaggcttctgcctgagaccccacgccctgagcgtggacgacgtgttccagggcgccgactgggagagacccggcagcccccccagctacgaggaggccatgcagggccccgccgccagaccctggggcgcctag

SEQ ID NO: 242652 - DNA, 828 bp, Artificial Sequence
  derived and/or modified sequence
atggcaaccgcagccggtctggatagcgcagggcctcaggatgcacgtgaagtcagccccgagccgattgtatccaccgtggcccgtttgaaaagcagccttgcgcaaccagaccggaggtacagtgagcccagcatgccgagctctcaggagtgcctagagagtagagtcactaatcaaactcttaccaaatcagagggtgatttcccggtacccagggtgggtagccgcctggagtccgaggaggctgaagacccattccccgaagaggtctttccagcagtgcaaggtaaaacaaagagacctgtagacctgaagatcaagaatctggcacccgggtctgttctgcccagagcactcgtgctcaaagcattttcaagttcatccctggatgcgtccagcgacagttcccccgtggcctccccttcaagccccaaacggaattttttcagtaggcatcagtccttcacaactaaaactgagaagggaaaaccatctcgggagattaaaaagcatagcatgagctttacttttgccccgcataaaaaagtcctgactaaaaacctctcagccggaagcggcaagtctcaggatttcactagggaccacgtgccgcgaggagttcggaaggaaagtcagctcgccggaagaatcgtgcaggaaaacgggtgcgagacccacaatcagacagctaggggattttgcttgcgtcctcacgccctatcggtcgatgacgtgttccaaggggctgactgggaacggccaggctcaccgccaagctacgaagaagcgatgcaaggcccagcagctagaccatggggagcttag

SEQ ID NO: 242653 - DNA, 828 bp, Artificial Sequence
  derived and/or modified sequence
atggccacagctgctggcctggacagcgctggcccccaggatgcccgggaggtgtccccagagcccatcgtgtccacagtggcccggctgaagagcagcctggcccagcctgaccggcgctacagcgagcccagcatgcccagcagccaggagtgcctggagagccgggtgaccaaccagaccctgaccaagtctgagggggacttccctgtgccccgggtgggcagccggctggagagcgaggaggccgaggaccccttccctgaggaggtgtttcctgctgtgcagggcaagaccaagaggcctgtggacctgaagatcaagaacctggcccctggctctgtgctgccccgggccctggtgctgaaggccttcagcagcagcagcctggatgccagcagtgacagcagccctgtggccagccccagcagccccaagaggaacttcttcagccgccaccagagcttcaccaccaagacagagaagggcaagcccagccgggagatcaagaagcacagcatgtccttcacctttgccccccacaagaaggtgctgaccaagaacctgtctgctggcagcggcaagagccaggacttcacccgggaccacgtgccccggggcgtgaggaaggagagccagctggccggccgcatcgtgcaggagaatggctgtgagacccacaaccagacagcccggggcttctgcctgcggccccacgccctgtctgtggatgatgtgttccagggcgctgactgggagaggcctggcagcccccccagctatgaggaggccatgcagggccctgctgcccggccctggggcgcctag

SEQ ID NO: 242654 - DNA, 828 bp, Artificial Sequence
  derived and/or modified sequence
atggccaccgccgccggcctggacagcgccggcccccaggacgcccgggaagtttctcccgagcctattgtgagcacagtggccagattgaaaagctccctggcccagccagataggaggtatagtgagcctagtatgccttcctctcaggagtgcctagagtcccgagttaccaatcaaacattaacaaagtcagaaggagactttcccgtccccagagtgggttctcggctagagagcgaggaagccgaagacccattccccgaggaagtttttcccgctgtacagggcaaaacgaagcgacctgtcgatctgaagatcaaaaatctggcgcccggtagtgtactgcctagagcactggtcctgaaagcttttagctcgtcgtccttggatgcctcatccgactcatcacccgtggcctcacccagtagcccaaaaagaaacttcttcagcagacatcaatccttcactaccaaaaccgagaaggggaagcccagcagagagatcaagaagcactccatgtcctttacattcgccccccacaagaaggtgctcacaaaaaacctctctgctgggtcaggcaagtcccaagacttcacacgggaccatgtgccacgaggggtgcgaaaggaaagtcagctggctggtaggattgtgcaggagaatggttgcgaaacacacaatcagaccgctcggggtttttgtcttcgacctcatgcactgagtgtggatgatgtcttccaaggggccgactgggagaggccggggtcccccccctcttatgaggaggccatgcaggggccagccgctagaccttggggggcttag

SEQ ID NO: 242655 - DNA, 828 bp, Artificial Sequence
  derived and/or modified sequence
atggccactgcggcaggactagattccgcaggcccacaggacgcacgtgaggtgtctccggagcccattgtttcaaccgtcgctagacttaaaagcagcctggcccagccagacaggagatattcggagccatctatgccctcttctcaggagtgtctggaatccagggtcaccaaccagacactcacaaagagcgagggtgatttccccgtgcccagagtgggcagccgcttggagtctgaggaggctgaggatccattccctgaggaggtgtttcccgctgtccagggtaagaccaaacgtccagtagatctcaagatcaagaatctcgccccaggctctgtcctacctcgggcactggtgttgaaagccttctcaagcagctctcttgacgcatctagtgacagcagcccagtagcgtctccatcttcgcccaagcggaacttcttctctcgccatcagtctttcaccactaaaacagaaaagggcaagccttcaagggaaatcaagaaacactcgatgtccttcacattcgcgcctcataagaaagtgctgactaagaatctgtccgccggttcaggcaagagccaagacttcactcgagaccacgtgccccgaggcgtgaggaaggagtctcagctggccggtcggatagtacaagagaacgggtgcgaaactcacaatcagacggcccgaggcttttgtctaagaccccacgcgctctctgtggacgatgtttttcagggcgctgactgggaacgacccggtagcccaccaagctatgaagaggccatgcagggcccagccgctaggccatggggcgcttag

SEQ ID NO: 242656 - DNA, 828 bp, Artificial Sequence
  derived and/or modified sequence
atggccacagctgctggcttggatagcgcgggcccacaggatgcccgagaggtcagcccagagcccattgtgagcaccgtggccaggctgaaaagctccctcgcacagcccgataggagatactcagagcccagcatgccatcctcccaggagtgcctcgagagccgggtgacaaaccaaacactaacaaagagtgaaggggacttccccgtgccccgggtaggctctcgtttggaaagtgaggaggctgaagacccatttccagaggaggtcttccctgcagtgcaaggcaaaaccaagaggccggtggacctgaagatcaagaacttggccccgggttcggtgctcccgcgggcactggttctcaaagccttctccagcagctcgctggacgcgtcctctgacagctcgcccgtggcttctccttccagtcccaaaagaaatttcttcagcagacatcagtctttcaccacaaagacagagaaaggcaagcccagccgagaaattaaaaagcactccatgtctttcacctttgcccctcacaaaaaagtgctgaccaaaaacctcagcgcgggctctgggaaatcgcaagactttaccagggaccacgtcccgaggggtgtcagaaaggaaagccagcttgccggccgaatcgtgcaggaaaatgggtgtgaaacccacaaccaaacagcccgcggcttctgcctgagaccccacgccctctcggtggatgatgtgttccagggagctgactgggagaggcctggaagcccaccctcttatgaagaggccatgcagggcccggcagccagaccgtggggagcatga

SEQ ID NO: 242657 - protein, 296 aa, Artificial Sequence
  derived and/or modified sequence
MGEWAFLGSLLDAVQLQSPLVGRLWLVVMLIFRILVLATVGGAVFEDEQEEFVCNTLQPGCRQTCYDRAFPVSHYRFWLFHILLLSAPPVLFVVYSMHRAGKEAGGAEAAAQCAPGLPEAQCAPCALRARRARRCYLLSVALRLLAELTFLGGQALLYGFRVAPHFACAGPPCPHTVDCFVSRPTEKTVFVLFYFAVGLLSALLSVAELGHLLWKGRPRAGERDNRCNRAHEEAQKLLPPPPPPPPIVVTWEENRHLQGEGSPGSPHPKTELDAPRFRRESTSPAGWHCSLPFHGT

SEQ ID NO: 242658 - DNA, 891 bp, Artificial Sequence
  derived and/or modified sequence
atgggcgagtgggcttttttaggctcgcttttagacgccgtacagctgcaatcgccactggtcggaaggctgtggctggttgtcatgctcatcttcagaattctcgtcctggccactgtcggaggtgcagtattcgaggatgaacaggaagagtttgtttgcaacactctgcagcccggttgccgtcagacctgctatgaccgtgcgtttccggtgtcccattaccgcttctggctgtttcatatcctgttgctgagtgccccgccagtgctgtttgtcgtttatagcatgcatcgcgctgggaaagaggctggaggcgcggaagctgcggcacaatgtgcccccggcctgccagaagctcagtgcgcaccttgcgccctgcgggcccggcgtgctcgaagatgctatttgctgtccgtcgcccttaggctgctggctgaactcacttttctcggagggcaggccctcctgtacggatttcgcgttgctccacacttcgcctgtgcgggaccaccctgtccacataccgttgactgttttgtttcgaggcctacagagaagaccgtattcgttctgttctactttgctgtggggctgctgtccgccctcctcagcgtcgcagagttgggccacttgctttggaagggcaggcctcgcgcaggcgaaagggataaccggtgtaacagagctcacgaggaggcacagaagctgctgccacctccaccacctcccccaccaatcgtcgtaacatgggaggagaataggcacttgcagggggaaggttctccagggtcccctcacccaaagactgaattggacgctcctcggttccgacgcgagtcaactagcccggctgggtggcactgtagcctgccctttcatggcacatag

SEQ ID NO: 242659 - DNA, 891 bp, Artificial Sequence
  derived and/or modified sequence
atgggggagtgggcgttcctgggctcgctgctggacgccgtgcagctgcagtcgccgctcgtgggccgcctctggctggtggtcatgctgatcttccgcatcctggtgctggccacggtgggcggcgccgtgttcgaggacgagcaagaggagttcgtgtgcaacacgctgcagccgggctgtcgccagacctgctacgaccgcgccttcccggtctcccactaccgcttctggctcttccacatcctgctgctctcggcgcccccggtgctgttcgtcgtctactccatgcaccgggcaggcaaggaggcgggcggcgctgaggcggcggcgcagtgcgcccccggactgcccgaggcccagtgcgcgccgtgcgccctgcgcgcccgccgcgcgcgccgctgctacctgctgagcgtggcgctgcgcctgctggccgagctgaccttcctgggcggccaggcgctgctctacggcttccgcgtggccccgcacttcgcgtgcgccggtccgccctgcccgcacacggtcgactgcttcgtgagccggcccaccgagaagaccgtcttcgtgctcttctatttcgcggtggggctgctgtcggcgctgctcagcgtagccgagctgggccacctgctctggaagggccgcccgcgcgccggggagcgtgacaaccgctgcaaccgtgcacacgaagaggcgcagaagctgctcccgccgccgccgccgccaccacctattgttgtcacttgggaagaaaacagacaccttcaaggagagggctcccctggtagcccccaccccaagacagagctggatgcccctcgcttccgtagggaaagcacttctcctgcaggatggcattgctctctccccttccatggcacgtag

SEQ ID NO: 242660 - DNA, 891 bp, Artificial Sequence
  derived and/or modified sequence
atgggagagtgggccttcctgggcagcctgctggatgctgtgcagctgcagagccccctggtgggccgcctgtggctggtggtgatgctgatcttccgcatcctggtgctggccaccgtgggcggcgctgtgtttgaagatgagcaggaggagtttgtgtgcaacaccctgcagcccggctgccggcagacctgctatgaccgggccttccctgtgagccactaccgcttctggctgttccacatcctgctgctgagcgcccctcctgtgctgtttgtggtgtacagcatgcaccgggccggcaaggaggccggcggcgctgaggccgccgcccagtgtgcccctggcctgcctgaggcccagtgtgccccctgtgccctgcgggcccggcgggcccggcgctgctacctgctgtctgtggccctgcggctgctggccgagctgaccttcctgggcggccaggccctgctgtatggcttccgggtggccccccactttgcctgtgccggccccccctgcccccacacagtggactgctttgtgtcccggcccacagagaagacagtgtttgtgctcttctactttgctgtgggcctgctgagcgccctgctgtctgtggccgagctgggccacctgctgtggaagggccggccccgggccggggagcgggacaaccgctgcaacagagcccacgaggaggcccagaagctgctgcccccacctcctcctcctccacccatcgtggtgacctgggaggagaacagacacctgcagggcgagggcagccctggcagcccccaccccaagacagagctggatgccccccgcttccggcgggagagcaccagccctgctggctggcactgcagcctgcccttccacggcacctag

SEQ ID NO: 242661 - DNA, 309 bp, Artificial Sequence
  derived and/or modified sequence
atggccccccacctgctgtggtgccccaccaacggcctgggcctgggcggcagccctgctggccagtggggcggcggcagccactaccggggcctggtgcctggagagcccgccggccggcccccagccctgcccctgcccggcctggccggcctgcatgaccacacccagctgctgaggatggccggccagccctggctggcctggggcacagctgctgcccgggtgtctgcccggcccacccgggactgcagctgcaccagccgctgccaccacgcctgtgatgtggtggccgtgaccctgtcctag

SEQ ID NO: 242662 - DNA, 891 bp, Artificial Sequence
  derived and/or modified sequence
atgggcgagtgggccttcctgggcagcctgctggacgccgtgcagctgcaatcgccacttgttggaagactatggctggtcgtgatgctgattttccggatcctggtgttggcaaccgtaggcggggcagtgtttgaggacgagcaggaggagttcgtctgtaataccctccagcccggctgtcggcagacttgttatgatcgagctttcccagtgtcccattatcgcttctggctatttcacatcctgcttttaagcgcgcctcctgtgctgtttgtggtgtactcaatgcatagagctggaaaagaagcaggaggcgccgaggcagccgctcagtgtgcaccgggcctgccggaggcccagtgcgccccatgcgccttacgggcaagacgcgccagaagatgctacctgctaagtgtagcgctaaggctgcttgcggaattgacattccttggagggcaagcgctgttgtacggcttccgcgtggctccccactttgcctgcgcaggccccccctgcccccataccgtggattgcttcgtctcccgacctacagagaaaaccgttttcgtgttgttctattttgccgtggggttgctgtctgccctcctgtcagtagccgaactcggtcacctgctttggaaggggcggccgcgggctggggagcgggataaccggtgcaatagggcccacgaggaagctcagaaactactaccacccccccccccaccaccgcccattgtggtgacttgggaggagaaccggcatcttcagggggagggttcccctggcagcccacaccctaagactgaactggacgctcctcgcttcagacgcgaaagcacatctcccgcaggttggcactgttctcttcctttccacgggacttag

SEQ ID NO: 242663 - DNA, 891 bp, Artificial Sequence
  derived and/or modified sequence
atgggggagtgggcttttctggggtcattacttgacgccgtgcagctccagtcaccgctggtcggccgactctggttggttgtaatgcttatttttcgcatactggttctggccactgttggcggtgcagtgtttgaagacgaacaggaagagtttgtatgtaataccctgcagccaggttgtcgacagacctgttacgacagagcgttcccagtgagccactatcgattctggctgtttcacatcctgctgctcagtgcccctccagtgctgttcgtcgtgtactccatgcaccgtgctggtaaggaggcaggaggtgccgaagctgcagctcaatgcgctcctggattgccagaggctcagtgtgcaccctgcgctctgcgcgcaagacgggcaaggaggtgttaccttttgtcagtcgcgctcaggcttctggcagaactgactttccttggcggacaggcgctgttgtatgggtttagggtggccccacacttcgcatgcgccggacctccttgtccacataccgttgattgctttgttagcaggccaactgaaaagacagtgtttgttctgttctactttgctgtaggacttctctctgcacttttgtccgtggcagaattgggtcacctgttatggaaggggagaccacgggctggggagcgggataataggtgcaacagagcacacgaagaggcgcaaaagcttttgccaccaccccctcctcccccacctatagttgtcacgtgggaggagaacagacacctacaaggagagggtagccctggctctccacacccgaagaccgagctggacgccccaaggtttcgcagggagtccacaagtccagcaggttggcactgttcactgccttttcacggtacctag

SEQ ID NO: 242664 - DNA, 891 bp, Artificial Sequence
  derived and/or modified sequence
atgggcgagtgggccttcctgggcagcctgctggacgccgtgcagctgcagagccccctggtgggcagactgtggctggtggtgatgctgatcttcagaatcctggtgctggccaccgtgggcggcgccgtgttcgaggacgagcaggaggagttcgtgtgcaacaccctgcagcccggctgcagacagacctgctacgacagagccttccccgtgagccactacagattctggctgttccacatcctgctgctgagcgccccccccgtgctgttcgtggtgtacagcatgcacagagccggcaaggaggccggcggcgccgaggccgccgcccagtgcgcccccggcctgcccgaggcccagtgcgccccctgcgccctgagagccagaagagccagaagatgctacctgctgagcgtggccctgagactgctggccgagctgaccttcctgggcggccaggccctgctgtacggcttcagagtggccccccacttcgcctgcgccggccccccctgcccccacaccgtggactgcttcgtgagcagacccaccgagaagaccgtgttcgtgctgttctacttcgccgtgggcctgctgagcgccctgctgagcgtggccgagctgggccacctgctgtggaagggcagacccagagccggcgagagagacaacagatgcaacagagcccacgaggaggcccagaagctgctgccccccccccccccccccccccccatcgtggtgacctgggaggagaacagacacctgcagggcgagggcagccccggcagcccccaccccaagaccgagctggacgcccccagattcagaagagagagcaccagccccgccggctggcactgcagcctgcccttccacggcacctag

SEQ ID NO: 242665 - protein, 591 aa, Artificial Sequence
  derived and/or modified sequence
MGCSSSSTKTRRSDTSLRAALIIQNWYRGYKARLKARQHYALTIFQSIEYADEQGQMQLSTFFSFMLENYTHIHKEELELRNQSLESEQDMRDRWDYVDSIDVPDSYNGPRLQFPLTCTDIDLLLEAFKEQQILHAHYVLEVLFETKKVLKQMPNFTHIQTSPSKEVTICGDLHGKLDDLFLIFYKNGLPSERNPYVFNGDFVDRGKNSIEILMILCVSFLVYPNDLHLNRGNHEDFMMNLRYGFTKEILHKYKLHGKRILQILEEFYAWLPIGTIVDNEILVIHGGISETTDLNLLHRVERNKMKSVLIPPTETNRDHDTDSKHNKVGVTFNAHGRIKTNGSPTEHLTEHEWEQVVTIFSASNYYEEGSNRGAYIKLCSGTTPRFFQYQVTKATCFQPLRQRVDTMENSAIKILRERVISRKSDLTRAFQLQDHRKSGKLSVSQWAFCMENILGLNLPWRSLSSNLVNIDQNGNVEYMSSFQNIRIEKPVQEAHSTLVETLYRYRSDLEIIFNAIDTDHSGLISVEEFRAMWKLFSSHYNVHIDDSQVNKLANIMDLNKDGSIDFNEFLKAFYVVHRYEDLMKPDVTNLG

SEQ ID NO: 242666 - DNA, 1776 bp, Artificial Sequence
  derived and/or modified sequence
atgggctgcagtagctctagcacgaaaactcgtcgctccgatacaagcttgcgcgccgcgcttattatccagaactggtaccgaggttacaaggctagactgaaagctaggcaacattacgcgctcaccatattccagagcattgagtatgccgatgaacaaggccagatgcagctgtcaacattcttttcctttatgttggagaattacactcacatccataaagaggagctcgagctgaggaaccaatcgctggaatctgaacaggacatgcgcgaccgctgggactacgtggacagtatcgacgtccccgactcttacaatgggccgcgactgcagttccctctgacctgcactgacattgatctgctcctcgaggcatttaaggagcaacaaatccttcatgctcattacgtcttggaggtgctttttgaaacaaagaaagtgctgaagcagatgcctaacttcacacacatccagactagcccctccaaagaggtaacaatctgcggagacctgcatgggaagttagatgatctgtttctgattttctacaagaatgggctccctagcgaacgcaatccctacgtgttcaatggcgatttcgtggaccggggaaaaaactccatcgagatcttgatgatcttatgcgtatcattccttgtgtatccaaacgatcttcacttgaataggggtaatcacgaagattttatgatgaacctccgatacggattcaccaaagaaatcctgcacaagtacaaacttcacggcaaacgcatacttcagatattggaagaattctacgcctggcttcccatcgggaccatagtggacaatgagatactcgtaatccatggcgggatctctgagacaacggacctgaatctactgcacagggtggaaagaaataaaatgaaatctgtgctgatcccccctacagagactaatcgagaccacgataccgattccaagcacaacaaagtaggcgtaacattcaatgcccatggaagaatcaaaactaatgggagccctaccgagcatctaactgaacatgagtgggagcaggtggttaccatcttctccgcctccaattactacgaggagggcagtaatcgcggggcctatattaaactgtgctcgggaacgacaccaagattctttcaataccaggtgaccaaggctacttgctttcagccgctgcgacagcgcgtcgatacgatggagaattcagcaatcaaaatcctgagagagcgtgtgattagccggaagtctgatctgactcgggcctttcagctccaggatcatagaaaatccggcaagctgtccgtgtctcagtgggctttctgtatggagaatattctgggccttaatctgccatggaggtccctgagcagcaatctggtgaatatagaccagaatgggaatgtggagtacatgtcatccttccagaatatcagaatagaaaaaccggtgcaggaggcgcattccaccctggttgagacattgtatcgatataggagtgatctcgagatcatcttcaacgctatcgatacggaccacagtggactcatttccgtggaagagtttagagccatgtggaaactgttctcaagccattacaacgtgcatattgacgatagccaggtgaacaagttggccaacatcatggatctgaacaaagacggctctatcgactttaacgaatttctgaaggctttctatgtggtgcacaggtacgaagatcttatgaaacccgacgtgaccaacctcggttag

SEQ ID NO: 242667 - DNA, 1131 bp, Artificial Sequence
  derived and/or modified sequence
atggggtgtagctcgagttctacaaaaactagacgatctgatacgtcattacgtgctgcattgataatacagaactggtacaggggctacaaagcccgcctgaaggcgaggcagcattacgctctgacaatttttcaatccatagagtatgccgacgaacagggacagatgcagctcagcacgttcttctccttcatgttggagaactatactcacatccataaagaagagctggaactccggaatcaatcgctcgagagtgagcaggatatgagagaccggtgggactacgtggactctatagatgtacccgatagctataacggtccccgtctccagttcccactgacctgcaccgacattgatctgctcctcgaagcctttaaggagcaacaaatcctccatgcacactatgtcctcgaggtgctgtttgaaacaaagaaggttcttaaacagatgccgaattttacccacattcaaacttccccttcaaaggaggtcaccatctgtggtgacctccatggaaaactggacgacctgtttcttatcttctacaaaaacggcctgccttccgagaggaacccctacgttttcaacggtgactttgttgatagaggaaaaaacagcattgagattcttatgatcctgtgtgtgagcttcctggtctaccccaacgatttgcatctcaaccgaggaaatcacgaggactttatgatgaatcttagatacgggttcactaaagagattctccacaagtacaaactccacggcaagcggattttgcaaatcctggaggaattttacgcttggctgccgattggcaccatcgtcgataacgagattttggtgatacatggggggatttccgagactaccgatctgaatctcttacatagagttgaaagaaataaaatgaagtctgttttaattcctcctaccgagactaacagggaccacgacaccgattcaaaacacaacaaagtgggggtgaccttcaacgctcatggccgcataaaaacgaatggatcccctactgaacacctgacagagcatgaatgggaacaaagtgggtactatggcaagcagcgacaccaggacattaagcgcgaaagcgacttcacaaaaaagtag

SEQ ID NO: 242668 - DNA, 1776 bp, Artificial Sequence
  derived and/or modified sequence
atgggctgcagcagcagcagcaccaagaccaggagaagtgacaccagcctgcgggccgccctgatcatccagaactggtaccggggctacaaggcccggctgaaggcccggcagcactacgccctgaccatcttccagagcattgaatatgcagatgagcagggccagatgcagctgagcaccttcttctccttcatgctggagaactacacccacatccacaaggaggagctggagctgaggaaccagagcctggagagcgagcaggacatgagggaccgctgggactatgtggacagcattgatgtgcctgacagctacaacggcccccggctgcagttccccctgacctgcacagacatcgacctgctgctggaggccttcaaggagcagcagatcctgcacgcccactacgtgctggaggtgctgtttgagaccaagaaggtgctgaagcagatgcccaacttcacccacatccagaccagccccagcaaggaggtgaccatctgtggggacctgcacggcaagctggatgacctcttcctgatcttctacaagaatggcctgcccagcgagaggaacccctacgtgttcaatggagactttgtggaccggggcaagaacagcattgagatcctgatgatcctgtgtgtgtccttcctggtgtacccaaatgacctgcacctgaacagaggcaaccacgaggacttcatgatgaacctgcgctatggcttcaccaaggagatcctgcacaagtacaagctgcacggcaagaggatcctgcagatcctggaggagttctacgcctggctgcccatcggcaccatcgtggacaatgagatcctggtgattcatggaggcatcagcgagaccacagacctgaacctgctgcaccgggtggagaggaacaagatgaagtctgtgctgatccccccaacagagaccaacagagaccatgacacagacagcaagcacaacaaggtgggcgtgaccttcaatgcccacggccgcatcaagaccaacggcagccccacagagcacctgacagaacatgagtgggagcaggtggtgaccatcttcagcgccagcaactactatgaggagggcagcaacagaggagcctacatcaagctgtgcagcggcaccaccccccgcttcttccagtaccaggtgaccaaggccacctgcttccagcccctgcggcagagggtggacaccatggagaacagcgccatcaagatcctgcgggagagggtcatcagcaggaagagtgacctgacccgggccttccagctgcaggaccacaggaagagcggcaagctgtctgtgtcccagtgggccttctgcatggagaacatcctgggcctgaacctgccctggaggagcctgagcagcaacctggtgaacatcgaccagaatggaaatgtggagtacatgagcagcttccagaacatcagaattgagaagcctgtgcaggaggcccacagcaccctggtggagaccctgtaccgctacagaagtgacctggagatcatcttcaatgccatcgacacagaccacagcggcctcatctctgtggaggagttccgggccatgtggaagctgttcagcagccactacaacgtgcacattgatgacagccaggtgaacaagctggccaacatcatggacctgaacaaggatggcagcattgacttcaatgagttcctgaaggccttctacgtggtgcacagatatgaggacctgatgaagccagatgtgaccaacctgggctag

SEQ ID NO: 242669 - DNA, 1131 bp, Artificial Sequence
  derived and/or modified sequence
atgggctgcagcagcagcagcaccaagaccaggagaagtgacaccagcctgcgggccgccctgatcatccagaactggtaccggggctacaaggcccggctgaaggcccggcagcactacgccctgaccatcttccagagcattgaatatgcagatgagcagggccagatgcagctgagcaccttcttctccttcatgctggagaactacacccacatccacaaggaggagctggagctgaggaaccagagcctggagagcgagcaggacatgagggaccgctgggactatgtggacagcattgatgtgcctgacagctacaacggcccccggctgcagttccccctgacctgcacagacatcgacctgctgctggaggccttcaaggagcagcagatcctgcacgcccactacgtgctggaggtgctgtttgagaccaagaaggtgctgaagcagatgcccaacttcacccacatccagaccagccccagcaaggaggtgaccatctgtggggacctgcacggcaagctggatgacctcttcctgatcttctacaagaatggcctgcccagcgagaggaacccctacgtgttcaatggagactttgtggaccggggcaagaacagcattgagatcctgatgatcctgtgtgtgtccttcctggtgtacccaaatgacctgcacctgaacagaggcaaccacgaggacttcatgatgaacctgcgctatggcttcaccaaggagatcctgcacaagtacaagctgcacggcaagaggatcctgcagatcctggaggagttctacgcctggctgcccatcggcaccatcgtggacaatgagatcctggtgattcatggaggcatcagcgagaccacagacctgaacctgctgcaccgggtggagaggaacaagatgaagtctgtgctgatccccccaacagagaccaacagagaccatgacacagacagcaagcacaacaaggtgggcgtgaccttcaatgcccacggccgcatcaagaccaacggcagccccacagagcacctgacagaacatgagtgggagcagagcggctactacggcaagcagaggcaccaggacatcaagcgggagagtgacttcaccaagaagtag

SEQ ID NO: 242670 - DNA, 1776 bp, Artificial Sequence
  derived and/or modified sequence
atgggctgcagcagcagcagcaccaagacccggcggagcgacaccagcctgcgcgccgcgcttataattcagaattggtaccgaggctataaggccagactaaaggcgcgccagcactacgccttgacaatatttcagagcatcgaatacgccgacgaacagggtcaaatgcagctgtctacattcttttccttcatgcttgagaactatacccacatacacaaagaagaactggagctaaggaaccagtccctggaatctgaacaagacatgagggaccgctgggactacgttgacagcattgatgtacctgattcttacaatggccctcggctccagttccctctgacttgtacagatatagacctgctcttggaagctttcaaagaacagcaaatcctacacgcccactacgtcctcgaggtgctgtttgagacgaaaaaagtgcttaaacagatgcctaatttcactcatatccaaacatccccttcaaaggaggtgaccatttgcggagacttacacggaaaactcgatgatctctttctcattttctacaagaatggtctgcccagcgagagaaacccttatgtgtttaacggcgatttcgtggatcgaggtaagaattctatcgagatcctaatgatactttgcgtgagctttttggtttacccaaacgacttgcacctaaacagaggaaaccatgaggactttatgatgaacctacgatacggcttcacgaaggaaattctgcacaagtataaactgcatgggaagcgcattctgcagatcctggaggagttctacgcatggcttcctatcggcacaatcgtggacaatgaaatactggtgatccacggcgggatttcagagacaactgacctaaatctgctgcacagagtcgaacgcaataagatgaagagtgtattgatccctcctaccgagacgaaccgtgaccacgacacagatagtaaacacaacaaggttggggtcacatttaatgcacacgggcgaattaaaacgaacggcagtccgacagagcacttgactgagcacgaatgggagcaggttgttactatcttctctgcctctaactattatgaggaggggtccaaccggggagcctacattaaactttgcagcggtacaacgcctcgcttttttcagtatcaggtgaccaaagctacctgctttcagcctctgcgtcagcgcgtggatacaatggagaattccgctatcaaaatcttaagagaacgagtcatcagccgaaaaagtgatctcactagggccttccaactccaagatcaccgaaagtccggtaaactatccgtgtcgcagtgggctttctgtatggagaacattctcggtctgaacttgccatggcgctctctatcctccaacctcgttaatatcgaccagaacggcaatgtggagtatatgtcctcgttccaaaacattcgaatcgagaaacccgtgcaggaagcccactcaacactagtggaaactctgtacaggtaccgttccgatttagagataattttcaacgccatcgacactgatcattcaggcctgataagtgtcgaagaattcagggcaatgtggaaactgtttagttcgcactacaacgtccacatagacgactcccaggtcaacaaactcgcaaatatcatggatctgaacaaggacggaagtatcgattttaacgagtttcttaaagccttttatgtggtacacagatacgaagacctgatgaagcccgacgtgacaaacctgggttag

SEQ ID NO: 242671 - DNA, 1131 bp, Artificial Sequence
  derived and/or modified sequence
atgggctgcagcagcagcagcaccaagacccggcggagcgacaccagccttcgggcagctctcatcattcaaaattggtatagagggtacaaggcgagactgaaagcacgacagcactacgctcttacaattttccagtcaattgaatacgccgatgaacagggccagatgcagctatccacttttttctctttcatgctggagaattatacgcacatacacaaggaggaattggagctgcggaaccaatcacttgagtccgaacaggatatgcgagatcgctgggattacgtcgactccatcgatgtccccgattcatataacgggcccagactacagttccccttgacatgtacagatattgatttgctcctggaggcattcaaagagcagcaaatcttgcatgcgcattatgtcttggaggtcctcttcgaaacaaagaaggtcttaaagcagatgcccaatttcactcacatacagacctccccatccaaggaagtgaccatctgtggagatcttcacgggaaattagacgatctgttccttatattctataaaaatggcttgccatccgagaggaatccttacgtatttaatggcgacttcgtggacagaggaaagaactccatagaaattttaatgatactgtgtgtatccttcttggtgtacccaaacgacctgcatctcaaccggggaaaccatgaagattttatgatgaatctgaggtatgggttcactaaagagattcttcacaaatacaaactccacgggaaacgcatcctgcagatccttgaggaattctacgcctggctgcctattggaacaatagtggacaatgaaattctggtgattcatggaggtatctcagagacaacagacctgaatctgctgcacagagtcgaacggaataaaatgaagtcagtgctgatccctcctactgagacaaatcgtgaccacgacactgacagtaaacataataaagtgggagtgactttcaacgcccatggaagaatcaagaccaacggatcccccacagagcacctgaccgaacatgaatgggaacagtccggctactacgggaagcaacgacaccaggatatcaagagggaatccgactttaccaagaagtag

SEQ ID NO: 242672 - DNA, 1776 bp, Artificial Sequence
  derived and/or modified sequence
atgggatgctctagtagttccactaaaactagacgaagcgataccagcctccgggcagccctcattattcaaaattggtatcgcggttacaaggcgagattgaaagccaggcagcattatgccctaactatttttcagagcatagagtacgctgatgaacagggccagatgcagctctccaccttcttttctttcatgcttgaaaattacacccacatccacaaagaagaactagaactccgtaaccaaagccttgagagcgagcaagacatgcgcgacagatgggattacgtagactctattgacgtacctgattcatataatgggccacgcctgcaattccccctgacctgtacagatatcgatttactacttgaggcctttaaagagcagcaaatcctgcatgcccattacgttctggaagtgctgtttgagaccaaaaaggttttgaaacagatgcctaactttacacacattcagacctccccatcgaaagaagtaactatctgtggggacctgcacggaaaactggatgatctgttcctaattttctacaagaacggcctgcctagtgaacggaatccctacgttttcaacggagacttcgtggacagaggcaaaaattcgattgagatccttatgatcctgtgtgtctcattcctggtctaccctaatgacctgcacctgaaccggggaaaccatgaagatttcatgatgaaccttagatatggattcactaaggagattctgcacaaatacaaactccatggaaaacgcatcctgcagatcctcgaagagttttacgcctggctcccgatcggaaccattgtcgacaacgagattttggtcatccacggagggatttccgaaactacagacttgaacctgttacaccgggtcgaacgtaataaaatgaaatctgtgctcatccctccaactgaaacaaaccgggaccatgacaccgactccaagcacaataaggtaggtgtcacattcaatgctcatggacggattaagacaaacggaagccccacagaacacctcaccgaacacgagtgggagcaggtggtgaccattttttctgcctccaactactacgaagaagggtccaacagaggcgcatatataaagctgtgttcagggacgacgcccaggttcttccagtaccaggtgactaaagccacgtgttttcagcccctgagacagagggtagacactatggaaaatagtgccatcaagattctccgagagcgcgtgatctccagaaagtccgatctgacccgcgcttttcagctacaggaccatcggaaaagcggaaaactctctgtgtcccagtgggctttttgcatggaaaacatcctaggccttaacttaccatggcgctcgctcagctcaaacctggttaacattgaccaaaatggcaatgtggaatacatgagctcttttcagaatatcagaattgagaaacccgtccaggaagcccacagcacccttgtggaaacactctatcggtatcgatcagatctggagatcatattcaacgctattgacaccgaccattcgggcttgatatcagtagaggagtttcgggctatgtggaaactgttcagcagccattataatgtccatattgacgattctcaagtgaacaagctcgccaacataatggatttgaacaaggacggatctatagacttcaatgaattcttaaaggccttttacgttgtgcacaggtatgaagacctcatgaagcccgacgttactaatcttggctag

SEQ ID NO: 242673 - DNA, 1131 bp, Artificial Sequence
  derived and/or modified sequence
atgggatgcagttcgagttctacaaagaccaggaggtcagacacttccttgcgcgctgctctcataatccagaattggtacaggggatataaggcacgccttaaggctcggcagcactacgcccttacaatcttccaatcgatcgagtatgccgacgagcagggccagatgcaattgtccacattcttctccttcatgctcgagaattacacgcatatacacaaagaggaacttgagttgcgcaatcaaagtctcgagtccgagcaagacatgagggataggtgggattacgttgacagcatcgacgtcccggacagctacaatggtcctaggctgcagttccctctaacctgcacagacatagacttgcttctcgaagcatttaaggagcagcagattctgcatgcgcattacgtcctggaggtactgtttgaaacaaagaaggttctgaaacaaatgcctaacttcacacacattcaaaccagcccaagtaaagaagtgactatctgtggcgacctccatggaaaattggacgatttatttctgattttctataagaatggtttacccagcgaaaggaacccttatgtcttcaacggggacttcgtcgatagaggcaaaaacagcatcgagatcctgatgattttgtgtgtaagctttttggtctatcctaacgacttgcacctgaaccgtgggaaccacgaggattttatgatgaatttgcggtatggcttcactaaagagattcttcacaagtataagctgcacgggaagagaattctccaaatcctggaggaattctacgcctggctccccattggaacaattgtagacaacgagattttggttattcatggaggaattagcgaaaccactgacctaaacctgcttcaccgagtggagagaaataaaatgaaatccgtcttgattccaccaactgagaccaatcgggaccacgacacggattctaagcacaacaaagtgggagtcaccttcaacgcgcacgggagaattaagactaacggttctcctacagagcatctgacagagcatgagtgggaacagagtgggtattatggtaaacaaagacaccaggacatcaagcgcgagtccgacttcacaaagaagtag

SEQ ID NO: 242674 - DNA, 2690 bp, Artificial Sequence
  derived and/or modified sequence
gaagattacaaatgagactgggaaaccctcttcaataagacctgtgtgatgatagattgtgtcctgagcccgcaggtcaggctgaaagagtcaacaaccagcaaagtgaagatctaggagtctgttccccttgaacctgtgtggacctgatcaaacctcgagggaaaggctgggagaacacatccctggtcagctgtaggaaagccagagagcatttgagaagaggctgaagcttgaattttgcaaacacacaagccctctgcatttccccagagagaaggtttttttctcgtcttcatttcctttgaaacacctggggtgaggaaaaacctctacattggccaagcagaagaaacagaatctatgactgaagaggatcggctaagagtggttcctcgcagcttaaagggaggcacttttcacactctgtcttaaaatcagaagttgaattcatgaacacatatgatttagatagaagtcatgggatgcagcagttcttcaacgaaaaccaggagatctgacacatcactgagagctgcgttgatcatccagaactggtaccgaggttacaaagctcgactgaaggccagacaacactatgccctcaccatcttccagtccatcgaatatgctgatgaacaaggccaaatgcagttatccaccttcttttccttcatgttggaaaactacacacatatacataaggaagagctagaattaagaaatcagtctcttgaaagcgaacaggacatgagggatagatgggattatgtggactcgatagatgtcccagactcctataatggtcctcggctacaatttcctctcacttgtacggatattgatttacttcttgaggccttcaaggaacaacagatacttcatgcccattatgtcttagaggtgctatttgaaaccaagaaagtcctgaagcaaatgccgaatttcactcacatacaaacttctccctccaaagaggtaacaatctgtggtgatttgcatgggaaactggatgatctttttttgatcttctacaagaatggtctcccctcagagaggaacccgtatgtttttaatggtgactttgtagatcgaggaaagaattccatagagatcctaatgatcctgtgtgtgagttttcttgtctaccccaatgacctgcacttgaacagagggaaccacgaagattttatgatgaatctgaggtatggcttcacgaaagaaattttgcataaatataagctacatggaaaaagaatcttacaaatcttggaagaattctatgcctggctcccaatcggtacaatcgttgacaatgaaatcctggtcatccatggtgggatatcagagaccacagacttgaatttactccaccgtgtagagaggaacaagatgaaatctgtgctgataccaccaacggaaacaaacagagaccatgacactgactcgaagcacaataaagtaggtgtgacttttaatgcacatggaagaatcaaaacaaatggatctcctactgaacacttaacagagcatgaatgggaacaggtggtgactatattttctgcttctaattattatgaagaaggcagcaatcgaggagcttacatcaaactatgttctggtacaactcctcgatttttccagtaccaagtaactaaagcaacgtgctttcagcctcttcgccaaagagtggatactatggaaaacagcgccatcaagatattaagagagagagtgatttcacgaaaaagtgaccttactcgtgctttccaacttcaagaccacagaaaatcaggaaaactttctgtgagccagtgggctttttgcatggagaacattttggggctgaacttaccatggagatccctcagttcgaatctggtaaacatagaccaaaatggaaacgttgaatacatgtccagcttccagaatatccgcattgaaaaacctgtacaagaggctcattctactctagttgaaactctgtacagatacagatctgacctggaaatcatatttaatgccattgacactgatcactcaggcctgatctccgtggaagaatttcgtgccatgtggaaactttttagttctcactacaatgttcacattgatgattcccaagtcaataagcttgccaacataatggacttgaacaaagatggaagcattgactttaatgagtttttaaaggctttctatgtagtgcatagatatgaagacttgatgaaacctgatgtcaccaaccttggctaaacacaaatgagagcttccctcaggctccctgaaacagctaggcccaaatcacaagtacagtcctttccaacacccctgaaattcatagtcagtagcagagaaaagcagatcccaattcatcccacaaacagatgcatagtatgggttttggaagtccctagcaagctgttattggtaagattaggttaaatgtcagtaataggatttggtttcagcattagtacctacatattgccagtgagaaactgggttggacctagtggtgttgtcgtgagtgccacctaaccaggaggccagagcggtttgaaaacatcctgaaaggaactcatacagcacaagagaaaactactaagcttgacatctgtgagtgactgagggagacaggaggaataccaggttattcatggaataaagtctttccatctttaaactgt

SEQ ID NO: 242675 - DNA, 2547 bp, Artificial Sequence
  derived and/or modified sequence
gaagattacaaatgagactgggaaaccctcttcaataagacctgtgtgatgatagattgtgtcctgagcccgcaggtcaggctgaaagagtcaacaaccagcaaagtgaagatctaggagtctgttccccttgaacctgtgtggacctgatcaaacctcgagggaaaggctgggagaacacatccctggtcagctgtaggaaagccagagagcatttgagaagaggctgaagcttgaattttgcaaacacacaagccctctgcatttccccagagagaaggtttttttctcgtcttcatttcctttgaaacacctggggtgaggaaaaacctctacattggccaagcagaagaaacagaatctatgactgaagaggatcggctaagagtggttcctcgcagcttaaagggaggcacttttcacactctgtcttaaaatcagaagttgaattcatgaacacatatgatttagatagaagtcatgggatgcagcagttcttcaacgaaaaccaggagatctgacacatcactgagagctgcgttgatcatccagaactggtaccgaggttacaaagctcgactgaaggccagacaacactatgccctcaccatcttccagtccatcgaatatgctgatgaacaaggccaaatgcagttatccaccttcttttccttcatgttggaaaactacacacatatacataaggaagagctagaattaagaaatcagtctcttgaaagcgaacaggacatgagggatagatgggattatgtggactcgatagatgtcccagactcctataatggtcctcggctacaatttcctctcacttgtacggatattgatttacttcttgaggccttcaaggaacaacagatacttcatgcccattatgtcttagaggtgctatttgaaaccaagaaagtcctgaagcaaatgccgaatttcactcacatacaaacttctccctccaaagaggtaacaatctgtggtgatttgcatgggaaactggatgatctttttttgatcttctacaagaatggtctcccctcagagaggaacccgtatgtttttaatggtgactttgtagatcgaggaaagaattccatagagatcctaatgatcctgtgtgtgagttttcttgtctaccccaatgacctgcacttgaacagagggaaccacgaagattttatgatgaatctgaggtatggcttcacgaaagaaattttgcataaatataagctacatggaaaaagaatcttacaaatcttggaagaattctatgcctggctcccaatcggtacaatcgttgacaatgaaatcctggtcatccatggtgggatatcagagaccacagacttgaatttactccaccgtgtagagaggaacaagatgaaatctgtgctgataccaccaacggaaacaaacagagaccatgacactgactcgaagcacaataaagtaggtgtgacttttaatgcacatggaagaatcaaaacaaatggatctcctactgaacacttaacagagcatgaatgggaacagagtggatactatggaaaacagcgccatcaagatattaagagagagagtgatttcacgaaaaagtgaccttactcgtgctttccaacttcaagaccacagaaaatcaggaaaactttctgtgagccagtgggctttttgcatggagaacattttggggctgaacttaccatggagatccctcagttcgaatctggtaaacatagaccaaaatggaaacgttgaatacatgtccagcttccagaatatccgcattgaaaaacctgtacaagaggctcattctactctagttgaaactctgtacagatacagatctgacctggaaatcatatttaatgccattgacactgatcactcaggcctgatctccgtggaagaatttcgtgccatgtggaaactttttagttctcactacaatgttcacattgatgattcccaagtcaataagcttgccaacataatggacttgaacaaagatggaagcattgactttaatgagtttttaaaggctttctatgtagtgcatagatatgaagacttgatgaaacctgatgtcaccaaccttggctaaacacaaatgagagcttccctcaggctccctgaaacagctaggcccaaatcacaagtacagtcctttccaacacccctgaaattcatagtcagtagcagagaaaagcagatcccaattcatcccacaaacagatgcatagtatgggttttggaagtccctagcaagctgttattggtaagattaggttaaatgtcagtaataggatttggtttcagcattagtacctacatattgccagtgagaaactgggttggacctagtggtgttgtcgtgagtgccacctaaccaggaggccagagcggtttgaaaacatcctgaaaggaactcatacagcacaagagaaaactactaagcttgacatctgtgagtgactgagggagacaggaggaataccaggttattcatggaataaagtctttccatctttaaactgt

SEQ ID NO: 242676 - DNA, 1776 bp, Artificial Sequence
  derived and/or modified sequence
atgggctgcagcagcagcagcaccaagaccagaagaagcgacaccagcctgagagccgccctgatcatccagaactggtacagaggctacaaggccagactgaaggccagacagcactacgccctgaccatcttccagagcatcgagtacgccgacgagcagggccagatgcagctgagcaccttcttcagcttcatgctggagaactacacccacatccacaaggaggagctggagctgagaaaccagagcctggagagcgagcaggacatgagagacagatgggactacgtggacagcatcgacgtgcccgacagctacaacggccccagactgcagttccccctgacctgcaccgacatcgacctgctgctggaggccttcaaggagcagcagatcctgcacgcccactacgtgctggaggtgctgttcgagaccaagaaggtgctgaagcagatgcccaacttcacccacatccagaccagccccagcaaggaggtgaccatctgcggcgacctgcacggcaagctggacgacctgttcctgatcttctacaagaacggcctgcccagcgagagaaacccctacgtgttcaacggcgacttcgtggacagaggcaagaacagcatcgagatcctgatgatcctgtgcgtgagcttcctggtgtaccccaacgacctgcacctgaacagaggcaaccacgaggacttcatgatgaacctgagatacggcttcaccaaggagatcctgcacaagtacaagctgcacggcaagagaatcctgcagatcctggaggagttctacgcctggctgcccatcggcaccatcgtggacaacgagatcctggtgatccacggcggcatcagcgagaccaccgacctgaacctgctgcacagagtggagagaaacaagatgaagagcgtgctgatcccccccaccgagaccaacagagaccacgacaccgacagcaagcacaacaaggtgggcgtgaccttcaacgcccacggcagaatcaagaccaacggcagccccaccgagcacctgaccgagcacgagtgggagcaggtggtgaccatcttcagcgccagcaactactacgaggagggcagcaacagaggcgcctacatcaagctgtgcagcggcaccacccccagattcttccagtaccaggtgaccaaggccacctgcttccagcccctgagacagagagtggacaccatggagaacagcgccatcaagatcctgagagagagagtgatcagcagaaagagcgacctgaccagagccttccagctgcaggaccacagaaagagcggcaagctgagcgtgagccagtgggccttctgcatggagaacatcctgggcctgaacctgccctggagaagcctgagcagcaacctggtgaacatcgaccagaacggcaacgtggagtacatgagcagcttccagaacatcagaatcgagaagcccgtgcaggaggcccacagcaccctggtggagaccctgtacagatacagaagcgacctggagatcatcttcaacgccatcgacaccgaccacagcggcctgatcagcgtggaggagttcagagccatgtggaagctgttcagcagccactacaacgtgcacatcgacgacagccaggtgaacaagctggccaacatcatggacctgaacaaggacggcagcatcgacttcaacgagttcctgaaggccttctacgtggtgcacagatacgaggacctgatgaagcccgacgtgaccaacctgggctag

SEQ ID NO: 242677 - DNA, 1131 bp, Artificial Sequence
  derived and/or modified sequence
atgggctgcagcagcagcagcaccaagaccagaagaagcgacaccagcctgagagccgccctgatcatccagaactggtacagaggctacaaggccagactgaaggccagacagcactacgccctgaccatcttccagagcatcgagtacgccgacgagcagggccagatgcagctgagcaccttcttcagcttcatgctggagaactacacccacatccacaaggaggagctggagctgagaaaccagagcctggagagcgagcaggacatgagagacagatgggactacgtggacagcatcgacgtgcccgacagctacaacggccccagactgcagttccccctgacctgcaccgacatcgacctgctgctggaggccttcaaggagcagcagatcctgcacgcccactacgtgctggaggtgctgttcgagaccaagaaggtgctgaagcagatgcccaacttcacccacatccagaccagccccagcaaggaggtgaccatctgcggcgacctgcacggcaagctggacgacctgttcctgatcttctacaagaacggcctgcccagcgagagaaacccctacgtgttcaacggcgacttcgtggacagaggcaagaacagcatcgagatcctgatgatcctgtgcgtgagcttcctggtgtaccccaacgacctgcacctgaacagaggcaaccacgaggacttcatgatgaacctgagatacggcttcaccaaggagatcctgcacaagtacaagctgcacggcaagagaatcctgcagatcctggaggagttctacgcctggctgcccatcggcaccatcgtggacaacgagatcctggtgatccacggcggcatcagcgagaccaccgacctgaacctgctgcacagagtggagagaaacaagatgaagagcgtgctgatcccccccaccgagaccaacagagaccacgacaccgacagcaagcacaacaaggtgggcgtgaccttcaacgcccacggcagaatcaagaccaacggcagccccaccgagcacctgaccgagcacgagtgggagcagagcggctactacggcaagcagagacaccaggacatcaagagagagagcgacttcaccaagaagtag

SEQ ID NO: 242678 - protein, 404 aa, Artificial Sequence
  derived and/or modified sequence
MAAVPELLQQQEEDRSKLRSVSVDLNVDPSLQIDIPDALSERDKVKFTVHTKTTLPTFQSPEFSVTRQHEDFVWLHDTLIETTDYAGLIIPPAPTKPDFDGPREKMQKLGEGEGSMTKEEFAKMKQELEAEYLAVFKKTVSSHEVFLQRLSSHPVLSKDRNFHVFLEYDQDLSVRRKNTKEMFGGFFKSVVKSADEVLFTGVKEVDDFFEQEKNFLINYYNRIKDSCVKADKMTRSHKNVADDYIHTAACLHSLALEEPTVIKKYLLKVAELFEKLRKVEGRVSSDEDLKLTELLRYYMLNIEAAKDLLYRRTKALIDYENSNKALDKARLKSKDVKLAEAHQQECCQKFEQLSESAKEELINFKRKRVAAFRKNLIEMSELEIKHARNNVSLLQSCIDLFKNN

SEQ ID NO: 242679 - protein, 228 aa, Artificial Sequence
  derived and/or modified sequence
MAAVPELLQQQEEDRSKTTLPTFQSPEFSVTRQHEDFVWLHDTLIETTDYAGLIIPPAPTKPDFDGPREKMQKLGEGEGSMTKEEFAKMKQELEAEYLAVFKKTVSSHEVFLQRLSSHPVLSKDRNFHVFLEYDQDLSVRRKNTKEMFGGFFKSVVKSADEVLFTGVKEVDDFFEQEKNFLINYYNRIKDSCVKADKMTRSHKNVADDYIHTAACLHSLALEEPTVIK

SEQ ID NO: 242680 - protein, 269 aa, Artificial Sequence
  derived and/or modified sequence
MAAVPELLQQQEEDRSKLRSVSVDLNVDPSLQIDIPDALSERDKVKFTVHTKIPPAPTKPDFDGPREKMQKLGEGEGSMTKEEFAKMKQELEAEYLAVFKKTVSSHEVFLQRLSSHPVLSKDRNFHVFLEYDQDLSVRRKNTKEMFGGFFKSVVKSADEVLFTGVKEVDDFFEQEKNFLINYYNRIKDSCVKADKMTRSHKNVADDYIHTAACLHSLALEEPTVIKKYLLKVAELFEKLRKVEGRVSSDEDLKLTELLRYYMLNIEAAK

SEQ ID NO: 242681 - DNA, 1215 bp, Artificial Sequence
  derived and/or modified sequence
atggccgccgtgcccgagctgctgcagcagcaggaggaggacagaagcaagctgagaagcgtgagcgtggacctgaacgtggaccccagcctgcagatcgacatccccgacgccctgagcgagagagacaaggtgaagttcaccgtgcacaccaagaccaccctgcccaccttccagagccccgagttcagcgtgaccagacagcacgaggacttcgtgtggctgcacgacaccctgatcgagaccaccgactacgccggcctgatcatcccccccgcccccaccaagcccgacttcgacggccccagagagaagatgcagaagctgggcgagggcgagggcagcatgaccaaggaggagttcgccaagatgaagcaggagctggaggccgagtacctggccgtgttcaagaagaccgtgagcagccacgaggtgttcctgcagagactgagcagccaccccgtgctgagcaaggacagaaacttccacgtgttcctggagtacgaccaggacctgagcgtgagaagaaagaacaccaaggagatgttcggcggcttcttcaagagcgtggtgaagagcgccgacgaggtgctgttcaccggcgtgaaggaggtggacgacttcttcgagcaggagaagaacttcctgatcaactactacaacagaatcaaggacagctgcgtgaaggccgacaagatgaccagaagccacaagaacgtggccgacgactacatccacaccgccgcctgcctgcacagcctggccctggaggagcccaccgtgatcaagaagtacctgctgaaggtggccgagctgttcgagaagctgagaaaggtggagggcagagtgagcagcgacgaggacctgaagctgaccgagctgctgagatactacatgctgaacatcgaggccgccaaggacctgctgtacagaagaaccaaggccctgatcgactacgagaacagcaacaaggccctggacaaggccagactgaagagcaaggacgtgaagctggccgaggcccaccagcaggagtgctgccagaagttcgagcagctgagcgagagcgccaaggaggagctgatcaacttcaagagaaagagagtggccgccttcagaaagaacctgatcgagatgagcgagctggagatcaagcacgccagaaacaacgtgagcctgctgcagagctgcatcgacctgttcaagaacaactag

SEQ ID NO: 242682 - DNA, 687 bp, Artificial Sequence
  derived and/or modified sequence
atggccgccgtgcccgagctgctgcagcagcaggaggaggacagaagcaagaccaccctgcccaccttccagagccccgagttcagcgtgaccagacagcacgaggacttcgtgtggctgcacgacaccctgatcgagaccaccgactacgccggcctgatcatcccccccgcccccaccaagcccgacttcgacggccccagagagaagatgcagaagctgggcgagggcgagggcagcatgaccaaggaggagttcgccaagatgaagcaggagctggaggccgagtacctggccgtgttcaagaagaccgtgagcagccacgaggtgttcctgcagagactgagcagccaccccgtgctgagcaaggacagaaacttccacgtgttcctggagtacgaccaggacctgagcgtgagaagaaagaacaccaaggagatgttcggcggcttcttcaagagcgtggtgaagagcgccgacgaggtgctgttcaccggcgtgaaggaggtggacgacttcttcgagcaggagaagaacttcctgatcaactactacaacagaatcaaggacagctgcgtgaaggccgacaagatgaccagaagccacaagaacgtggccgacgactacatccacaccgccgcctgcctgcacagcctggccctggaggagcccaccgtgatcaagtag

SEQ ID NO: 242683 - DNA, 810 bp, Artificial Sequence
  derived and/or modified sequence
atggccgccgtgcccgagctgctgcagcagcaggaggaggacagaagcaagctgagaagcgtgagcgtggacctgaacgtggaccccagcctgcagatcgacatccccgacgccctgagcgagagagacaaggtgaagttcaccgtgcacaccaagatcccccccgcccccaccaagcccgacttcgacggccccagagagaagatgcagaagctgggcgagggcgagggcagcatgaccaaggaggagttcgccaagatgaagcaggagctggaggccgagtacctggccgtgttcaagaagaccgtgagcagccacgaggtgttcctgcagagactgagcagccaccccgtgctgagcaaggacagaaacttccacgtgttcctggagtacgaccaggacctgagcgtgagaagaaagaacaccaaggagatgttcggcggcttcttcaagagcgtggtgaagagcgccgacgaggtgctgttcaccggcgtgaaggaggtggacgacttcttcgagcaggagaagaacttcctgatcaactactacaacagaatcaaggacagctgcgtgaaggccgacaagatgaccagaagccacaagaacgtggccgacgactacatccacaccgccgcctgcctgcacagcctggccctggaggagcccaccgtgatcaagaagtacctgctgaaggtggccgagctgttcgagaagctgagaaaggtggagggcagagtgagcagcgacgaggacctgaagctgaccgagctgctgagatactacatgctgaacatcgaggccgccaagtag

SEQ ID NO: 242684 - DNA, 1215 bp, Artificial Sequence
  derived and/or modified sequence
atggccgcagtgcccgagctgctgcagcagcaagaggaggacagatctaaattgagatctgtctccgttgaccttaatgtagacccatctctgcaaatcgacatccctgatgcgttgtcagagcgggacaaggtgaagtttaccgtacacacaaagacaacactacccacattccagtcacctgaattctccgtcacacggcagcacgaagattttgtctggcttcacgataccttgattgaaaccacagactatgcaggtctcattataccccccgcccctacaaagcccgactttgacggccccagagaaaagatgcaaaagctgggtgagggggaagggtcaatgaccaaggaggaattcgccaaaatgaaacaggaactggaggccgaatacctggcggtgtttaagaagacagtgtcgagccacgaggtgttcttacagcgactctcctctcaccctgtgctttccaaggataggaattttcacgtattcctggaatatgaccaggacttgagtgtgcggagaaagaatactaaggagatgttcggaggcttcttcaagagcgtggttaaatcagcggatgaggtgctgttcacaggcgtaaaggaggttgacgatttttttgagcaagagaaaaactttctcatcaattactataaccgcataaaggactcctgcgtcaaggccgacaagatgacccggagccacaagaacgttgcagatgactacatacataccgccgcttgtctgcatagtctggcattggaagagcctactgtcattaaaaagtacctgctcaaggtggccgagctctttgagaagctccggaaggtggaaggccgcgtatcctctgacgaggatctcaaactgaccgaattattgcgatactacatgttaaatattgaggccgccaaggacttactatataggcggaccaaagcgctgattgactacgagaactctaataaggcactggacaaggctagattaaaaagtaaggatgtgaaactggcagaggcacaccagcaagagtgctgtcagaagttcgagcagttaagtgagagcgccaaagaagaactgatcaactttaagcgcaaaagggtggccgcttttagaaagaatctaatcgagatgtccgagctggagattaaacacgctcgtaataacgtatctttattgcaaagctgcatcgacctgttcaaaaacaattag

SEQ ID NO: 242685 - DNA, 1215 bp, Artificial Sequence
  derived and/or modified sequence
atggcggcagtgccggagctgctgcagcagcaggaagaagaccggtctaagcttcggagtgtctccgtggacctgaacgtagatccatctttgcagatcgatattccagacgcactcagcgaacgtgacaaggtcaaatttaccgtacacaccaagacaacacttcctacttttcagagccccgagttttcggttacacgtcagcatgaagatttcgtgtggctccatgacacattaattgagacaactgactatgccggcctaattattcctcccgctccgactaagccagacttcgatggaccgcgggagaaaatgcaaaagttaggggagggggaaggcagtatgactaaagaggagttcgccaagatgaagcaagaactcgaggccgagtacctggcagtgttcaaaaaaaccgtcagtagccatgaagtgttcctgcagcggctcagtagtcatccggtgctgagtaaagaccgcaattttcacgtgttcttagaatacgaccaggatctgtccgttcggaggaagaatactaaagaaatgttcgggggttttttcaaatcagttgtcaagtccgccgacgaagtgcttttcaccggggtgaaggaagttgatgatttcttcgaacaggagaagaacttcctcatcaattactataaccggattaaggacagctgtgtgaaagccgacaaaatgactaggtctcataagaatgtcgccgatgactacatccataccgcggcttgcctgcatagcttggccttggaggaacccacagtgatcaaaaagtacttgctgaaggtggcagagctgtttgagaagctccgcaaggtggagggaagagtgtccagtgacgaggacctcaagttgaccgaactgctgaggtactatatgcttaacattgaggcggcaaaagacctgctatatcgacggactaaagctctcatcgactatgaaaatagtaacaaagccctggacaaggccaggctcaagtccaaagatgtgaagctggccgaggcccatcagcaggaatgctgccagaaatttgagcagctgtctgagtccgccaaggaggaactaattaacttcaagaggaagcgcgtggccgccttcagaaagaatctgattgagatgagcgagttggagatcaagcatgcccgcaacaatgtcagtctgctccagtcatgcatcgatcttttcaaaaacaactag

SEQ ID NO: 242686 - DNA, 687 bp, Artificial Sequence
  derived and/or modified sequence
atggccgccgtgccggagcttctgcagcagcaggaggaggatagatccaagaccacactgccaacatttcaaagccctgaatttagcgtgactcgacagcacgaagatttcgtgtggttgcatgatactctcattgagacgacggattatgcaggcttgattatcccccctgcccccaccaaacctgacttcgacggcccccgagagaaaatgcagaagctaggagagggagaaggcagcatgaccaaggaggagtttgccaagatgaagcaagagctggaagctgaatacctggctgtctttaagaagacggtgtcctctcatgaggtgttccttcagcggttatcgtcacatcctgtgctaagtaaagatcgtaacttccatgtgttcttggagtacgatcaggacctgtcagttcggcgcaaaaataccaaagaaatgttcggaggttttttcaagagtgtggtgaagagtgcagacgaggtgctgttcactggggttaaggaagttgacgatttcttcgaacaggaaaagaattttctcattaactactacaataggatcaaagattcctgtgtgaaggctgacaagatgacccgaagccacaagaacgtagcagatgactacatccacaccgccgcttgcctccactctctggctctcgaggaacctaccgtgataaagtag

SEQ ID NO: 242687 - DNA, 810 bp, Artificial Sequence
  derived and/or modified sequence
atggcggccgtgccagagctgcttcaacagcaagaggaagaccggagcaagctgagatccgtctcagtagacctcaatgtggaccccagcctgcagatcgatataccagacgccctcagtgagcgagacaaagtaaaattcactgtgcacacaaagatccccccagcccccaccaaaccggacttcgatgggccccgggagaaaatgcagaagctgggcgagggagagggatccatgacaaaggaggagttcgctaagatgaaacaggagctggaggctgagtatttagcagtcttcaaaaagacggtatcttcccatgaggtgttcttacagaggcttagcagccaccctgtgcttagcaaagatcggaacttccatgtgttcctggaatatgaccaggacttatccgtacggcggaagaataccaaagaaatgtttggcgggtttttcaagagcgttgtgaaatctgccgatgaggtcctgttcacaggggtcaaggaagtcgatgatttcttcgaacaagagaagaattttcttattaactattacaatcgcattaaggacagttgtgtcaaagctgacaagatgaccagaagtcataagaacgtcgcagatgattacatccacaccgccgcatgccttcatagtctcgctctcgaggagcccaccgtgataaagaaatatttactgaaagtcgctgaacttttcgagaaactgcgaaaagtcgaagggcgggtgtctagcgatgaggacctgaaactcactgagttgcttagatattacatgcttaacatagaggccgccaagtag

SEQ ID NO: 242688 - DNA, 1215 bp, Artificial Sequence
  derived and/or modified sequence
atggctgctgtgcctgagctgctgcagcagcaggaggaggacaggagcaagctgcggtctgtgtctgtggacctgaatgtggaccccagcctgcagattgacatcccagatgccctgtctgagcgggacaaggtgaagttcaccgtgcacaccaagaccaccctgcccaccttccagagccctgagttctctgtgacccggcagcacgaggactttgtgtggctgcatgacaccctcatcgagaccacagattatgccggcctcatcatccccccagcccccaccaagccagactttgatggcccccgggagaagatgcagaagctgggggagggggagggctccatgaccaaggaggagtttgccaagatgaagcaggagctggaggccgagtacctggccgtgttcaagaagacagtgagcagccatgaggtgttcctgcagaggctgagcagccaccctgtgctgagcaaggacaggaacttccacgtgttcctggagtatgaccaggacctgtctgtgcggaggaagaacaccaaggagatgtttggaggcttcttcaagtctgtggtgaagtctgcagatgaggtgctcttcaccggggtgaaggaggtggatgacttctttgagcaggagaagaacttcctgatcaactactacaaccgcatcaaggacagctgtgtgaaggctgacaagatgaccaggagccacaagaatgtggctgatgactacatccacacagctgcctgcctgcacagcctggccctggaggagcccaccgtcatcaagaagtacctgctgaaggtggccgagctgtttgagaagctgaggaaggtggagggccgggtgtccagtgatgaggacctgaagctgacagagctgctgcgctactacatgctgaacatcgaggccgccaaggacctgctgtacagaaggaccaaggccctgattgattatgagaacagcaacaaggccctggacaaggcccggctgaagagcaaggatgtgaagctggccgaggcccaccagcaggagtgctgccagaagtttgagcagctgtctgagagcgccaaggaggagctgatcaacttcaagaggaagagggtggccgccttcaggaagaacctgattgagatgtctgagctggagatcaagcacgccaggaacaacgtgtccctgctgcagagctgcatcgacctcttcaagaacaactag

SEQ ID NO: 242689 - DNA, 687 bp, Artificial Sequence
  derived and/or modified sequence
atggctgctgtgcctgagctgctgcagcagcaggaggaggacaggagcaagaccaccctgcccaccttccagagccctgagttctctgtgacccggcagcatgaagattttgtgtggctgcatgacaccctgattgagaccacagattatgccggcctcatcatccccccagcccccaccaagccagactttgatggcccccgggagaagatgcagaagctgggggagggggagggctccatgaccaaggaggagtttgccaagatgaagcaggagctggaggccgagtacctggccgtgttcaagaagacagtgagcagccatgaggtgttcctgcagaggctgagcagccaccctgtgctgagcaaggacaggaacttccacgtgttcctggagtatgaccaggacctgtctgtgcggaggaagaacaccaaggagatgtttggaggcttcttcaagtctgtggtgaagtctgcagatgaggtgctcttcaccggggtgaaggaggtggatgacttctttgagcaggagaagaacttcctgatcaactactacaaccgcatcaaggacagctgtgtgaaggctgacaagatgaccaggagccacaagaatgtggctgatgactacatccacacagctgcctgcctgcacagcctggccctggaggagcccaccgtcatcaagtag

SEQ ID NO: 242690 - DNA, 810 bp, Artificial Sequence
  derived and/or modified sequence
atggctgctgtgcctgagctgctgcagcagcaggaggaggacaggagcaagctgcggtctgtgtctgtggacctgaatgtggaccccagcctgcagattgacatcccagatgccctgtctgagcgggacaaggtgaagttcaccgtgcacaccaagatccccccagcccccaccaagccagactttgatggcccccgggagaagatgcagaagctgggggagggggagggctccatgaccaaggaggagtttgccaagatgaagcaggagctggaggccgagtacctggccgtgttcaagaagacagtgagcagccatgaggtgttcctgcagaggctgagcagccaccctgtgctgagcaaggacaggaacttccacgtgttcctggagtatgaccaggacctgtctgtgcggaggaagaacaccaaggagatgtttggaggcttcttcaagtctgtggtgaagtctgcagatgaggtgctcttcaccggggtgaaggaggtggatgacttctttgagcaggagaagaacttcctgatcaactactacaaccgcatcaaggacagctgtgtgaaggctgacaagatgaccaggagccacaagaatgtggctgatgactacatccacacagctgcctgcctgcacagcctggccctggaggagcccaccgtcatcaagaagtacctgctgaaggtggccgagctgtttgagaagctgaggaaggtggagggccgggtgtccagtgatgaggacctgaagctgacagagctgctgcgctactacatgctgaacattgaagctgccaagtag

SEQ ID NO: 242691 - DNA, 1215 bp, Artificial Sequence
  derived and/or modified sequence
atggccgccgtgcccgagctgctgcagcagcaggaggaggaccggagtaagctgcgtagcgtaagcgtagatctgaacgtggatccatccttgcagatcgacataccagacgctctcagcgagcgcgacaaggtaaaatttacggtgcacaccaagaccacgctgccaaccttccagagcccagagttctctgtaacccgccaacatgaggacttcgtatggttacacgacactctcatagaaacgactgattacgctggcttgataataccacctgctcctaccaaacctgactttgacggcccgagagaaaagatgcagaaacttggcgaaggggagggcagtatgacaaaggaagaatttgccaagatgaaacaagagttggaagctgagtacctggctgtgttcaaaaaaaccgtgagctctcatgaagtgttccttcaacggctttcaagccatccggtattgagtaaagaccgcaatttccacgtgttcttggagtatgatcaagatctgtctgtccgcaggaaaaataccaaggaaatgttcggcggcttctttaagtctgtagtcaagtctgctgacgaggtgctttttactggagtaaaagaggtggacgatttctttgagcaggagaagaactttctcattaattattataatcgtataaaggacagttgtgtgaaagcagacaagatgactcgcagccataaaaacgtagcagatgattacatccacactgccgcctgtctacactcccttgctttggaggagcccaccgtgataaaaaaatacctcttgaaggtggccgaactctttgagaagctgaggaaagtagagggccgagtttcttccgatgaagacctcaaactaaccgaactgctgagatactatatgttaaatattgaggcagccaaggatctgctgtatagaaggactaaagccctcattgactacgagaatagcaataaagctttggataaagcacgactgaagagcaaagatgtgaaactggccgaggctcatcagcaggaatgctgtcagaaatttgagcagttgagtgaatcagctaaagaggaactgatcaatttcaagagaaaacgcgtggccgcatttagaaagaacctgatcgaaatgagcgaacttgagatcaagcacgcgcggaataacgtttcccttctacagagctgcatcgacctattcaagaacaactag

SEQ ID NO: 242692 - DNA, 1215 bp, Artificial Sequence
  derived and/or modified sequence
atggccgccgtgcccgagctgctgcagcagcaggaggaggaccggtccaaacttagatcggtgagtgttgatctcaacgtggacccttcgctccaaattgacattcctgacgctctgagtgagcgggacaaagttaagttcacagtgcacaccaaaacaaccttaccaaccttccagtcccccgagttctctgtcactagacagcacgaggatttcgtatggttacacgataccttgatcgaaactacagactatgccggacttataatcccccctgcccccactaaaccggacttcgacgggcctcgggagaaaatgcagaaactaggagaaggagaaggcagtatgactaaggaggagttcgcgaaaatgaagcaggagctcgaggcagagtatctcgctgtgtttaagaagacagtttcgagtcatgaggtgttccttcagcgcctgtcttcccaccctgtcctcagcaaggaccgcaactttcacgtgttcctggagtatgatcaagatctttcggttagacggaagaatacgaaagagatgtttggaggcttttttaaatcagtcgttaaatccgctgatgaagtgctcttcactggtgtcaaggaggtggacgacttctttgagcaggaaaaaaacttcctgatcaactattataacagaatcaaggacagctgcgtgaaggctgataagatgacgcgatcacacaagaatgtggccgacgactatattcacacggccgcctgccttcattctttggccttggaggaaccaactgttattaaaaagtacctgttgaaagttgctgagctgttcgagaagctgaggaaggtggagggccgcgtctcatccgatgaagacctgaaacttactgaactgctgcggtactatatgctaaatatcgaggccgctaaggacttgctctatcgcaggacgaaggcgttgattgactatgagaacagcaacaaagcccttgataaggcccggctgaagtctaaagacgtgaaactggcggaagcgcatcagcaggagtgttgccagaaattcgaacagctgagtgaaagtgccaaggaagagcttattaatttcaagagaaaacgggtggccgctttcagaaagaaccttattgagatgagtgaactcgagataaagcatgccaggaacaacgttagtttgctccagtcatgtattgatttgtttaaaaacaactag

SEQ ID NO: 242693 - DNA, 687 bp, Artificial Sequence
  derived and/or modified sequence
atggccgccgtgcccgagctgctgcagcagcaggaggaggaccggagcaagaccactctgcccaccttccagtcccccgagttcagcgtgacgcggcagcatgaggacttcgtgtggcttcacgacaccctcattgaaactactgattacgctggtctgattataccaccggcacctactaagccagactttgatggcccacgagaaaaaatgcaaaagcttggggagggggaggggtctatgaccaaggaggaattcgccaaaatgaagcaggagctcgaagcagagtacctagccgtttttaaaaagaccgtttcttctcatgaggttttcctccagaggttatcgtcccatcccgttttatcgaaggatcgcaatttccacgtctttctggaatatgaccaggatcttagtgtccgcaggaagaataccaaagagatgttcggaggattcttcaagtctgtggttaagtcggccgatgaggtccttttcacaggcgttaaggaggttgatgacttcttcgagcaggagaaaaacttcctgatcaattactataatcgaatcaaggactcctgcgtcaaggcagacaaaatgacccgctcccataagaatgtagctgatgattatatccacaccgcagcctgcctgcactctttagctctagaagagccaacagtgatcaagtag

SEQ ID NO: 242694 - DNA, 810 bp, Artificial Sequence
  derived and/or modified sequence
atggccgccgtgcccgagctgctgcagcagcaggaggaggaccggtctaaattacggtccgtgtccgtggatcttaacgttgacccatcactgcagattgacatccctgacgccctgagtgaaagagataaagttaagtttaccgtgcacactaagatcccccccgcccctacaaaaccagacttcgacggtcctagggagaagatgcagaagctgggcgagggggaggggtccatgacaaaggaggagtttgctaagatgaagcaggaactggaagctgagtacctggcggtgtttaagaagacagtcagctcacacgaggttttcctgcagcggctctcctcacatcctgtcctgagcaaggacagaaactttcacgtgttccttgaatacgatcaggacctttccgttaggcgcaagaatactaaggaaatgttcggcggtttcttcaagagcgtggtaaagagcgcagacgaggtgctatttacaggggtcaaagaagtggatgacttttttgagcaagagaaaaatttcctgattaattattacaaccggatcaaagatagttgtgtcaaggcagacaaaatgacgagatcacacaagaatgtcgccgacgactatatccatactgccgcttgccttcattctctggccttggaagaaccaactgtgatcaagaagtatctgctgaaagtagctgagttatttgaaaagttgaggaaagtggaggggcgcgtgagctccgacgaggatctgaagctcacagagctgctccggtattacatgttaaatatagaagcagctaagtag

SEQ ID NO: 242695 - DNA, 1215 bp, Artificial Sequence
  derived and/or modified sequence
atggcagccgtcccagagctgttgcagcagcaagaggaggacaggtcgaagttgcgatcggtgtcagtcgatttaaatgttgacccatctctccagatcgacataccggacgccctgtccgagcgcgacaaggttaagttcacagttcacactaaaaccactctgcctacatttcagagtcccgagtttagtgttacgcggcagcatgaagacttcgtgtggctacacgataccctgatcgaaaccacagactatgccggactgattataccaccagccccaacaaaacccgacttcgacggcccacgagaaaaaatgcagaaactaggagagggggaaggatctatgacaaaagaggagtttgccaagatgaaacaggagcttgaggctgagtatctggccgtgtttaaaaaaaccgtcagctcccacgaagtgttcctgcagaggctgtccagccacccggtgctatccaaagacaggaacttccacgtgtttttggagtacgatcaggatctttctgtccggaggaagaatactaaggagatgttcggaggcttctttaaaagtgtggtgaagtcagctgacgaagtgctgttcacgggggtgaaagaggtggacgattttttcgaacaagaaaagaactttctgattaactactacaatcgcattaaagattcatgcgtcaaggccgataagatgacccgctcccacaaaaatgtggctgatgactacattcacaccgcggcttgcctacacagcctggccctagaggaacctaccgtgataaagaagtacctcctgaaagttgcggagctgttcgaaaagctgagaaaagtcgaaggacgggtctcttctgacgaagatctcaagctgactgagctcctgcgttactatatgctgaatattgaggctgcaaaggatctgctttaccgcaggactaaagcgctcatcgattacgaaaacagcaacaaggccttggacaaagccaggctgaaatccaaagacgtgaaactcgccgaggcgcaccagcaagagtgttgtcagaaattcgagcagctgagtgaatccgccaaggaggaactcataaattttaagaggaagagagtcgccgctttccggaagaacctcattgagatgtcagaactggagataaagcacgctcggaacaacgtgagtctgctgcagtcctgcattgatctgtttaaaaataattag

SEQ ID NO: 242696 - DNA, 1215 bp, Artificial Sequence
  derived and/or modified sequence
atggccgctgttcccgaattgctccaacaacaggaggaagaccgttctaaactgcggagcgtgtcagtcgatctgaacgtggatccttcactgcaaatcgatattccggacgccctgagcgaaagggataaagtcaagtttaccgtgcacacaaaaaccaccttaccaacattccagtcccccgagttttcagtgacccgacagcacgaggacttcgtttggctccatgataccctgattgaaaccaccgattacgctggtctgattataccacctgcgccaacgaaacccgattttgacggtcccagagaaaagatgcagaagctaggagaaggggaaggctctatgacgaaggaggaattcgccaagatgaagcaggagcttgaagctgagtatctggccgtttttaaaaaaacagtcagcagccacgaggtctttctgcagcggttgtcctcacacccagtgctgtctaaggatagaaattttcacgtcttcttggaatatgatcaggacctctccgtgcggaggaaaaacacgaaggaaatgttcggtggatttttcaagtctgtggtgaagagcgctgacgaggtcctgttcaccggcgttaaagaagtagacgatttcttcgaacaggaaaagaatttcctgatcaattattacaatcgaataaaggacagttgcgttaaggcagacaaaatgaccagaagtcacaagaatgtggcagatgattatattcacacagctgcctgtctgcacagtctggccctcgaagaaccaacagtgatcaagaagtaccttctcaaggtggccgagttgtttgaaaaactcagaaaggtggaaggacgcgtctcctctgatgaggacttaaagctgacggagctcctgagatattatatgttaaatatcgaagccgctaaggatctgctgtaccgacggacaaaggcccttattgactacgaaaatagcaataaggccttggataaggcgaggttgaagagcaaggacgtcaagcttgcggaggcccaccaacaggagtgttgtcagaagtttgaacagctatccgagagtgctaaggaggagctcataaacttcaagcggaaaagagttgccgctttcaggaagaacctcatcgagatgtctgagctggagattaagcacgcacggaacaacgtgagtcttttgcaatcgtgtattgatttatttaagaataattag

SEQ ID NO: 242697 - DNA, 687 bp, Artificial Sequence
  derived and/or modified sequence
atggcagccgtccctgagttgctccagcagcaggaggaggatagatcaaaaactactctgcctacatttcagtctcctgaattttccgtcacgaggcaacacgaagatttcgtctggctgcatgacaccttaattgagactacggattacgcaggactaatcataccgccagccccaactaaacccgacttcgatggcccacgcgagaagatgcagaagctgggcgagggtgaaggaagtatgactaaggaagaatttgccaaaatgaagcaagaactggaggccgaatacttggcagtgtttaagaaaactgtgtcttcccatgaagtttttctccaacgcctctccagccacccggtgctatcaaaggatcgaaacttccatgtgtttctcgaatacgaccaggacctttctgtgcggaggaaaaatacaaaggaaatgttcggtggcttcttcaaaagcgtggtgaagagtgccgacgaagtgttatttacaggggttaaggaagtcgatgattttttcgagcaagagaagaacttcctcattaactactacaaccggatcaaggacagctgcgtcaaagccgacaaaatgacacgctctcataaaaatgtcgccgacgactatattcatactgctgcgtgtctgcacagcttggccctggaggagcccactgttataaaatag

SEQ ID NO: 242698 - DNA, 810 bp, Artificial Sequence
  derived and/or modified sequence
atggccgcagtgcctgaactgctccagcagcaggaggaagaccgttccaagttgcgcagcgtctcagtcgacctgaacgtagaccccagccttcagattgatattcctgatgctctttcggaaagggataaggtgaaatttaccgtccatacaaagatcccacctgcgccaaccaagccagacttcgacggccctcgcgagaaaatgcagaagctgggcgaaggcgaagggagcatgactaaagaggagttcgcgaagatgaaacaggagctggaggctgaatacctcgccgtctttaaaaagacagtgagctcacacgaggtcttcctccagcgactgtcaagtcatcctgtgctgagtaaggacaggaatttccacgtatttctagaatacgatcaagacctctccgtgaggagaaaaaatactaaggagatgtttgggggtttcttcaagtctgtcgtcaagagcgccgacgaagtcctgttcacaggagtcaaagaggtggatgacttcttcgagcaggagaagaattttctgattaactattataacaggattaaagattcctgcgtgaaggcagacaagatgaccaggagtcacaaaaatgtcgcagacgactacatccataccgccgcttgtttgcattcactagcattagaagagccaaccgttattaaaaaatacctgttgaaagtggctgagctgtttgaaaaactgagaaaggtggaggggcgtgtgagctctgacgaagatctgaagctgacagaattgctgcggtattatatgttaaatatcgaggcagcaaagtag

SEQ ID NO: 242699 - DNA, 2148 bp, Artificial Sequence
  derived and/or modified sequence
ggggcagctgggatggtggcggagtccggaggcctcctgccgccgtcgggcagggaggccggcggaggcggggccgtggccgcccccgagaggcgcccaggcggcggcggcggcggcccagcttcttctttcctcgcacagccaggcggcccctgctcgagtcccgcgtcgccatggccgcggttcccgagttgctgcagcagcaggaggaggaccgcagcaagctgagatctgtatctgtggacctgaatgttgatccctcgcttcagattgacatacctgatgcgctcagtgagagagacaaagtcaaatttacagtgcacacaaagaccacactgcccacgtttcagagcccagagttttctgttacaaggcaacatgaagactttgtgtggctacatgacactcttattgaaacaacagactatgctgggcttattattccacctgctcctacgaagcccgactttgatggtcctcgagagaagatgcagaaactgggagaaggtgaagggtctatgaccaaagaagaatttgccaagatgaaacaagaactggaagctgagtatctcgctgtgtttaagaagactgtgtcctcccatgaagtctttcttcagcggctttcttctcaccctgttctcagtaaagatcgcaactttcatgttttcctggaatatgatcaggatctaagtgttaggcggaaaaatactaaagagatgtttggtggcttcttcaaaagtgtggtgaaaagtgctgatgaagtcctttttactggagttaaggaggtagatgacttctttgagcaagagaagaacttccttattaactattacaataggatcaaagattcttgtgtgaaagctgacaaaatgaccagatctcataaaaatgttgccgatgactatatccacaccgcagcctgcttacatagcctggctttagaagagcccacagtcatcaaaaagtacctattgaaggttgctgagctatttgaaaaactaaggaaagtagagggtcgagtttcatcagatgaagatttgaagctaacagagctcctccgatactacatgctcaacattgaagctgctaaggatctcttatacagacgcaccaaagccctcattgactatgagaactcaaacaaagctctggataaggcccggttaaagagcaaagacgtcaagttggctgaggcacaccagcaggagtgctgccagaaatttgaacaactttccgaatctgcaaaagaagaactgataaatttcaaacggaagagagtggcagcatttagaaagaatctaattgaaatgtctgaactggaaataaaacatgccaggaacaatgtctcccttttgcagagctgtattgacttgttcaagaataactgatatgccttcactcagaagaaaagaaatgaatgtgaaagaaagccaagcatcacttgcacttaaatcattaccacggaagatatattagcttcaactttagtttaaaattatgtgaataaatattttgatttctacaaatcttaacatttaaccatgttggtttaaaaatattattgcttgctacttggacataactaatttttccttgtgcatttaatacctctgggcagaatccaaatactgggttctcccgtagttcgtctttagttactaagaaagggtgtaggacacattagccttctggaaacaagtagaagccatcacctggcccatgtccctacaaacccatgattgtcagggaggtgccagttacagcaggtgattcagctacttgaggtcggtaacagaccttccattcctcactgaaggtggggtttgtgtttttgttttgccctgttactccactggtagtcatctggtgtttgtactataacaacagcaagaaaatctcatttatctttatatactctttgcacctcctttttttagtcgagatataaatatttgaggggagagaaatatctacaggtatatatggaaacaaataatgtggtctgctttataagatggccagatctacattaggaaaagtataagccccctccctaatggccgctggggggtgagggcggtgtgttgtatgtctttgggtgtttgtttttttataaagcatataataaaataatcgtgctactaatgt

SEQ ID NO: 242700 - DNA, 2288 bp, Artificial Sequence
  derived and/or modified sequence
ggcctccgccaacgcgccaccagttagaggcagggagtacctctccgagcggaagggccggcgtctccgaagcgcgggagcctccaaatcgcgcccttctgctctcacgagatctggtgacgtcagcgctcgctgccatcttggactcgggctgagtaataaattccccccgcaccgaaacgcggtctttctctagacgcgtcttgctgggagagtgtccgttgcttcccgtccgtgtcgcggccctgcggttggcggcctcctcgtggagcggagcaaggccaggcggcccctgctcgagtcccgcgtcgccatggccgcggttcccgagttgctgcagcagcaggaggaggaccgcagcaagctgagatctgtatctgtggacctgaatgttgatccctcgcttcagattgacatacctgatgcgctcagtgagagagacaaagtcaaatttacagtgcacacaaagaccacactgcccacgtttcagagcccagagttttctgttacaaggcaacatgaagactttgtgtggctacatgacactcttattgaaacaacagactatgctgggcttattattccacctgctcctacgaagcccgactttgatggtcctcgagagaagatgcagaaactgggagaaggtgaagggtctatgaccaaagaagaatttgccaagatgaaacaagaactggaagctgagtatctcgctgtgtttaagaagactgtgtcctcccatgaagtctttcttcagcggctttcttctcaccctgttctcagtaaagatcgcaactttcatgttttcctggaatatgatcaggatctaagtgttaggcggaaaaatactaaagagatgtttggtggcttcttcaaaagtgtggtgaaaagtgctgatgaagtcctttttactggagttaaggaggtagatgacttctttgagcaagagaagaacttccttattaactattacaataggatcaaagattcttgtgtgaaagctgacaaaatgaccagatctcataaaaatgttgccgatgactatatccacaccgcagcctgcttacatagcctggctttagaagagcccacagtcatcaaaaagtacctattgaaggttgctgagctatttgaaaaactaaggaaagtagagggtcgagtttcatcagatgaagatttgaagctaacagagctcctccgatactacatgctcaacattgaagctgctaaggatctcttatacagacgcaccaaagccctcattgactatgagaactcaaacaaagctctggataaggcccggttaaagagcaaagacgtcaagttggctgaggcacaccagcaggagtgctgccagaaatttgaacaactttccgaatctgcaaaagaagaactgataaatttcaaacggaagagagtggcagcatttagaaagaatctaattgaaatgtctgaactggaaataaaacatgccaggaacaatgtctcccttttgcagagctgtattgacttgttcaagaataactgatatgccttcactcagaagaaaagaaatgaatgtgaaagaaagccaagcatcacttgcacttaaatcattaccacggaagatatattagcttcaactttagtttaaaattatgtgaataaatattttgatttctacaaatcttaacatttaaccatgttggtttaaaaatattattgcttgctacttggacataactaatttttccttgtgcatttaatacctctgggcagaatccaaatactgggttctcccgtagttcgtctttagttactaagaaagggtgtaggacacattagccttctggaaacaagtagaagccatcacctggcccatgtccctacaaacccatgattgtcagggaggtgccagttacagcaggtgattcagctacttgaggtcggtaacagaccttccattcctcactgaaggtggggtttgtgtttttgttttgccctgttactccactggtagtcatctggtgtttgtactataacaacagcaagaaaatctcatttatctttatatactctttgcacctcctttttttagtcgagatataaatatttgaggggagagaaatatctacaggtatatatggaaacaaataatgtggtctgctttataagatggccagatctacattaggaaaagtataagccccctccctaatggccgctggggggtgagggcggtgtgttgtatgtctttgggtgtttgtttttttataaagcatataataaaataatcgtgctactaatgt

SEQ ID NO: 242701 - DNA, 772 bp, Artificial Sequence
  derived and/or modified sequence
gagaggcgcccaggcggcggcggcggcggcccagcttcttctttcctcgcacagccaggcggcccctgctcgagtcccgcgtcgccatggccgcggttcccgagttgctgcagcagcaggaggaggaccgcagcaagaccacactgcccacgtttcagagcccagagttttctgttacaaggcaacatgaagactttgtgtggctacatgacactcttattgaaacaacagactatgctgggcttattattccacctgctcctacgaagcccgactttgatggtcctcgagagaagatgcagaaactgggagaaggtgaagggtctatgaccaaagaagaatttgccaagatgaaacaagaactggaagctgagtatctcgctgtgtttaagaagactgtgtcctcccatgaagtctttcttcagcggctttcttctcaccctgttctcagtaaagatcgcaactttcatgttttcctggaatatgatcaggatctaagtgttaggcggaaaaatactaaagagatgtttggtggcttcttcaaaagtgtggtgaaaagtgctgatgaagtcctttttactggagttaaggaggtagatgacttctttgagcaagagaagaacttccttattaactattacaataggatcaaagattcttgtgtgaaagctgacaaaatgaccagatctcataaaaatgttgccgatgactatatccacaccgcagcctgcttacatagcctggctttagaagagcccacagtcatcaaaaa

SEQ ID NO: 242702 - DNA, 840 bp, Artificial Sequence
  derived and/or modified sequence
gccaggcggcccctgctcgagtcccgcgtcgccatggccgcggttcccgagttgctgcagcagcaggaggaggaccgcagcaagctgagatctgtatctgtggacctgaatgttgatccctcgcttcagattgacatacctgatgcgctcagtgagagagacaaagtcaaatttacagtgcacacaaagattccacctgctcctacgaagcccgactttgatggtcctcgagagaagatgcagaaactgggagaaggtgaagggtctatgaccaaagaagaatttgccaagatgaaacaagaactggaagctgagtatctcgctgtgtttaagaagactgtgtcctcccatgaagtctttcttcagcggctttcttctcaccctgttctcagtaaagatcgcaactttcatgttttcctggaatatgatcaggatctaagtgttaggcggaaaaatactaaagagatgtttggtggcttcttcaaaagtgtggtgaaaagtgctgatgaagtcctttttactggagttaaggaggtagatgacttctttgagcaagagaagaacttccttattaactattacaataggatcaaagattcttgtgtgaaagctgacaaaatgaccagatctcataaaaatgttgccgatgactatatccacaccgcagcctgcttacatagcctggctttagaagagcccacagtcatcaaaaagtacctattgaaggttgctgagctatttgaaaaactaaggaaagtagagggtcgagtttcatcagatgaagatttgaagctaacagagctcctccgatactacatgctcaacattgaagctgctaag

SEQ ID NO: 242703 - protein, 416 aa, Artificial Sequence
  derived and/or modified sequence
MATEPPSPLRVEAPGPPEMRTSPAIESTPEGTPQPAGGRLRFLNGCVPLSHQVAGHMYGKDKVGILQHPDGTVLKQLQPPPRGPRELEFYNMVYAADCFDGVLLELRKYLPKYYGIWSPPTAPNDLYLKLEDVTHKFNKPCIMDVKIGQKSYDPFASSEKIQQQVSKYPLMEEIGFLVLGMRVYHVHSDSYETENQHYGRSLTKETIKDGVSRFFHNGYCLRKDAVAASIQKIEKILQWFENQKQLNFYASSLLFVYEGSSQPTTTKLNDRTLAEKFLSKGQLSDTEVLEYNNNFHVLSSTANGKIESSVGKSLSKMYARHRKIYTKKHHSQTSLKVENLEQDNGWKSMSQEHLNGNVLSQLEKVFYHLPTGCQEIAEVEVRMIDFAHVFPSNTIDEGYVYGLKHLISVLRSILDN

SEQ ID NO: 242704 - DNA, 1251 bp, Artificial Sequence
  derived and/or modified sequence
atggccacagagccacctagtcctctgcgcgtcgaagccccagggccaccggagatgagaacctctcctgccattgagagtacccctgaggggacaccccagccagctggggggcgcctgaggtttctgaacggttgtgtgcccctgtctcaccaagtcgcaggccacatgtatggtaaggataaggtcgggattttacagcatcccgatggcacagtccttaaacagcttcaaccccctcccaggggaccgcgcgagctggagttctataatatggtatacgctgccgactgttttgatggcgtgctgctggagctgaggaaatacttgccaaaatactacggcatttggtccccccctactgcccccaacgacctctacttgaagttggaggatgtcactcataaatttaataaaccatgcattatggacgtaaaaatcggacagaaatcctatgaccccttcgcgtcctccgagaaaattcagcagcaggtgagtaagtacccactgatggaggagatagggtttcttgtgctggggatgcgcgtgtatcacgttcatagtgatagttacgagaccgagaatcaacattatggccgcagtctgactaaggagactatcaaagacggcgtcagcagattttttcataacggctattgtttacgcaaagatgccgtagccgcctccatccagaaaattgagaaaatcctccaatggtttgagaaccaaaagcaacttaacttctacgctagcagcctgctgtttgtctacgagggcagttctcagcctaccacaactaaattgaacgacagaaccctcgctgaaaaatttctgtctaaaggccagcttagtgacactgaggtcttggaatataataataacttccatgtgttgagctccacagctaatggaaagatcgaatcctctgtgggcaaaagcctaagtaagatgtacgcacgccacaggaaaatctacactaaaaagcaccattcacaaacttccctgaaggtcgagaacctggagcaggacaacggctggaagagcatgtcccaggagcacctgaacggcaacgtactctctcaactggagaaggtgttctaccacctgccaacaggatgccaagaaattgcagaggtagaagtgcggatgatcgactttgctcacgtgttcccatctaatacaatcgatgaggggtacgtgtatggtctcaagcacctaatttctgtgctgcggagcattctggataattag

SEQ ID NO: 242705 - DNA, 6133 bp, Artificial Sequence
  derived and/or modified sequence
gccgtcagggccccagggagcgcggggcgccgctgctgctgttcttcggctcggttctgtctaccgggcagcgccggggccggcggctgcggcggcagaggaacaggagccgggagccgcgttccgccgagagttgggcagaggagcgcccgcgccccggcggcgtcatgggccccctccccgcgcttcagagggcaccagccgcgggaacccccgggcctcctcgcgcccgagcctgagcgaccctcgggttctccggcgccccctccctcgccctattttttttcctactctcgctgccgttaccgcttctgctctccgttatggcaacagagccaccatcccccctccgggtcgaggcgccgggccccccagaaatgcggacctcaccggcgatcgagtccacccctgagggcaccccgcagccggcgggcggcagactccgcttcctcaacggctgcgtgcccctctcgcatcaggtggccgggcacatgtacgggaaggacaaagtgggtatactgcaacatccagatggcacagttttgaaacagttacaaccacctccaaggggcccaagagagctggaattctataatatggtttatgctgctgactgttttgatggtgttcttctagagctacgaaaatatttgccaaaatattatggcatctggtcacctcccactgcaccaaacgatttatacctaaaactggaagatgtgacccataaatttaataagccctgtataatggatgtaaagatagggcaaaaaagctatgatccttttgcctcatctgagaagattcagcaacaggtcagcaagtacccattaatggaagagattgggttcttggtgcttggcatgagggtttatcatgttcattccgatagctatgagacagaaaaccagcattacggaagaagcttaacaaaagaaactataaaggatggagtctccagattttttcataatgggtactgcttaagaaaagatgctgttgctgccagtattcagaagattgagaaaattctgcagtggtttgaaaaccagaagcagcttaatttttacgcaagttcattactctttgtttatgaaggttcatctcagccaaccactacaaaattgaatgacagaactttggcagaaaagtttttgtccaaaggacaactgtcagacacagaagtactagagtacaataataactttcatgtgttaagttccacagctaatggaaaaatagagtcttcagtgggcaaaagcttgtccaagatgtatgcgcgtcacaggaaaatatatacaaaaaagcatcacagtcagacttcattgaaagttgaaaatctggagcaagacaatgggtggaaaagcatgtcacaggaacatttaaatggaaatgtactttcccaactggaaaaagttttctaccatcttcccactggttgccaagagattgctgaagtagaagtgcgaatgatagattttgctcatgtgttccctagcaacacaatagatgagggatatgtttatgggctaaagcatttaatttctgtacttcgaagtattttagacaattgaatcctctgttgcagtctttttaaggggtgggccaatcataatgaagaggggcagtcaatatctgcacctttaatgctatgtaaaaaatttgtattatgagtcgacattttatttgtctttatacttttggaagaatggttaacttttttataatcttactcaggaaaactaactatttgttcattagaaaactatgaagaataaagaaacttaggaatgttaagcagggaatgtggtggtacatggcttaaacatcttttttggctcaagcaaaatgcaaaccattattcagtcattaagagtttagttagctttctgtagccaattcatgaaatctctgtccacccagccttgacaatgagccatatctaaaatattacattattagaacacctaccaaaatctcgaaagcacaggttgatgtccttagtattgctatgtatgaagttactaaaactggagaaaattctacttcagaaataagtactgtttaggttttatattaaaagttcagaccagcatatcaaagggtgctccttagtgaaatgatttagaattgttgcattccaaaagcaggttttctctttaatttttacatctctctctcaaaatattatacttcatgaaaaagacaattgatgtggatgacaacaacaaagtcttgaaattaagggcacactaattgtccttactggggttaggggaagagagatattattttcaaggaacaaaatattttcctttacaatctttcattcatgagaaaattggaatataaatttattacattgtgaaagtatcataaaccatatacctttgtatctaaatgcagcttcaaaaaagtaaataattgaagttttatttctcctctaaataacttgaatttttttctttaaaaatttatgtatttatatgtccccatttagttaagtggtagtgtaaatgtatgttgttaaaaacagtttctcagaattatagtaagcaatgaaagacaatatctaattaggttgttatcaaaaatactgtgtgtaaattagtccgtaatatagggtttggtgcgtatctatattcatgcttctatttcactcttcctcaaaacagttttatattatgttgaccagtgaaattgtaacttaatttcatggggacaggggcagtgctacagttcctggaaaaattagatttgtattatctttgtttcacacccaccaccttaaaaaaaaatcaactagttatttgtcatttaaaacatttaaaactttgagtcttcaaatacatttgatgttaatgctgccattacttgcacttccattcactaataacatttctaggtagttatcagttttgtcatattcctggaaaatattttggggttgtaaattctttctcctctttttcttctggagttacaaattgaatttttaaatccgagcacctttattgtggtgtggagaaaattatcacaattttatgtttattttaccttctcagccttctctgagggcactttgcaaatacctgagtccaaacagaagtaccaactaaatgctctatgaactctatccttagtaaatctattaaacctgaataatttaaaagatcatgttcattttgtaatagcaaaatttgattttaattttttatttagaattggtgtatttatcatagggacttccaatttttcttcactttttgaatggatattggctatagttttatgttttaacgggaatgaatttcaagtcataataatcagaatttttagttttacttttttcttttacaatatggattttgttgttatttggatagtggttcaataaatcttaagctcagataattaaacactattttgaatcttaacaagatactgaggctttttttgtatgggatgatatcaacctatgtacaatgaatttaataaacttaagtattgtcagattttttgcacattttagctcaataaaatcttaatgttcaagatttttttatctgcatttggaaatacaattttgtaaaatcaatgtcttacctttttgatacaatagatcatgttttgtttttaataaagcaagaagcccttttatctgttgtttttcagggaagggattaacatttaattctgtttgtttacatttgttatcattgttatccaatgctcattttatgttgctttataagtaggcttaggtataacagaataagtatctgtttatctaatctacatgtgactatcttagtctctctcggtcacttaatattatgctgaaatttaccactgtggggatgaatgatcgctattcaccaagtatatttgaacatgtaaatgcttaagaaataagcataatgcggatatagtttgggttaataggattctcatagttttttttcccctatgaaacataagtaatgattttagtgtatttcttatggaatacactcatttaaaaaggactttaagaaattgtggatgtgaataatacctttctctaataaaaatttaaattgtataatagttttataatatttacattaattgatattttaatatggatagacattgcatagattcaaataaattaaaatcaatgataaatgctaaatattttatctaaatagtttttcaagaaacagttatggaaatgtgtatattaaatggctctaatgtggagcttgtggtatttcaactcagtattcattattagttgtgtgtctggaaagattgtacttacttttcctctttacactacagtttgctcttatggggctctaaactgtttaactgaagaaccttcgtctgtattttgattgagcataatttagtattttatgatttccaagatgatgttcttatgtctatcaagtctatgtatcaaatttataacatcatttaagaaaaaggaatttccacagatacttcagttgcaattttttgtttcatgctactgaaaatacatttgtttctaggggttggaatattatagaagatgtaggatgaaagaaaacgatagaacaacgaaagaattctgtttatgaaattacaggaattgtgtccactatggtaaagcattgtcattttagtacattttctcttagtagtttggcattttatactttaaaacttgttttgctttaaaaattgtttataatgcttaccttctttctccagtgcctttagtcttgatttgatatgtttgtaccctcagttaccctttctattacatgtttttgatgttttcatagcctaggaaacatcgattcctttttaataattgtcaatctgattatttaaagaggtaacaattatctgttaatgctttggaaaaacaagtagggttgcctttggaggccaggcttcttagttcattcaaaaatattccttggatttatgccatgtattaagcatttttagcccccagtattacaactgtgaaccaaacggataaggccctaaccattttcagcattctctttggatggggtgggattggggacttaattaaaatagagatatagaaaaataggcatctaaataagataataagtgtggggttgaaatgaagcatctaacaatagttgaagttagaagtaatattttacagtattgtaacctctatttaagtttgggtattagttacagatagcataaaaaagccttaatttttcactttccttgctggcaaaggtacatttatttagactgtccatttaaagtaatgtttaacataaacattactgtgaaaaacattccattacatattcccaagcaaatgagctgcatcttctttactgtattttacaatttagtacaacagttttaggcctcaatcttaacatcactggtattttaaatttggcaatgaatatgaaattacttttgacttacagattgattatattattactttgaaaatgcattaatttcttagaaaagtttggagcctctatctttttttgagttaatacttaaattctcattacttatattaatagcctgtactaagtgaaaatattatttatgcaagtaaacaagtcactataggcttttaagacttttctttaattttagattttgtcatcaaagtttaaattttttacctactgtccacttaaatataatttaacagtttgtaaagtgaaatagttttaagtatgatgtatgatgcacctgcatataaatgaaaatggcgtgcacaaagacactttactatgggaactgtactggaagatttatgaaagcatgtgaaattgcacctaaaattgtgttattagtgactataagcagcaatgctaaatttattgtacttgatgaatgaatgtatttagtcacagttactttggtttaaatgtataaatgtctttagggtttttttttaaatgtgtttgtaatttgtactattgtgggggtatacttggactgcaggggttattgtcaatgtgtgatttgtgtttttattttatagaatcatctaatgtgatataccaatttttataagtgatatttacataattctaataactgtatatttgacaacctattaaaatgttttgcattggaa

SEQ ID NO: 242706 - DNA, 1251 bp, Artificial Sequence
  derived and/or modified sequence
atggccacagagccccccagccccctgcgggtggaggcccctggccccccagagatgaggaccagccctgccatcgagagcaccccagagggcaccccccagcctgctgggggccgcctgcgcttcctgaatggctgtgtgcccctgagccaccaggtggccggccacatgtatggcaaggacaaggtgggcatcctgcagcacccagatggcaccgtgctgaagcagctgcagcccccaccccggggcccccgggagctggagttctacaacatggtgtatgctgctgactgctttgatggagtgctgctggagctgaggaagtacctgcccaagtactacggcatctggagccccccaacagccccaaatgacctgtacctgaagctggaggatgtgacccacaagttcaacaagccctgcatcatggatgtgaagattggccagaagagctatgacccctttgccagcagcgagaagatccagcagcaggtgtccaagtaccccctgatggaggagatcggcttcctggtgctgggcatgagggtgtaccacgtgcacagcgacagctatgaaacagagaaccagcactacggccgcagcctgaccaaggagaccatcaaggatggagtgagccgcttcttccacaacggctactgcctgaggaaggatgctgtggccgccagcatccagaagattgagaagatcctgcagtggtttgagaaccagaagcagctgaacttctacgccagcagcctgctgtttgtgtatgagggcagcagccagcccaccaccaccaagctgaatgacaggaccctggccgagaagttcctgagcaagggccagctgagtgacacagaggtgctggagtacaacaacaacttccacgtgctgagcagcacagccaacgggaagattgagagctctgtgggcaagagcctgagcaagatgtatgcccggcacaggaagatctacaccaagaagcaccacagccagaccagcctgaaggtggagaacctggagcaggacaatggctggaagtccatgagccaggagcacctgaatggaaatgtgctgagccagctggagaaggtgttctaccacctgcccaccggctgccaggagattgctgaggtggaggtgaggatgattgactttgcccacgtgttccccagcaacaccattgatgagggctacgtgtatggcctgaagcacctgatctctgtgctgcggagcatcctggacaactag

SEQ ID NO: 242707 - DNA, 1251 bp, Artificial Sequence
  derived and/or modified sequence
atggccaccgagccccccagccccctgcgggtggaggcccccggcccgcctgagatgagaacctccccagccattgaaagcactcctgagggaaccccgcagccagcagggggtcgccttaggttcctgaacggttgcgtgcccctgtctcatcaggtggcagggcacatgtatggaaaagacaaggttggaattctccaacatccagatgggacagtgctaaagcaactccagcccccgcctcgggggccaagggagctggagttttacaacatggtgtacgccgccgactgcttcgacggagtgctgttggagctgcgtaagtatctgcctaaatactacggaatttggtccccccccacagcccccaacgatctgtatctaaaactcgaggacgtcacacacaagttcaataaaccatgtatcatggacgtcaagattgggcaaaaatcttacgatccttttgcatcttccgaaaaaattcagcagcaagtgtcaaagtacccactcatggaggagattggcttcctcgtgttagggatgagagtataccacgtccattcagactcgtatgaaactgaaaaccagcactatgggagatctctaactaaagagacgattaaggacggcgtctccaggtttttccacaacggctattgcctgcggaaggacgctgtcgccgctagtatccagaaaatcgagaagatcctgcagtggttcgagaaccagaagcagctgaatttctatgcgagctctctgctgtttgtgtacgagggctcttcccagccaaccaccacaaaactaaatgataggaccctggcagaaaagtttctctccaaggggcagctatccgatactgaagtgctggaatacaacaacaactttcacgtgctgagcagtacagctaacgggaaaattgagtctagcgtcggtaaatcattatctaagatgtacgctcgccatcgaaaaatctacacaaagaaacatcactcgcaaactagtctgaaagtggaaaacctggaacaggataacggctggaaaagtatgagccaggagcatcttaatggaaatgttttgtcacagctcgagaaagtcttttatcacctgccaaccggatgccaggaaatcgctgaggtcgaggtgcggatgatagacttcgcgcacgtctttccctctaacacaatcgacgagggctatgtttatggcctgaaacacctgattagcgtgctcagatctatcctggacaattag

SEQ ID NO: 242708 - DNA, 1251 bp, Artificial Sequence
  derived and/or modified sequence
atggcgacagagccgccttcccctctgcgcgttgaggccccagggcctcccgagatgcgaacatccccagccatagagagtactcctgagggcaccccacagccagccggaggacgcctgcggtttcttaatgggtgcgttccactatctcaccaagtcgccggacatatgtatgggaaagataaggtcggaatcctgcaacacccggacggcacggtgctgaagcagttgcagccccctcccaggggacctagagagctagaattttacaacatggtctacgctgccgactgctttgatggagtgctcctggagctgaggaagtacttgccaaaatattacggaatctggtccccacctacagcccctaatgatctttacctgaagcttgaggacgttactcacaaatttaacaaaccttgcattatggatgtcaaaatcggccagaagtcctatgacccgttcgcaagttctgaaaaaattcaacagcaagtgtcaaaatacccactgatggaagagatcggcttcttggtcctgggtatgcgggtatatcatgttcactctgactcttatgagacagaaaaccaacattacggacgtagtcttaccaaagaaacaatcaaagatggggtgtctcggtttttccataatggctactgcctgaggaaggatgccgtggctgcatccatccagaagatcgaaaaaattttacagtggtttgaaaatcagaagcagcttaacttctacgcaagctccctgctgttcgtgtatgaaggctccagccagcctaccacgacgaaactgaacgatagaactctggccgaaaagtttctctcaaagggtcaactaagcgataccgaggttctcgagtacaacaataattttcatgtcctttcatccactgcaaatgggaaaatagagagttcagtaggtaaatctctgagtaagatgtacgctcgccacaggaaaatttataccaaaaagcatcacagccagaccagcctgaaagtggaaaacttagaacaggacaatgggtggaagtcaatgtctcaagagcacctcaacggaaacgtgctttctcagctggaaaaagtgttctatcacctccccacaggctgccaagaaatagccgaggttgaggtgcgcatgattgacttcgcccacgtgtttccgtcaaacaccatcgatgaagggtacgtttacggcctgaagcacctcatttccgtgctgcgttctatcctggataactag

SEQ ID NO: 242709 - DNA, 1251 bp, Artificial Sequence
  derived and/or modified sequence
atggccaccgagccccccagccccctgagagtggaggcccccggcccccccgagatgagaaccagccccgccatcgagagcacccccgagggcaccccccagcccgccggcggcagactgagattcctgaacggctgcgtgcccctgagccaccaggtggccggccacatgtacggcaaggacaaggtgggcatcctgcagcaccccgacggcaccgtgctgaagcagctgcagcccccccccagaggccccagagagctggagttctacaacatggtgtacgccgccgactgcttcgacggcgtgctgctggagctgagaaagtacctgcccaagtactacggcatctggagcccccccaccgcccccaacgacctgtacctgaagctggaggacgtgacccacaagttcaacaagccctgcatcatggacgtgaagatcggccagaagagctacgaccccttcgccagcagcgagaagatccagcagcaggtgagcaagtaccccctgatggaggagatcggcttcctggtgctgggcatgagagtgtaccacgtgcacagcgacagctacgagaccgagaaccagcactacggcagaagcctgaccaaggagaccatcaaggacggcgtgagcagattcttccacaacggctactgcctgagaaaggacgccgtggccgccagcatccagaagatcgagaagatcctgcagtggttcgagaaccagaagcagctgaacttctacgccagcagcctgctgttcgtgtacgagggcagcagccagcccaccaccaccaagctgaacgacagaaccctggccgagaagttcctgagcaagggccagctgagcgacaccgaggtgctggagtacaacaacaacttccacgtgctgagcagcaccgccaacggcaagatcgagagcagcgtgggcaagagcctgagcaagatgtacgccagacacagaaagatctacaccaagaagcaccacagccagaccagcctgaaggtggagaacctggagcaggacaacggctggaagagcatgagccaggagcacctgaacggcaacgtgctgagccagctggagaaggtgttctaccacctgcccaccggctgccaggagatcgccgaggtggaggtgagaatgatcgacttcgcccacgtgttccccagcaacaccatcgacgagggctacgtgtacggcctgaagcacctgatcagcgtgctgagaagcatcctggacaactag

SEQ ID NO: 242710 - protein, 680 aa, Artificial Sequence
  derived and/or modified sequence
MADPVAGIAGSAAKSVRPFRSSEAYVEAMKEDLAEWLNALYGLGLPGGGDGFLTGLATGTTLCQHANAVTEAARALAAARPARGVAFQAHSVVPGSFMARDNVATFIGWCRVELGVPEVLMFETEDLVLRKNEKSVVLCLLEVARRGARLGLLAPRLVQFEQEIERELRAAPPAPNAPAAGEDTTETAPAPGTPARGPRMTPSDLRNLDELVREILGRCTCPDQFPMIKVSEGKYRVGDSSLLIFVRVLRSHVMVRVGGGWDTLEHYLDKHDPCRCSSTAHRPPQPRVCTFSPQRVSPTTSPRPASPVPGSERRGSRPEMTPVSLRSTKEGPETPPRPRDQLPPHPRSRRYSGDSDSSASSAQSGPLGTRSDDTGTGPRRERPSRRLTTGTPASPRRPPLRSQSRDRLDRGRPRGAPGGRGAQLSVPSPARRARSQSREEQAVLLVRRDRDGQHSWVPRGRGSGGSGRSTPQTPRARSPAAPRLSRVSSPSPELGTTPASIFRTPLQLDPQQEQQLFRRLEEEFLANARALEAVASVTPTGPAPDPARAPDPPAPDSAYCSSSSSSSSLSVLGGKCGQPGDSGRTANGLPGPRSQALSSSSDEGSPCPGMGGPLDAPGSPLACTEPSRTWARGRMDTQPDRKPSRIPTPRGPRRPSGPAELGTWHALHSVTPRAEPDSWM

SEQ ID NO: 242711 - protein, 337 aa, Artificial Sequence
  derived and/or modified sequence
MADPVAGIAGSAAKSVRPFRSSEAYVEAMKEDLAEWLNALYGLGLPGGGDGFLTGLATGTTLCQHANAVTEAARALAAARPARGVAFQAHSVVPGSFMARDNVATFIGWCRVELGVPEVLMFETEDLVLRKNEKSVVLCLLEVARRGARLGLLAPRLVQFEQEIERELRAAPPAPNAPAAGEDTTETAPAPGTPARGPRMTPSDLRNLDELVREILGRCTCPDQFPMIKVSEGKYRVGDSSLLIFVRVLRSHVMVRVGGGWDTLEHYLDKHDPCRCSSTAHRPPQPRVCTFSPQRVSPTTSPRPASPVPGSERRGSRPEMTPVSLRSTKEGPETPPR

SEQ ID NO: 242712 - protein, 329 aa, Artificial Sequence
  derived and/or modified sequence
MADPVAGIAGSAAKSVRPFRSSEAYVEAMKEDLAEWLNALYGLGLPGGGDGFLTGLATGTTLCQHANAVTEAARALAAARPARGVAFQAHSVVPGSFMARDNVATFIGWCRVELGVPEVLMFETEDLVLRKNEKSVVLCLLEVARRGARLGLLAPRLVQFEQEIERELRAAPPAPNAPAAGEDTTETAPAPGTPARGPRMTPSDLRNLDELVREILGRCTCPDQFPMIKVSEGKYRVGDSSLLIFVRVLRSHVMVRVGGGWDTLEHYLDKHDPCRCSSTGPGISCPPIPAPAATPGTVTPQPPPPRAAPLVPAVMTQALAPGGSDPAGG

SEQ ID NO: 242713 - protein, 537 aa, Artificial Sequence
  derived and/or modified sequence
MADPVAGIAGSAAKSVRPFRSSEAYVEAMKEDLAEWLNALYGLGLPGGGDGFLTGLATGTTLCQHANAVTEAARALAAARPARGVAFQAHSVVPGSFMARDNVATFIGWCRVELGVPEVLMFETEDLVLRKNEKSVVLCLLEVARRGARLGLLAPRLVQFEQEIERELRAAPPAPNAPAAGEDTTETAPAPGTPARGPRMTPSDLRNLDELVREILGRCTCPDQFPMIKVSEGKYRVGDSSLLIFVRVLRSHVMVRVGGGWDTLEHYLDKHDPCRCSSTAHRPPQPRVCTFSPQRVSPTTSPRPASPVPGSERRGSRPEMTPVSLRSTKEGPETPPRPRDQLPPHPRSRRYSGDSDSSASSAQSGPLGTRSDDTGTGPRRERPSRRLTTGTPASPRRPPACAASPETGWIAAGPGGPQEAGEPSCRSPALPGGPGARAARSRLCCLCAGIETGSTHGCQGAGAVGARAGAPPRLPVPAALQHPGFPGSPAPVQSWAPHRPASSAHPCSSTRSRSSSCSGAWKRSSWPMPGPLRLLLA

SEQ ID NO: 242714 - protein, 138 aa, Artificial Sequence
  derived and/or modified sequence
MADPVAGIAGSAAKSVRPFRSSEAYVEAMKEDLAEWLNALYGLGLPGGGDGFLTGLATGTTLCQHANAVTEAARALAAARPARGVAFQAHSVVPGSFMARDNVATFIGWCRVELGVPEVLMFETEDLVLRKNEKSVVL

SEQ ID NO: 242715 - protein, 143 aa, Artificial Sequence
  derived and/or modified sequence
MADPVAGIAGSAAKSVRPFRSSEAYVEAMKEDLAEWLNALYGLGLPGGGDGFLTGLATGTTLCQHANAVTEAARALAAARPARGVAFQAHSVVPGSFMARDNVATFIGWCRVELGVPEVLMFETEDLVLRKNEKSVVLCLLEV

SEQ ID NO: 242716 - DNA, 2043 bp, Artificial Sequence
  derived and/or modified sequence
atggctgatcccgtggcaggaatcgccggatccgccgcaaagtctgttcggcccttcagaagttccgaggcatatgtcgaagcaatgaaggaggacctggcagagtggttgaatgcactatatggcctcgggttgcctgggggtggcgatggatttctgaccggcttggctacaggtacaaccttgtgccagcacgctaacgcagtcactgaggcagcgagagccttggctgctgcccgccctgctaggggtgtcgccttccaggctcattccgtcgtgcctggatcctttatggccagagataatgtggccaccttcattgggtggtgccgcgtggaactaggcgtgcccgaggtcctcatgtttgagactgaagatctggtgctgcgcaaaaacgagaagagcgtcgtactgtgcctcttggaagtggcacggcgcggtgcccgcctgggcctgctcgcccctagacttgtacagttcgagcaggagatcgagagggaattacgcgccgcccccccagctcccaatgccccggcggccggcgaggacactactgagacagctccggcccctggcacccccgctagagggccacggatgactccatcagacctcaggaacctcgacgagctggtgagagaaattctcggacgatgcacctgcccggaccagtttcccatgatcaaggtgagcgagggtaagtatagggtgggtgacagcagcctcctgattttcgtgcgcgtgcttcggtcccatgtgatggtccgtgtgggcggtggttgggatacactggagcactatttggacaagcacgacccatgccggtgctcttcaactgcacataggccgccacagcctagagtctgcacgtttagcccccagcgagtgagccctactacttctccccgccccgctagtcccgtgcctggcagcgaaagacgcgggagcagaccggagatgacccctgtctcgcttcgcagcacaaaagagggtcccgagacgccacctcggccgagagatcagttacctccccacccgaggtcacggaggtatagcggagattcggacagcagcgcgagcagcgcgcaatcaggtcctctcggcacacggagcgatgataccggcacagggccacgccgtgagcgccctagtcggcgcctaaccactggcaccccagcctctccacgtcggccaccgctaaggagccagagtcgcgataggctggatagaggccgcccaagaggcgcacctggaggtagaggggctcagcttagtgttccatctcctgcaaggcgtgctagaagccagtcaagggaagaacaagctgtcctcctcgtaagaagggatcgcgatggtcaacatagctgggtgcctaggggacgtggaagcggagggagcgggagaagcactccccagactccccgggcccggagtccagcggctccacgactcagcagggtctcctccccaagtcccgagctgggcacaactcccgctagcatctttaggactcctctgcagctagacccccagcaggaacagcagctcttccggagattagaagaggagtttctggccaatgcacgcgctttggaagcagtcgcttctgtgacacccacaggccccgccccggacccagcccgggcccctgacccacccgcacctgacagtgcctattgcagttcatcatctagctcctcttctctttccgtgctcgggggcaaatgcggacagcctggcgacagcggacggactgcgaacggtctgcctgggcccagaagtcaggcgcttagtagttcctccgacgagggcagcccgtgcccaggtatgggaggtcccctcgacgcccccggatcccccctggcttgcacagaacccagccggacttgggcgagaggccgtatggacacccagcccgataggaagcctagtagaatccctacccccagaggccccaggagacccagcgggcctgctgaacttggcacctggcacgctcttcactccgtcactcctagagcggagcccgattcttggatgtag

SEQ ID NO: 242717 - DNA, 1614 bp, Artificial Sequence
  derived and/or modified sequence
atggctgaccccgtggccgggatcgctggctctgccgccaaatctgtaagaccctttcgtagttctgaagcctacgtggaggccatgaaagaagacctagctgagtggcttaatgccctctacggactgggattgcctggagggggggacggttttcttacaggccttgccaccgggacaaccctgtgtcagcacgcaaacgctgtcactgaggccgcacgggccctagcagctgcacgtcccgctcggggggtggcctttcaagctcattccgtggtacccgggtccttcatggcccgtgataacgttgccaccttcattggatggtgcagggtcgaattgggcgtgcctgaggttctgatgtttgagaccgaggatctggtgttaaggaagaacgaaaaatcagtggttctctgcctgctggaggtcgccaggagaggcgcccgcctgggactactggccccacgactggtgcagtttgaacaagagatcgagcgagagctgagggccgccccgcctgccccaaacgccccagctgccggggaagatacgactgagaccgcccccgcccctggtacccccgcccggggccccagaatgaccccgagcgatttgagaaacctcgacgagttggtgcgcgagatccttggtcgttgtacgtgcccagatcagtttcctatgattaaagtttccgagggaaagtacagggtgggggactctagtctattaatcttcgtgcgcgtgcttaggtctcacgtgatggtccgagtgggtggtggttgggataccctagagcactaccttgataaacacgatccatgcagatgtagtagcactgcccacagacccccacagcctagggtttgcacctttagcccacagcgcgtttctcctactacatcaccccgccctgcctccccagtgccaggttcagaaagacggggatcacgccccgagatgacaccagtctccctgaggagcacgaaggaagggccggaaactcctcccagacctcgagatcaactgcccccccacccgcgctcaagacggtatagtggggactctgactcctctgcctcctcggctcagtccggccctctggggacccgctccgatgacacaggaaccggaccgaggcgagagaggccctcccggcgtcttacgactggtacccccgcctctccgagaaggcccccagcctgcgccgcgtctccggagacaggctggatcgctgctgggcctggcggacctcaggaggccggagagccctcatgcagatctccagcactcccagggggacccggtgcccgggcggctagatctaggctatgttgtttatgtgctggaatcgagacaggtagcacccacggctgtcaaggtgcaggggccgtgggcgctcgagccggggccccacctcggctccctgtaccggcagcactccagcatccaggatttcctggcagcccagctcccgtgcagagttgggcacctcaccgcccagcgagctccgctcatccctgctcctccactaggtcccgatcctcatcgtgttccggcgcttggaaaaggtcaagctggccaatgcccgggccactgaggctgctactggcatag

SEQ ID NO: 242718 - DNA, 1614 bp, Artificial Sequence
  derived and/or modified sequence
atggccgatcctgtggctgggatcgccggaagcgccgcaaaaagcgtaaggccttttagaagcagtgaggcttacgtggaggccatgaaagaagacctcgctgagtggttgaacgccctgtacggactgggcctccctggcgggggggacggattcttgactgggcttgcgaccggaacaaccctgtgtcagcatgccaatgccgtgactgaggctgcgagagccttggcagcagctagacccgcccgaggcgtggccttccaggcgcacagcgtcgtgcctggtagctttatggcaagagataacgtcgcaacatttatcggatggtgccgcgtggagcttggcgttcctgaggtgctcatgttcgagacggaggatttggtcctccggaaaaacgagaaatccgtcgttctctgcctgttggaggtggcaaggagaggcgctaggctgggtctcctggcaccaaggcttgtgcagtttgagcaggagatcgagagggagctgcgcgccgcaccacctgcccccaacgcccccgccgcaggggaggataccaccgaaaccgctccagcccctggaacgcccgctcgcgggcctaggatgacaccgtctgacctgaggaacctggatgagctggtgcgggagattttgggccgatgtacatgtcctgaccagttccctatgatcaaggtcagtgaaggcaagtacagagtgggcgacagctcactcctgatttttgtaagggtcctgcggtcacatgtgatggtgagagtgggcgggggttgggatacgctggaacattacctggacaagcacgacccttgcaggtgcagttctacagctcatcgcccaccccagccaagagtctgcacatttagtcctcaacgcgtttctcccacgactagtccacgacctgcctcccctgtccccggctctgagcgtcgcggttcccggccggaaatgactcccgtgtcactccgcagcaccaaagagggaccagagacccctcctcgacctagagatcagttgccgccccatccaagatctagacggtatagcggagactccgattcatcagcctcttccgcgcagtcaggccccctcggcacccggagcgatgatacagggacaggacccagacgggaacgccccagcaggagattaaccacaggtacaccggcctcgcctaggcggccacctgcttgtgctgcgagccccgagacaggctggattgcggccggtccaggaggccctcaggaggctggggagccatcctgccggtccccagccttgcccgggggacccggggctagagccgcgcggtcacgcctgtgctgcctgtgcgcaggcatcgaaacaggctcgacccacggatgtcagggagccggcgccgtgggcgcccgagccggtgcccctccaaggctccctgtgcccgctgcccttcagcatcccgggtttcccgggagtccggccccggtgcagagctgggctccccatcgtccagcatcttcggcacacccttgttcctcgactcgttcaaggtccagctcatgcagcggcgcctggaagcggagcagttggcccatgcctggacctctccgcctgttgcttgcttag

SEQ ID NO: 242719 - DNA, 1614 bp, Artificial Sequence
  derived and/or modified sequence
atggcagatcctgttgcaggtattgctggcagcgcagcaaagtccgtgaggccattccggagctccgaagcatacgtggaggctatgaaggaggaccttgcagagtggttgaatgcactatatggacttggactccccggcggcggcgatggcttcttgacgggtctcgccacagggactaccctgtgtcagcacgctaatgcggtaacagaggccgcaagggcactcgccgcggcgcgccccgcaagaggcgtggcatttcaggcccactccgtggtcccaggtagtttcatggctcgtgataacgtggccaccttcatcggttggtgtcgggtggagctgggagtaccagaggtgctgatgttcgagactgaagacctcgtcctcaggaaaaacgagaagagtgtcgtgttatgcttgttggaggttgcacgccgtggagcaaggttgggcctgctcgctccaagactggtccagttcgagcaagagatcgaacgggaactgcgcgccgctcccccagcccctaacgctcctgcagctggggaggataccaccgagactgcgcctgctccaggaactccagcccggggccccagaatgacacctagtgatctgcgaaacctagatgagttagtgcgtgaaattctggggaggtgtacatgtccagaccagttccccatgataaaagtctcagagggcaaatatcgggttggcgacagctcacttctgattttcgttcgagttttgcggtcacacgtcatggtgagggttgggggtgggtgggatactctggaacactatctcgacaaacacgacccgtgcaggtgctcttctactgctcacaggccaccccagccaagagtctgcacttttagcccacagagagtttccccaactaccagtcccaggccagctagcccggtacctggatctgagcggcggggaagtcgacccgagatgacacctgtgtccctgcggtccaccaaggaagggcctgagactcccccccgcccgcgggatcagctcccccctcatcccaggtcccggcgctacagcggcgatagtgattcaagcgcatcatcagcccagagcgggcctctgggcacccgtagcgatgatacgggtactggccctagacgggagaggcccagtcggcggctgacaactgggactcccgccagcccgcgacggcctccggcttgcgcagccagtcctgaaactggatggatcgcagccggacccggaggaccccaggaagcaggtgagccttcttgccggagtccagccctgcccggtggccccggtgccagagctgcgagaagtagactgtgctgcctctgtgccggcattgagacaggaagtacacacgggtgtcagggcgccggggcggtgggggctcgcgccggggccccaccccgccttcccgtaccagctgcattgcagcatccaggattccctggctcaccagcccccgtccagagttgggcaccccatcgtcccgccagcagcgcccacccctgcagcagtacgcgcagcagaagctcgtcatgttctggtgcttggaagcgctcgtcttggccgatgcccggacccctgcgactcctgctcgcctag

SEQ ID NO: 242720 - DNA, 1614 bp, Artificial Sequence
  derived and/or modified sequence
atggccgacccggtggcgggaatagcgggctccgcagctaagtctgtgagaccatttcgttcctccgaagcctatgttgaggcaatgaaggaggatttggcggagtggcttaacgccctgtatggattgggcctgcccgggggcggggatggcttcttgaccgggctggcaacaggtacaactctgtgccaacacgccaacgccgtcaccgaagcagctcgagcactggctgcggctagacccgcccgcggggttgccttccaggcccacagcgtggtgcccggtagtttcatggctagggacaacgtggccaccttcatcggatggtgtagggtggagctcggcgttcctgaggtgctgatgttcgagaccgaggacctggtgttgagaaaaaatgaaaagtccgtggtgctgtgccttctagaggtcgcacggaggggagcaagattgggcctgttggctccacgcttggtacagttcgagcaggagattgagagagagctgagagctgccccacctgcccccaatgccccagcggccggggaggatacgacagaaaccgcacccgctcccgggacaccagcccgggggccgcgcatgacgccatccgacttacggaatctggatgagttggttagagaaatcctgggaaggtgcacgtgccctgaccagttccctatgatcaaggtttctgagggcaagtaccgggtcggagattctagcctgctcatattcgtgagggtgctaagaagccatgtgatggtcagagtcggaggtgggtgggatacgttggagcactacctggataaacacgatccctgcaggtgcagttctacagctcatcggccccctcagcctcgcgtctgcaccttctccccacaacgggtttcacctaccacttcaccgcggccagcctctccggtgccagggtccgagcggaggggctctcggccagagatgacacctgtctctttgcgcagcaccaaagaaggccctgaaactcctccccgcccacgggatcaactgccaccgcaccctcgaagccgaagatattctggcgattcagactcctccgccagttcagcacaatctggcccgctgggaaccaggagtgatgatacgggaaccggaccacgtcgagaaagaccaagcaggcggctcaccaccggcacgcccgcaagccccaggaggccgccagcatgtgccgcctcaccggagacaggctggattgccgcgggtcctggtgggcctcaggaggccggggaaccgtcctgtagatcacctgcccttcctggcggccccggagcaagggccgcccggtccaggctgtgctgtctgtgtgcagggatcgaaactggatcaacgcatgggtgccagggtgctggtgcagtgggagcccgggcgggagctcctccgcggcttccagtgcccgcagccctgcagcatccagggttccccgggtcccccgctcctgtccaaagctgggcgcctcatcggcccgcgagttcagcccatccttgctcatctaccagatcacggagcagcagttgttctggagcatggaagcgttccagctggcctatgcctggtcccctgcggctgctactcgcttag

SEQ ID NO: 242721 - DNA, 2530 bp, Artificial Sequence
  derived and/or modified sequence
agggaggcggggcggagacggcggcgaggaggaggccgcggcgcgggacgcatagagctgcggctcgggcggcgcctccctgcggcggcccggcccggctccggcccccgctggggcaatgctccccggggccgcgggatgagccaggtgagcgcggagacccccagcactccctgcctgtgactcggccggtccgggcatggcagacccagtggcgggcatcgcgggctcggcggccaagagcgtgcggccatttcgctccagtgaggcctacgtggaggccatgaaggaggacctggccgagtggctcaatgccttgtacggcctgggtctcccgggtggtggcgatggcttcctgacagggctggccacgggcacgaccctgtgccaacatgccaacgccgtgaccgaggctgcccgtgcattggcagccgcccgcccggcccgaggtgtggccttccaggcgcacagtgtagtgcctggctccttcatggcgcgcgacaacgtggccaccttcatcggctggtgccgcgtggagctgggtgtgccggaggtgctcatgtttgagactgaggacctggtgctgcgcaagaacgagaagagcgtggtgctgtgcctgctggaggtggcgcggcgtggggcacgcctgggcctgctggccccacgcctcgtgcagtttgagcaggagattgagcgggagctgcgtgctgcacccccagcccccaacgcccctgccgctggggaggacaccactgaaaccgcccccgcaccagggactcctgcccgcggcccccgcatgacacccagcgacctgcgcaacctcgacgagctggtgagggagattctgggccgctgcacctgccctgaccagtttcccatgatcaaggtctcagaggggaagtaccgtgtgggggactcgagcctgctcatctttgtgcgggtgctgaggagccacgtgatggtgcgagtgggtggtggctgggacacgctggagcattacctggacaagcacgacccgtgccgctgctcctccactgctcatcgcccaccccagccgagggtctgcaccttttctccacagagggtgtcgcccaccaccagtccccgccctgctagcccagtccctgggagtgagcgccggggctcccggcctgagatgactcccgttagcttacgaagcacaaaggaggggcccgagaccccacccaggccccgggatcagctgcccccccatccccgctcccgccgctactccggggacagtgactcctcagcctcctccgcccagagcggcccccttggtacccgcagtgatgacacaggcactggcccccggagggagcgacccagccggcggctgaccacaggcaccccggcctctccgagacggcctcctctgcgcagccagtcccgagaccggctggatcgcggccggccccggggggccccaggaggcaggggagcccagctgtcggtccccagccctgcccggcgggcccggagccagagccgcgaggagcaggctgtgctgcttgtgcgcagggatcgagacgggcagcactcatgggtgccaaggggcaggggcagtgggggctcgggcaggagcaccccccagactccccgtgcccgcagccctgcagcaccccggctttcccgggtctccagccccagtccagagttgggcaccacaccggccagcatcttccgcacacccctgcagctcgacccgcagcaggagcagcagctgttccggcgcctggaagaggagttcctggccaatgcccgggcccttgaggctgttgctagcgtgacccccactggaccagcccctgacccagctcgggcccccgaccctccagctcctgactctgcctattgttcctccagttcctcctcttcgtccctcagcgtcctgggtggcaaatgtggccaacctggggactctggccggacggccaatgggctgcctgggccccgaagccaagccctttccagctcctccgatgaaggcagcccctgccctggcatgggggggccactagatgcacctgggagccccctggcttgcactgaaccctcgaggacctgggcacggggtcggatggacacacagccagaccgtaaaccctcacgtatccccacgcctcggggcccccgccgcccctccggacccgcagagctggggacatggcatgccctgcactcagtcaccccgagggctgagccagattcctggatgtgatggaccagctcagctgtccccagaccccatcccttctccttttcctttgtggccttaacccttctgcatcagggagccccctctgcctcttgagtaccagacctcatgggaccagaccccttgggaccacatggcacaatgggacctctgttgtacattccggttgggggatgagcgttgctatttaattactaatattattgaatgccttagaggaggccgggcgagcccggtgttctgaagacctgtggcccagcagagcctctgacagtaaagttttgctccagc

SEQ ID NO: 242722 - DNA, 2482 bp, Artificial Sequence
  derived and/or modified sequence
ggacgcatagagctgcggctcgggcggcgcctccctgcggcggcccggcccggctccggcccccgctggggcaatgctccccggggccgcgggatgagccagcgatcctgaactgtgttcctgcccacagtgactcggccggtccgggcatggcagacccagtggcgggcatcgcgggctcggcggccaagagcgtgcggccatttcgctccagtgaggcctacgtggaggccatgaaggaggacctggccgagtggctcaatgccttgtacggcctgggtctcccgggtggtggcgatggcttcctgacagggctggccacgggcacgaccctgtgccaacatgccaacgccgtgaccgaggctgcccgtgcattggcagccgcccgcccggcccgaggtgtggccttccaggcgcacagtgtagtgcctggctccttcatggcgcgcgacaacgtggccaccttcatcggctggtgccgcgtggagctgggtgtgccggaggtgctcatgtttgagactgaggacctggtgctgcgcaagaacgagaagagcgtggtgctgtgcctgctggaggtggcgcggcgtggggcacgcctgggcctgctggccccacgcctcgtgcagtttgagcaggagattgagcgggagctgcgtgctgcacccccagcccccaacgcccctgccgctggggaggacaccactgaaaccgcccccgcaccagggactcctgcccgcggcccccgcatgacacccagcgacctgcgcaacctcgacgagctggtgagggagattctgggccgctgcacctgccctgaccagtttcccatgatcaaggtctcagaggggaagtaccgtgtgggggactcgagcctgctcatctttgtgcgggtgctgaggagccacgtgatggtgcgagtgggtggtggctgggacacgctggagcattacctggacaagcacgacccgtgccgctgctcctccactgctcatcgcccaccccagccgagggtctgcaccttttctccacagagggtgtcgcccaccaccagtccccgccctgctagcccagtccctgggagtgagcgccggggctcccggcctgagatgactcccgttagcttacgaagcacaaaggaggggcccgagaccccacccaggccccgggatcagctgcccccccatccccgctcccgccgctactccggggacagtgactcctcagcctcctccgcccagagcggcccccttggtacccgcagtgatgacacaggcactggcccccggagggagcgacccagccggcggctgaccacaggcaccccggcctctccgagacggcctcctgcctgcgcagccagtcccgagaccggctggatcgcggccggccccggggggccccaggaggcaggggagcccagctgtcggtccccagccctgcccggcgggcccggagccagagccgcgaggagcaggctgtgctgcttgtgcgcagggatcgagacgggcagcactcatgggtgccaaggggcaggggcagtgggggctcgggcaggagcaccccccagactccccgtgcccgcagccctgcagcaccccggctttcccgggtctccagccccagtccagagttgggcaccacaccggccagcatcttccgcacacccctgcagctcgacccgcagcaggagcagcagctgttccggcgcctggaagaggagttcctggccaatgcccgggcccttgaggctgttgctagcgtgacccccactggaccagcccctgacccagctcgggcccccgaccctccagctcctgactctgcctattgttcctccagttcctcctcttcgtccctcagcgtcctgggtggcaaatgtggccaacctggggactctggccggacggccaatgggctgcctgggccccgaagccaagccctttccagctcctccgatgaaggcagcccctgccctggcatgggggggccactagatgcacctgggagccccctggcttgcactgaaccctcgaggacctgggcacggggtcggatggacacacagccagaccgtaaaccctcacgtatccccacgcctcggggcccccgccgcccctccggacccgcagagctggggacatggcatgccctgcactcagtcaccccgagggctgagccagattcctggatgtgatggaccagctcagctgtccccagaccccatcccttctccttttcctttgtggccttaacccttctgcatcagggagccccctctgcctcttgagtaccagacctcatgggaccagaccccttgggaccacatggcacaatgggacctctgttgtacattccggttgggggatgagcgttgctatttaattactaatattattgaatgccttagaggaggccgggcgagcccggtgttctgaagacctgtggcccagcagagcctctgacagtaaagttttgctccagc

SEQ ID NO: 242723 - DNA, 2924 bp, Artificial Sequence
  derived and/or modified sequence
cgcggcggtgccgtttatctggccaggggaggtccacccgggaggaggtgactttgcagcctccagccgctatcgcttcctgccttcatcttgggaacaggccgtgctgtgcgccagcccggggagcccaccgtctggggaggggggcgattaaaaggtcccaacctcctccccaggagaccaaagaggttggacggggccccgggtactaggctgggtgggggttgggcgcctgggccggtcgcagttgtctgggggccctggggctctctgcgtcgagagcgctcgaagacccgggattcctggcccgatcgcgggcggggggagaccccagctccaccccagctcccgccggctcggggaaggggcggcccctttaagagcgcgcggccccgcccgccccctccgggcaggatccgaattccagggaggcggggcggagacggcggcgaggaggaggccgcggcgcgggacgcatagagctgcggctcgggcggcgcctccctgcggcggcccggcccggctccggcccccgctggggcaatgctccccggggccgcgggatgagccagtgactcggccggtccgggcatggcagacccagtggcgggcatcgcgggctcggcggccaagagcgtgcggccatttcgctccagtgaggcctacgtggaggccatgaaggaggacctggccgagtggctcaatgccttgtacggcctgggtctcccgggtggtggcgatggcttcctgacagggctggccacgggcacgaccctgtgccaacatgccaacgccgtgaccgaggctgcccgtgcattggcagccgcccgcccggcccgaggtgtggccttccaggcgcacagtgtagtgcctggctccttcatggcgcgcgacaacgtggccaccttcatcggctggtgccgcgtggagctgggtgtgccggaggtgctcatgtttgagactgaggacctggtgctgcgcaagaacgagaagagcgtggtgctgtgcctgctggaggtggcgcggcgtggggcacgcctgggcctgctggccccacgcctcgtgcagtttgagcaggagattgagcgggagctgcgtgctgcacccccagcccccaacgcccctgccgctggggaggacaccactgaaaccgcccccgcaccagggactcctgcccgcggcccccgcatgacacccagcgacctgcgcaacctcgacgagctggtgagggagattctgggccgctgcacctgccctgaccagtttcccatgatcaaggtctcagaggggaagtaccgtgtgggggactcgagcctgctcatctttgtgcgggtgctgaggagccacgtgatggtgcgagtgggtggtggctgggacacgctggagcattacctggacaagcacgacccgtgccgctgctcctccactgctcatcgcccaccccagccgagggtctgcaccttttctccacagagggtgtcgcccaccaccagtccccgccctgctagcccagtccctgggagtgagcgccggggctcccggcctgagatgactcccgttagcttacgaagcacaaaggaggggcccgagaccccacccaggccccgggatcagctgcccccccatccccgctcccgccgctactccggggacagtgactcctcagcctcctccgcccagagcggcccccttggtacccgcagtgatgacacaggcactggcccccggagggagcgacccagccggcggctgaccacaggcaccccggcctctccgagacggcctcctgcctgcgcagccagtcccgagaccggctggatcgcggccggccccggggggccccaggaggcaggggagcccagctgtcggtccccagccctgcccggcgggcccggagccagagccgcgaggagcaggctgtgctgcttgtgcgcagggatcgagacgggcagcactcatgggtgccaaggggcaggggcagtgggggctcgggcaggagcaccccccagactccccgtgcccgcagccctgcagcaccccggctttcccgggtctccagccccagtccagagttgggcaccacaccggccagcatcttccgcacacccctgcagctcgacccgcagcaggagcagcagctgttccggcgcctggaagaggagttcctggccaatgcccgggcccttgaggctgttgctagcgtgacccccactggaccagcccctgacccagctcgggcccccgaccctccagctcctgactctgcctattgttcctccagttcctcctcttcgtccctcagcgtcctgggtggcaaatgtggccaacctggggactctggccggacggccaatgggctgcctgggccccgaagccaagccctttccagctcctccgatgaaggcagcccctgccctggcatgggggggccactagatgcacctgggagccccctggcttgcactgaaccctcgaggacctgggcacggggtcggatggacacacagccagaccgtaaaccctcacgtatccccacgcctcggggcccccgccgcccctccggacccgcagagctggggacatggcatgccctgcactcagtcaccccgagggctgagccagattcctggatgtgatggaccagctcagctgtccccagaccccatcccttctccttttcctttgtggccttaacccttctgcatcagggagccccctctgcctcttgagtaccagacctcatgggaccagaccccttgggaccacatggcacaatgggacctctgttgtacattccggttgggggatgagcgttgctatttaattactaatattattgaatgccttagaggaggccgggcgagcccggtgttctgaagacctgtggcccagcagagcctctgacagtaaagttttgctccagc

SEQ ID NO: 242724 - DNA, 2481 bp, Artificial Sequence
  derived and/or modified sequence
atagagctgcggctcgggcggcgcctccctgcggcggcccggcccggctccggcccccgctggggcaatgctccccggggccgcgggatgagccaggtgagcgcggagacccccagcactccctgcctgtgactcggccggtccgggcatggcagacccagtggcgggcatcgcgggctcggcggccaagagcgtgcggccatttcgctccagtgaggcctacgtggaggccatgaaggaggacctggccgagtggctcaatgccttgtacggcctgggtctcccgggtggtggcgatggcttcctgacagggctggccacgggcacgaccctgtgccaacatgccaacgccgtgaccgaggctgcccgtgcattggcagccgcccgcccggcccgaggtgtggccttccaggcgcacagtgtagtgcctggctccttcatggcgcgcgacaacgtggccaccttcatcggctggtgccgcgtggagctgggtgtgccggaggtgctcatgtttgagactgaggacctggtgctgcgcaagaacgagaagagcgtggtgctgtgcctgctggaggtggcgcggcgtggggcacgcctgggcctgctggccccacgcctcgtgcagtttgagcaggagattgagcgggagctgcgtgctgcacccccagcccccaacgcccctgccgctggggaggacaccactgaaaccgcccccgcaccagggactcctgcccgcggcccccgcatgacacccagcgacctgcgcaacctcgacgagctggtgagggagattctgggccgctgcacctgccctgaccagtttcccatgatcaaggtctcagaggggaagtaccgtgtgggggactcgagcctgctcatctttgtgcgggtgctgaggagccacgtgatggtgcgagtgggtggtggctgggacacgctggagcattacctggacaagcacgacccgtgccgctgctcctccactgctcatcgcccaccccagccgagggtctgcaccttttctccacagagggtgtcgcccaccaccagtccccgccctgctagcccagtccctgggagtgagcgccggggctcccggcctgagatgactcccgttagcttacgaagcacaaaggaggggcccgagaccccacccaggccccgggatcagctgcccccccatccccgctcccgccgctactccggggacagtgactcctcagcctcctccgcccagagcggcccccttggtacccgcagtgatgacacaggcactggcccccggagggagcgacccagccggcggctgaccacaggcaccccggcctctccgagacggcctcctgcctgcgcagccagtcccgagaccggctggatcgcggccggccccggggggccccaggaggcaggggagcccagctgtcggtccccagccctgcccggcgggcccggagccagagccgcgaggagcaggctgtgctgcttgtgcgcagggatcgagacgggcagcactcatgggtgccaaggggcaggggcagtgggggctcgggcaggagcaccccccagactccccgtgcccgcagccctgcagcaccccggctttcccgggtctccagccccagtccagagttgggcaccacaccggccagcatcttccgcacacccctgcagctcgacccgcagcaggagcagcagctgttccggcgcctggaagaggagttcctggccaatgcccgggcccttgaggctgttgctagcgtgacccccactggaccagcccctgacccagctcgggcccccgaccctccagctcctgactctgcctattgttcctccagttcctcctcttcgtccctcagcgtcctgggtggcaaatgtggccaacctggggactctggccggacggccaatgggctgcctgggccccgaagccaagccctttccagctcctccgatgaaggcagcccctgccctggcatgggggggccactagatgcacctgggagccccctggcttgcactgaaccctcgaggacctgggcacggggtcggatggacacacagccagaccgtaaaccctcacgtatccccacgcctcggggcccccgccgcccctccggacccgcagagctggggacatggcatgccctgcactcagtcaccccgagggctgagccagattcctggatgtgatggaccagctcagctgtccccagaccccatcccttctccttttcctttgtggccttaacccttctgcatcagggagccccctctgcctcttgagtaccagacctcatgggaccagaccccttgggaccacatggcacaatgggacctctgttgtacattccggttgggggatgagcgttgctatttaattactaatattattgaatgccttagaggaggccgggcgagcccggtgttctgaagacctgtggcccagcagagcctctgacagtaaagttttgctccagc

SEQ ID NO: 242725 - DNA, 3381 bp, Artificial Sequence
  derived and/or modified sequence
atagagctgcggctcgggcggcgcctccctgcggcggcccggcccggctccggcccccgctggggcaatgctccccggggccgcgggatgagccaggtgagcgcggagacccccagcactccctgcctggtgcgcatggacgggggtggggaggcggggcgggaagcggcgtcctcggcctctgttccccggggctgtgtgaccttgggcggccccgcaccctctctgggcccagagccccagcaccggcagggcctgcggaggccgctctgagtcctggccccgcaggcaccggcctggagcgctggggaggcttcttggaggaggcggggcctggccctggccccggatcgccgagaccggccacgctgcgccgcctggacgccgggctcctccacccacagctctgcgaccttcacgagctcgaccctttctgcgcctcagtttcctcatctataaaatggagataatgcctccgcgcgctgagcccgagcgcggtcgtgctgttacactattgctgctgctatgtcgttaatgacggcacagcccttatggaaggggggccaaggaaggcacggggaccttcccgcaggacatggggtgggcaccagccctaagccatgcacataacccactctgaggtcaggacctgggttcctttcgtgtccactgggggccttagccgttgtcttcacttctctaggtcccagcccttcacaatgggcgcgcctccctgcctgagagggaggccccagccaagccccagtttccaccgcaaaaagccacacagcaaacacttaatggaccctaaatttataaaaattatcccatagagtcctatgaggcagggaatgttactgtacccatttcgcagatgaggaaacttggggcaccgacatttcccagagccaacatgtaaaccaggcatttggcctgagtgacagactggtgcaggtggccagcagcttaatttgtactgagcgcttactgggtccccacagcgatcctgaactgtgttcctgcccacagtgactcggccggtccgggcatggcagacccagtggcgggcatcgcgggctcggcggccaagagcgtgcggccatttcgctccagtgaggcctacgtggaggccatgaaggaggacctggccgagtggctcaatgccttgtacggcctgggtctcccgggtggtggcgatggcttcctgacagggctggccacgggcacgaccctgtgccaacatgccaacgccgtgaccgaggctgcccgtgcattggcagccgcccgcccggcccgaggtgtggccttccaggcgcacagtgtagtgcctggctccttcatggcgcgcgacaacgtggccaccttcatcggctggtgccgcgtggagctgggtgtgccggaggtgctcatgtttgagactgaggacctggtgctgcgcaagaacgagaagagcgtggtgctgtgcctgctggaggtggcgcggcgtggggcacgcctgggcctgctggccccacgcctcgtgcagtttgagcaggagattgagcgggagctgcgtgctgcacccccagcccccaacgcccctgccgctggggaggacaccactgaaaccgcccccgcaccagggactcctgcccgcggcccccgcatgacacccagcgacctgcgcaacctcgacgagctggtgagggagattctgggccgctgcacctgccctgaccagtttcccatgatcaaggtctcagaggggaagtaccgtgtgggggactcgagcctgctcatctttgtgcgggtgctgaggagccacgtgatggtgcgagtgggtggtggctgggacacgctggagcattacctggacaagcacgacccgtgccgctgctcctccactgctcatcgcccaccccagccgagggtctgcaccttttctccacagagggtgtcgcccaccaccagtccccgccctgctagcccagtccctgggagtgagcgccggggctcccggcctgagatgactcccgttagcttacgaagcacaaaggaggggcccgagaccccacccaggccccgggatcagctgcccccccatccccgctcccgccgctactccggggacagtgactcctcagcctcctccgcccagagcggcccccttggtacccgcagtgatgacacaggcactggcccccggagggagcgacccagccggcggctgaccacaggcaccccggcctctccgagacggcctcctgcctgcgcagccagtcccgagaccggctggatcgcggccggccccggggggccccaggaggcaggggagcccagctgtcggtccccagccctgcccggcgggcccggagccagagccgcgaggagcaggctgtgctgcttgtgcgcagggatcgagacgggcagcactcatgggtgccaaggggcaggggcagtgggggctcgggcaggagcaccccccagactccccgtgcccgcagccctgcagcaccccggctttcccgggtctccagccccagtccagagttgggcaccacaccggccagcatcttccgcacacccctgcagctcgacccgcagcaggagcagcagctgttccggcgcctggaagaggagttcctggccaatgcccgggcccttgaggctgttgctagcgtgacccccactggaccagcccctgacccagctcgggcccccgaccctccagctcctgactctgcctattgttcctccagttcctcctcttcgtccctcagcgtcctgggtggcaaatgtggccaacctggggactctggccggacggccaatgggctgcctgggccccgaagccaagccctttccagctcctccgatgaaggcagcccctgccctggcatgggggggccactagatgcacctgggagccccctggcttgcactgaaccctcgaggacctgggcacggggtcggatggacacacagccagaccgtaaaccctcacgtatccccacgcctcggggcccccgccgcccctccggacccgcagagctggggacatggcatgccctgcactcagtcaccccgagggctgagccagattcctggatgtgatggaccagctcagctgtccccagaccccatcccttctccttttcctttgtggccttaacccttctgcatcagggagccccctctgcctcttgagtaccagacctcatgggaccagaccccttgggaccacatggcacaatgggacctctgttgtacattccggttgggggatgagcgttgctatttaattactaatattattgaatgccttagaggaggccgggcgagcccggtgttctgaagacctgtggcccagcagagcctctgacagtaaagttttgctccagc

SEQ ID NO: 242726 - DNA, 2043 bp, Artificial Sequence
  derived and/or modified sequence
atggctgaccctgtggccggcattgctggcagcgctgccaagtctgtgcggcccttccgcagcagcgaggcctacgtggaggccatgaaggaggacctggccgagtggctgaatgccctgtatggcctgggcctgcccggcggcggagatggcttcctgaccggcctggccaccggcaccaccctgtgccagcacgccaatgctgtgacagaggccgcccgggccctggccgccgcccggcctgcccggggcgtggccttccaggcccacagcgtggtgcccggcagcttcatggcccgggacaacgtggccaccttcatcggctggtgccgggtggagctgggcgtgcctgaggtgctgatgtttgaaacagaggacctggtgctgaggaagaatgagaagtctgtggtgctgtgcctgctggaggtggccaggagaggagcccggctgggcctgctggccccccggctggtgcagtttgagcaggagattgaaagagagctgcgggccgcccccccagccccaaatgccccagctgctggggaggacaccacagaaacagccccagcccctggcaccccagcccggggccccaggatgacccccagcgacctgaggaacctggatgagctggtgcgggagatcctgggccgctgcacctgcccagaccagttccccatgatcaaggtgtctgagggcaagtacagagtgggggacagcagcctgctgatctttgtgcgggtgctgcggagccacgtgatggtgcgggtgggcggcggctgggacaccctggagcactacctggacaagcatgacccctgccgctgcagcagcacagcccacaggcctccccagccccgggtgtgcaccttcagcccccagagggtgagccccaccaccagccccaggcctgccagccctgtgcccggcagcgagcggcggggcagcaggcctgagatgacccctgtgtccctgcggagcaccaaggagggccctgagaccccaccccggccccgggaccagctgcccccccaccccaggagccgccgctacagcggggacagcgacagcagcgccagcagcgcccagagcggccccctgggcaccaggagtgatgacaccggcaccggcccccggcgggagcggcccagccggcggctgaccaccggcaccccagccagcccccggcggccccccctgcggagccagagccgggaccggctggaccggggccggcccaggggggcccctgggggccgcggggcccagctgtctgtgcccagccctgcccggcgggcccggagccagagccgggaggagcaggccgtgctgctggtgagaagagacagagatggccagcacagctgggtgccccggggccggggcagcggcggcagcggccgcagcaccccccagaccccccgggcccggagccctgctgccccccggctgagccgggtgagcagccccagccctgagctgggcaccaccccagccagcatcttccgcacccccctgcagctggacccccagcaggagcagcagctgttccggcggctggaggaggagttcctggccaatgcccgggccctggaggccgtggcctctgtgacccccaccggccctgccccagaccctgcccgggccccagaccccccagccccagattctgcctactgcagcagcagcagcagcagcagcagcctgtctgtgctgggcggcaaatgtggccagcccggggacagcggccgcacagccaacggcctgcccggccccaggagccaggccctgagcagcagcagtgatgagggcagcccctgccccggcatgggcggccccctggatgcccctggcagccccctggcctgcacagagcccagcaggacctgggcccggggccgcatggacacccagcctgacaggaagcccagccgcatccccaccccccggggcccccggcggcccagcggccctgctgagctgggcacctggcacgccctgcacagcgtgacccccagggctgagccagacagctggatgtag

SEQ ID NO: 242727 - DNA, 1614 bp, Artificial Sequence
  derived and/or modified sequence
atggctgaccctgtggccggcattgctggcagcgctgccaagtctgtgcggcccttccgcagcagcgaggcctacgtggaggccatgaaggaggacctggccgagtggctgaatgccctgtatggcctgggcctgcccggcggcggagatggcttcctgaccggcctggccaccggcaccaccctgtgccagcacgccaatgctgtgacagaggccgcccgggccctggccgccgcccggcctgcccggggcgtggccttccaggcccacagcgtggtgcccggcagcttcatggcccgggacaacgtggccaccttcatcggctggtgccgggtggagctgggcgtgcctgaggtgctgatgtttgaaacagaggacctggtgctgaggaagaatgagaagtctgtggtgctgtgcctgctggaggtggccaggagaggagcccggctgggcctgctggccccccggctggtgcagtttgagcaggagattgaaagagagctgcgggccgcccccccagccccaaatgccccagctgctggggaggacaccacagaaacagccccagcccctggcaccccagcccggggccccaggatgacccccagcgacctgaggaacctggatgagctggtgcgggagatcctgggccgctgcacctgcccagaccagttccccatgatcaaggtgtctgagggcaagtacagagtgggggacagcagcctgctgatctttgtgcgggtgctgcggagccacgtgatggtgcgggtgggcggcggctgggacaccctggagcactacctggacaagcatgacccctgccgctgcagcagcacagcccacaggcctccccagccccgggtgtgcaccttcagcccccagagggtgagccccaccaccagccccaggcctgccagccctgtgcccggcagcgagcggcggggcagcaggcctgagatgacccctgtgtccctgcggagcaccaaggagggccctgagaccccaccccggccccgggaccagctgcccccccaccccaggagccgccgctacagcggggacagcgacagcagcgccagcagcgcccagagcggccccctgggcaccaggagtgatgacaccggcaccggcccccggcgggagcggcccagccggcggctgaccaccggcaccccagccagcccccggcggcccccagcctgtgccgccagccctgagaccggctggattgctgctggccctgggggcccccaggaggccggggagcccagctgccgcagccctgccctgcccggcggccctggggcccgggccgcccggagccggctgtgctgcctgtgtgccggcatcgagaccggcagcacccacggctgccagggcgctggagctgtgggcgcccgggccggggccccaccccggctgcctgtgcctgctgccctgcagcaccctggcttccctggcagccctgcccctgtgcagagctgggccccccacaggcctgccagcagcgcccacccctgcagcagcaccaggagccgcagcagcagctgcagcggggcctggaagaggagctcctggcccatgcctggccccctgcggctgctgctggcctag

SEQ ID NO: 242728 - DNA, 2043 bp, Artificial Sequence
  derived and/or modified sequence
atggccgaccccgtggccggcatcgccggcagcgccgccaagagcgtccggccctttcgctctagtgaggcctacgtcgaagctatgaaggaggatctcgctgaatggctgaatgccctctacggattgggtctgcccgggggcggcgacggcttcttgaccggcctggccacagggacaaccctttgtcagcatgcaaacgcagtcaccgaggctgcgagagcgctggctgccgcgcgtccagctagaggcgttgcttttcaagctcattctgtggtgcccggcagctttatggcaagggacaacgtagccacatttatcggatggtgtcgcgtagaacttggagtccccgaagttttgatgtttgagactgaagatctggtgttgcgtaaaaatgaaaaatccgtggtgctctgcctactggaagttgctagacgcggcgctcgcttggggcttcttgcacccagacttgttcaattcgaacaggagatcgagcgcgaactgagagccgcgccgccagctcctaacgcacccgccgctggagaagacacaactgagacagcaccagcacctggcacacctgcccgcggtcctagaatgaccccttccgatcttaggaaccttgatgagttagtgcgcgaaattttgggccgatgtacatgtcccgatcagtttcctatgataaaggtgtcagaagggaaataccgggtgggagacagcagcttacttatctttgttcgcgtcctgagaagccacgtcatggtccgtgtcggcggtgggtgggacacactagagcactacttggacaaacacgatccctgtcgatgttcttccacagcacataggcccccccagccgcgtgtgtgtacttttagcccacaacgggtgtcccccacaacaagtccacgccccgcatcgccagtccctggcagtgaaaggcgcggcagccggcctgagatgacccccgtgtccctgcggtccactaaggagggccccgagacccctccacgtccgcgggaccaactacctcctcacccacggtctcgaagatattcgggcgacagcgactcgagtgcctcaagcgcacagtctgggcctctggggactcggagtgatgacacagggactggcccgagaagagaacgaccctctcggcgactgaccacagggaccccggctagcccacgcagaccccctctccgaagccagtcccgagaccgtctcgaccgaggaagaccccgtggcgcacctggcgggcgtggggcccagctctccgtgccttcaccagcccgacgggccaggtctcagagccgcgaggagcaagccgtgctgctggtgagaagggaccgggatggccaacactcatgggtacccagagggaggggctcagggggaagcggacggtccacaccacagacaccccgcgcccgatctccggctgcgcctaggctgtcacgggtgtcatcaccatctccagagctggggaccacgcctgccagtatctttcggactcccctgcagttggatccccagcaggagcagcagctgtttcgtcgcctggaagaggagttcctcgcaaatgccagagctctggaggccgtggcttctgtgacgcccacagggcccgctcccgatccagcccgggcccctgatccaccggcacctgacagtgcctattgctcatcctcatcctcatctagttccctcagcgtcctgggcgggaagtgcggtcagccaggggatagcggccgcaccgccaacggattgccggggcctcggtctcaggctcttagctcatctagcgacgagggttcaccctgccccggaatggggggaccgctcgacgctcccgggagtccccttgcctgcaccgagccatctcgtacatgggcccgtggacgtatggacacgcagccagatcgcaagcctagtagaatccctacgccccgggggccccggcggccctctggccctgctgagctgggcacctggcacgctttgcactctgtgacgccgcgggccgagcctgactcgtggatgtag

SEQ ID NO: 242729 - DNA, 1614 bp, Artificial Sequence
  derived and/or modified sequence
atggccgaccccgtggccggcatcgccggcagcgccgccaagagcgtacgtccgttccggagttccgaggcatacgtggaggccatgaaagaagatttagctgagtggctgaatgccttgtacggcctgggcttgcctggcggaggcgacgggtttcttacgggcctggctactggcaccacactctgtcagcatgccaatgccgtcaccgaggccgcccgcgcgcttgcagcagcaaggcctgcccgcggtgtcgcgttccaggctcacagtgtagtacctgggagctttatggcacgggataacgtggccacattcatcggctggtgcagagtggaactgggggttccagaggtgctgatgtttgaaactgaggatctggtactgaggaaaaacgaaaagtccgtcgtgctgtgtctgcttgaggtcgctcgacgaggagccagactgggacttctggcccccagattggtacagtttgaacaggaaattgagagagaactgcgcgcggcaccaccggccccaaacgctcccgccgcaggagaggacacaactgagaccgctcccgcacccggtacacctgcacgggggcctagaatgaccccatctgatcttcggaatctggacgaactggtgagagaaattctcggccgatgcacctgccctgaccagtttcctatgattaaggtgtctgagggcaagtatcgcgtcggcgatagtagcttactgattttcgtccgggtgttgagaagccatgtgatggtgagagtaggcggggggtgggacacactggaacactacctggataagcacgacccttgccgctgctcgtctactgcccatcggccgccccagcctcgggtatgcacgttttccccccaaagggtgagcccaaccaccagcccacgcccagcctctcctgttcccggtagcgaaagacggggaagccgaccagagatgactcccgtttcgctccgttccacgaaagagggacctgaaacaccacctcgccccagggaccagcttcccccacatcctaggtcccggcgctattccggcgactctgattctagtgcgtcatcagcacagagcggtccactggggactagatcagacgatacagggactggtccccggcgggagagaccttctcggagactgacgaccggaacaccagcatcccctagacgaccccccgcctgtgcagccagtcctgagacaggctggatcgctgctgggcccggcgggccccaggaggccggcgagccgagttgcaggtccccggccctgcctggaggcccgggagctagggcagctcggtcgagactgtgttgcctgtgcgctggtatcgagacgggcagtactcacgggtgtcaaggggccggtgccgtcggggccagagccggcgcgcccccaaggctacccgtgccagcggctcttcagcatcccggattccccggttcacccgcacccgtgcagtcttgggccccacacaggcccgcgtctagcgctcatccttgcagctccaccagatcaagaagttcttcatgctccggggcttggaaaagatcatcatggccaatgcctggtccactacgactactgctggcttag

SEQ ID NO: 242730 - DNA, 1614 bp, Artificial Sequence
  derived and/or modified sequence
atggccgaccccgtggccggcatcgccggcagcgccgccaagagcgtgcgtccttttcggagcagtgaagcttacgttgaagccatgaaagaggatctagctgagtggctcaatgctctctacggcctggggctgcctggcggaggcgacggtttcctgaccgggttagctactggcacaactctgtgccagcatgcaaatgccgtgacagaggctgcccgtgcgcttgcagcggcacgaccagcgaggggtgtggcgttccaggcccacagtgtcgtgcccggctcattcatggccagggataatgtggcaaccttcataggctggtgcagagtggaacttggtgttcctgaagttctgatgtttgagacggaagacttggtgttgcgcaaaaacgaaaaatctgttgtactgtgcctgttggaggtggcaagaaggggagccagactggggttgcttgcaccacgccttgtgcagtttgaacaggaaattgaaagagagctgagggcggcgccaccggcaccgaatgctcccgccgctggcgaagacacaaccgaaaccgctccagctccgggcaccccggcaagaggcccacggatgacaccgtccgatctacgaaacctggacgagctagtgcgtgagatcctgggaaggtgcacttgccctgatcaattccccatgatcaaggtcagtgagggcaagtacagagtcggcgactcctctctgctgattttcgtgcgggtgcttcgttctcatgtcatggtgagagtgggaggcggctgggatactctcgagcattatctcgataagcatgatccctgtaggtgttctagtaccgcacaccgacctccacagccccgtgtctgcacattttcccctcagagagtcagtcctacaacctcaccccggccagcaagccccgtgccagggtccgaacggagaggctctcgtcccgagatgacccctgtgagcttgaggtccactaaggagggccctgagacccccccccgcccacgggatcaactgccaccccacccccgtagcaggcgctattccggcgactctgactctagcgcaagtagcgctcagagcggtccattagggacgcgcagtgatgacaccggaacaggacccagaagagaacgtcctagcaggagactaaccactggaaccccagcttctccacggcgtccccccgcttgtgctgcctctcctgagacgggctggatagccgctggtcccggcgggccgcaggaggcaggtgaaccttcctgccgaagcccggccctgcccggcggtccaggagcaagggccgctcgctcacgtctctgctgtctatgcgccggaatagaaacgggatcgacacatgggtgtcaaggggcaggggcagtgggcgcaagagcgggggcacccccacggctcccggtgcccgccgcattgcaacatcctggatttcccgggtctcccgctccagtccaatcatgggccccccaccggcctgcctccagcgcccatccgtgcagctctaccaggagtagatcatcatcctgttccggcgcctggaaacgctcgtcttggccgatgcccggccccctgcggttattgcttgcgtag

SEQ ID NO: 242731 - DNA, 1614 bp, Artificial Sequence
  derived and/or modified sequence
atggccgaccccgtggccggcatcgccggcagcgccgccaagagcgttcgcccattcagatcttctgaggcctacgtcgaggccatgaaggaagatctggctgagtggctgaacgctctgtacggccttgggctgcccggcggaggagatggttttttaaccgggctggctacggggacgacactctgccagcatgcgaacgctgtgaccgaggctgcccgggccttagccgccgcaaggcctgctaggggcgtcgcttttcaggcccatagcgtcgttccagggagttttatggccagagacaatgtggcaactttcatcggatggtgtcgcgtggagctcggggtacctgaggtactcatgtttgagactgaggacctggttcttagaaaaaatgagaagtcggtggttctatgcctgctggaggtcgcccggcgaggtgccagactgggtctgcttgccccccggctggttcaatttgagcaggagatcgagcgggaactgcgggctgcaccccccgctcccaacgcccccgctgccggtgaggacacgaccgagaccgcacccgcaccagggactccagcccgaggccccaggatgacaccatctgacctccggaacctcgacgagctcgttcgggaaatactgggacgatgcacatgccctgatcaattccctatgatcaaggtgtcagaggggaagtaccgtgtcggggacagcagcctcctaattttcgtgagggtgctgaggtcccatgtgatggtgagggtcggtggaggctgggacactctcgaacactacctcgacaagcatgatccctgtaggtgcagctcaactgctcacaggcctcctcaaccccgtgtgtgcacattctccccacaaagagtatccccaacaactagccctcgtccagcttccccagtgccaggcagtgaaagacgcgggtctcgcccagaaatgactccagtctccctgaggagcaccaaggagggaccagaaactccacccaggcccagagatcagctccccccccaccctaggtcacggcgttatagcggagactctgactctagcgcaagtagcgcacagagcggccccctaggcactcgaagcgacgataccggcaccgggcccagaagagaaagacctagccgcagacttactaccggcacgccagcatcaccccgtaggcctcccgcatgcgccgcgtctcctgaaaccggatggatcgccgccgggccaggaggcccacaggaggccggggaaccatcatgcagaagtcccgctctccccggaggacctggagctcgcgcagcaagaagcagattgtgctgtctatgcgctggtattgagaccgggagcacacatggctgccaaggcgcgggggcagtgggagccagggcgggcgctccacctcgactgcccgtgccagctgcactgcagcacccaggattcccagggtcacctgcacccgtgcaaagctgggctcctcatagaccagcctcatcagcacacccatgttcttccacaagaagcagaagtagctcttgctctggtgcttggaagcggtccagttggcccatgccgggcccactccggttactgctcgcatag

SEQ ID NO: 242732 - DNA, 1614 bp, Artificial Sequence
  derived and/or modified sequence
atggccgaccccgtggccggcatcgccggcagcgccgccaagagcgtgcgaccttttagaagctccgaagcttacgttgaggcgatgaaagaggatctggccgaatggttgaacgcgctctatgggctcggtctgccaggcgggggggatggattcctaaccggcctggccaccgggacaaccctgtgtcaacacgccaacgcagtgaccgaagctgcgcgcgcattggcagcagcccgccctgccaggggcgtggccttccaggcccattccgttgtaccaggcagctttatggcacgcgacaacgtggccaccttcataggatggtgccgcgtggaactgggtgtccctgaggtcttgatgttcgagaccgaagatctggtgctgcgcaagaatgagaagagcgttgttctatgccttcttgaagtagcccgccggggtgcacggctgggtctgttggctcctagactggtgcagttcgagcaggagatcgaacgagagctccgcgctgctccgccagcccctaatgccccagcagcgggggaagacacgacagagactgctccagcccccgggacaccagcccggggacctagaatgactccttctgatttacgcaatttagatgagctagtgcgggagatcttaggcagatgcacctgtccggaccagtttcctatgattaaggtgtccgagggaaaatatagagtgggagatagctccctgctaatctttgtgcgcgtattgaggtcccacgtcatggtgcgcgtgggtggaggatgggatactttggagcattacctagacaaacatgacccctgccggtgcagctcgaccgcccatcgtcctccacaacccagagtctgtactttctccccccagagagtgtctccgacgacttctccccgaccggcaagcccagtgcctgggtcagagcggagaggatcccgccccgagatgacacccgtcagcttgaggagcacaaaggagggtccagaaacgcccccaaggccgagggaccagttgcctccccatcctcgtagccgtaggtacagcggtgattccgacagttctgcctcttcggcgcaaagcggccctcttggaacacggagcgatgacacaggaaccggccccagaagggagcgtccgtctaggcgtctgacaaccgggacgcccgcctcccccaggcgtcccccggcttgcgccgcaagcccagagacagggtggatcgcagctggtcccggagggccgcaagaagccggagaaccatcttgccggagccccgcgctgcccggagggcccggtgctcgggctgccaggagccggctttgttgtttgtgtgctggaatcgaaactggcagcactcacggatgtcagggcgctggtgcggtcggtgcccgtgccggtgcaccacctcgtctgccggtgcctgctgccctacagcatcccgggtttcctggctcgcccgcccccgtgcagtcctgggcgccccaccgtccagcgtcctcggcccatccatgtagtagcacacggtctagatcctcatcctgttcgggcgcatggaaacggtcatcatggcctatgcccggccccctgcggctgctcctggcttag

SEQ ID NO: 242733 - DNA, 2043 bp, Artificial Sequence
  derived and/or modified sequence
atggctgatcccgtggctggtattgcaggtagtgctgcaaaaagcgtcagacctttcagatcctctgaggcctacgtcgaggccatgaaggaggacctggccgaatggctcaatgctctttatggcctcgggctgcctggcggtggtgacggcttcctgactggtcttgccacaggtaccactctctgccagcatgctaacgcggtcacagaggctgctcgagccctcgctgctgccagacctgcccgaggcgttgctttccaagcccattctgtggtgcctggcagtttcatggcccgagacaacgttgccacattcatcgggtggtgccgagtagaactaggtgtgccagaagttctcatgttcgagacagaagaccttgtgctccgaaagaatgaaaaatccgtggtactgtgcttgctggaggtggcaagaagaggcgctcggttaggtctcctagcaccccgactggtccagttcgaacaggagatcgaacgggagcttcgcgcagccccacccgctcctaatgcgcctgcagctggagaggacactaccgagacggcacccgctccaggaaccccggctcgcggtccacgcatgacaccttctgatttgcgtaacctggatgaactggttcgggagattctggggcgttgcacctgtcccgaccagtttccaatgatcaaggtgagcgagggaaaatatagggttggcgactcttcactccttattttcgtcagggtcttacgaagccatgtcatggtgcgggtggggggagggtgggatacccttgaacattatctggacaaacacgacccttgtcgatgtagctcaaccgcacatcgccctccacagcctcgagtctgcacgttcagcccccagcgcgttagtccgaccactagtccaagacccgcaagtcctgtcccagggtcagagaggcggggatctaggcccgaaatgacccccgtgagcctgcgttctacaaaagaaggcccagaaacaccacctagaccacgggaccagttaccaccgcaccccaggtctaggagatattctggagactctgattcctcagccagctctgctcagagtggaccccttggaaccaggtctgacgacactggaactgggccacggagagaacgaccatcaaggcgccttaccaccggcactccagcttccccccgacgaccccctctccgtagccagtcacgtgatcgtctcgaccgaggacgaccgagaggagcccctgggggtaggggggctcagttgagcgttccctctccagccagacgggcacgctcacaatcaagggaagaacaagccgtgctactggtacgtcgcgatagggacggacagcattcctgggtaccaaggggtagaggcagtgggggttcagggcgatcaaccccccagactccaagagccaggtcccctgcagccccaagactgtcccgggtttcctcaccttcccccgagcttggtacaacacccgcatcaatctttcgcacacctctccagctggatcctcagcaggagcagcagctattcagacggttggaggaagaattcctggctaacgcccgagccctggaggcggtggcttctgtgacaccaacaggacccgcacctgatccagctagggccccagaccctcccgcacccgatagtgcttattgcagttcgtctagttccagcagttctttgtctgtgctgggcggtaaatgcggtcagcccggagatagcggccgtacagccaatgggctccccggaccacgctcccaggctctgtctagctccagcgacgagggatctccttgtccaggtatgggcggacccctggacgcgccaggatctccactggcttgcaccgaaccttcaaggacgtgggctagaggtagaatggatacccagcccgaccgaaagccttctagaatcccaaccccacgcggtcccagaagaccatctggcccagctgagctgggaacgtggcatgcacttcattctgtaaccccacgagccgaacctgacagctggatgtag

SEQ ID NO: 242734 - DNA, 1614 bp, Artificial Sequence
  derived and/or modified sequence
atggcagacccagttgcagggatcgctggatcagcagccaaatccgtcagaccattcagatcgtccgaagcctacgtagaagccatgaaggaggatctggccgaatggctaaacgctttgtacggattaggccttcctgggggaggtgacgggttcctgaccggactggccactggcactacactatgccagcatgctaacgccgttactgaggccgcacgtgctctggcggcagcgagacctgcccgtggcgttgccttccaggcacattcagttgtccctggctcttttatggcaagggataacgtcgcgacattcattggctggtgtcgggtcgagctgggggtgcccgaggtgctaatgttcgagacagaagacctcgttctcagaaagaatgagaagagcgttgttctctgcttacttgaagtggccagaagaggagcccgactcgggcttctggccccacggcttgtgcagttcgaacaagagatcgagagggaattgcgagctgcaccgccagcgcctaacgcccctgctgccggtgaggatacaacagaaacagctcctgctcctggaactcccgcacgaggtcccagaatgactccttctgatctgcggaatttggacgaactggttagggagatcctggggagatgcacttgtcctgatcagtttcccatgattaaagtgtcggaaggtaagtacagggtgggggattccagcttgctcatatttgtccgtgtgctacggagtcatgtgatggtgcgggtcggaggcggttgggacacgctcgaacactaccttgataagcatgatccctgccgctgttctagcaccgctcataggccacctcagccaagggtctgtactttttctcctcaacgggtgtcccccaccactagtccacgccctgctagccctgtacctggaagcgagaggaggggaagccgaccagagatgaccccagtctccctgaggtctaccaaggagggcccagaaacaccccctagaccaagggaccagctgcctccacatcccagaagccggaggtactctggtgacagcgactcgtccgcctcctctgcccagtctggcccactgggcaccagaagtgacgacaccggaaccggccctcgcagggaacgcccatcccggaggttaacgaccggtacccctgccagcccaaggcggccacctgcgtgcgctgcctccccagagaccggttggatcgctgccggtcccggtgggcctcaggaggccggagaaccaagctgtcggtccccagctctgccaggtggaccaggtgctcgcgctgccaggtcacggttatgctgtctgtgtgctggaattgagacagggtccacccacggatgccagggagccggtgcagtgggggctcgggcaggagcacctcctcggttgcccgtgccagccgcactccagcacccaggattcccaggttccccagcacctgtccagagctgggcaccccaccggccagcgtccagtgcccatccctgctccagcacccgctccagatctagctcttgcagtggcgcatggaaaaggagctcctggcctatgcctgggcctctgagattattgctggcatag

SEQ ID NO: 242735 - DNA, 1614 bp, Artificial Sequence
  derived and/or modified sequence
atggccgaccctgtggccggtattgcgggaagcgcagctaagtccgtgagaccgttcagatcatcagaggcgtatgtcgaagccatgaaagaggacctggccgaatggctgaacgccttatacggactcggcctgcccggaggaggcgatggctttcttaccgggcttgcaactggtacgactctgtgtcagcacgcgaacgctgtaactgaggcagcacgtgccctggcagccgctagacctgccagaggcgttgcgttccaggctcattccgtggtgccgggaagctttatggctagagataatgtggccaccttcattggttggtgtcgagtcgagttaggggtacccgaagtgcttatgttcgagacagaggacctggtgttgcggaagaacgaaaagtcagtggtgctctgcctgctggaagttgctcgcaggggtgcaaggttggggcttctggccccacgtcttgttcaatttgagcaagagattgaacgtgaattgcgcgcagctccaccagccccaaatgcacctgccgcaggagaagataccacagagaccgcccctgccccaggcactccagccagagggccaaggatgaccccttcggacctaaggaatctggatgagttggtcagagagattctcggacgctgcacgtgtccagaccaatttccaatgatcaaggtttccgaagggaagtatcgcgtgggtgattcatcgctcttgattttcgtccgggtgctacgatcacatgtcatggtgagggtcggcggaggatgggacaccctagagcactatctagataagcacgatccttgtagatgctctagcactgctcatagaccaccacagcccagggtctgtacctttagtccccagagggtgtcacctacaacctctcccagaccagcctctcccgtgcctggttctgaaaggagaggatcccggccagagatgacgccagtgtctctccggagtacaaaagaagggcctgaaacccccccacggcctcgggatcaattgcccccacacccccgatcacgccgatactccggcgattctgattcgagcgcctccagcgcacagtccggacccctcggaacgcgcagcgatgacacaggcacaggccctaggagagagcgacccagccgcagactgaccactggaacccccgcaagccctcgacgtccccctgcttgtgcagcttctcctgagactggatggatcgctgctggtccaggcggaccacaggaagcaggggaaccctcctgcaggtcaccagcccttcctggcggacccggtgcaagggccgctcgttcgcgactgtgctgtctctgcgccggtatcgagacgggttccacccatggatgccagggcgcaggagctgtgggagccagggccggtgcacctccacggctgcctgtgccggcagcgctccagcatcctggctttcccggatcgccggcacccgtccagagctgggccccacataggcctgcatcctccgcacatccttgctcgtccacaagaagtagaagcagcagctgcagtggtgcctggaagcgttcttcatggccgatgcctgggccattgcgccttctcctcgcatag

SEQ ID NO: 242736 - DNA, 1614 bp, Artificial Sequence
  derived and/or modified sequence
atggctgatcctgtcgccggaatagcaggatccgccgctaagtccgttaggccgttcaggagctctgaggcttacgtagaagccatgaaggaggacctcgccgaatggcttaacgccctgtacggactcggattgcccggaggaggggatgggttcctgaccggtctcgccaccgggaccaccctatgtcagcacgctaacgccgttacggaggctgccagggctctcgccgctgcacggcctgctcgaggagtagcctttcaggcccattctgtagtccctggttccttcatggctcgggataatgtggcaacctttattggctggtgcagagtggagttgggtgttcccgaggtgctgatgttcgagaccgaggatttggtactgcggaaaaacgagaagagtgtggtcttatgtctgcttgaagttgccagacgaggcgctagattgggcctgctcgcaccacgccttgtacaatttgagcaggagatcgaaagagaactcagggcagctcctccagctcctaatgccccagctgctggagaagacaccactgaaactgctccagcgccagggactcccgctcggggacctcggatgactcccagcgatctacgtaatctggatgaactggtgagggaaatcctggggaggtgtacatgccccgatcagtttccaatgataaaggtgtccgaggggaagtatagagtgggcgacagctcactactgattttcgtccgagtgctgcgtagtcacgtcatggtgcgcgttggaggcggttgggataccctcgagcactacctggataagcacgacccttgtcggtgctctagcaccgcccaccgtccccctcaaccacgtgtgtgtactttttcaccccagagggtgagtcctacaacaagcccccgaccagcgtcgccggtgccagggtcggaaaggcgcggatcaaggcccgagatgacccctgtatctctgaggtcaacgaaagagggacccgaaacacctccaagacctagagaccagctgccccctcatcctagaagccgaagatacagtggggactctgattcctccgcgtcaagcgcccagtctggccctctcgggacacgctctgatgatactggcaccggcccacgcagggagaggccaagcaggaggctgacaacgggcacccccgcttcacccagaaggccccctgcttgtgccgctagccctgagactggctggattgccgcaggcccaggcggaccgcaggaagccggtgagcccagttgtcgatcacctgccctgcctggcggtccgggagcccgagctgctagatcccggttgtgttgcctgtgtgcaggcattgaaaccgggtccacacacggttgccagggggctggcgcagtgggggctcgcgctggggctccacccagactcccagtgcctgctgctctacagcaccccggatttccgggtagtccagctcctgtgcagagttgggccccacacagacccgcaagctccgcacacccctgctctagtactcgctcaaggtcaagctcatgctccggggcttggaagcgctccagctggcccatgcccggacccctgcggctcctgctggcatag

SEQ ID NO: 242737 - DNA, 1614 bp, Artificial Sequence
  derived and/or modified sequence
atggcagaccctgtggctggaatcgctggcagcgccgctaaatcggttcgacctttccgaagtagcgaagcctacgttgaagctatgaaggaggatttggctgaatggttgaacgccctctatggcttgggactcccaggtggaggggatggctttttgaccggactggcgactggcaccacactgtgtcagcacgctaatgcagtcaccgaggcagctagggcactggccgcagctcgcccagccagaggcgtggcattccaggcgcatagtgtagtcccagggagttttatggccagagacaatgtggcaaccttcatcggctggtgcagggtagagctgggtgtgcctgaggtgctaatgtttgagaccgaagacctcgtactccgaaaaaacgagaagtccgttgtattatgcctacttgaggtcgctagaagaggtgcaaggctcggcctgctggcacctcgtctagtgcagtttgaacaggagatcgaaagggagcttagagccgcaccgccagccccaaacgcccctgctgctggcgaggacactacagagaccgcgccagctccgggaactccggctcgtggtccaaggatgacaccctccgacctacgcaacctggacgagctggttcgtgagatcttgggcagatgcacatgtccggatcaatttccaatgatcaaggtgtcagagggcaagtatcgcgtgggcgattctagcttacttatatttgtacgtgtactgcggtcacacgtgatggtgagagtgggaggtggctgggataccctagaacattatctggataaacacgatccctgtcggtgctcatccacagcccatcggccaccccaaccaagggtttgcacctttagccctcaacgagtgtcgcctaccaccagtccacgaccagccagccctgtgccgggaagcgagaggcgaggctctaggccagagatgacaccggtctctttgagatcaacaaaagaagggcctgagactcccccaaggcctcgagaccagctccctcctcaccccaggagcagaagatatagcggggacagtgactcctccgctagttccgcccagtctggccctcttggtacgagatccgatgacacaggtacaggccctcgcagggagcggccatcgagaagactgactaccggcacccctgcgtcacctagacgcccacccgcttgcgctgcatcccctgagaccggatggattgccgctggcccaggcggaccccaggaggccggagaaccctcgtgccggagccccgcacttcctggcggtcccggtgctcgcgctgctagaagtcgcctgtgttgtctatgcgccggtatcgagacaggctccacccacgggtgccagggagcaggagctgtcggcgcaagggcgggagccccacctcggctccctgttcctgcagccttgcaacacccaggatttcccggatctcccgcacccgttcaatcctgggctccgcaccgaccagcttccagcgcccatccctgttcttcaactcggagcaggagctcttcctgtagcggtgcctggaagcgctccagttggccaatgccaggcccactccggttgctgcttgcttag

SEQ ID NO: 242738 - DNA, 2043 bp, Artificial Sequence
  derived and/or modified sequence
atggccgaccccgtggccggcatcgccggcagcgccgccaagagcgtgagacccttcagaagcagcgaggcctacgtggaggccatgaaggaggacctggccgagtggctgaacgccctgtacggcctgggcctgcccggcggcggcgacggcttcctgaccggcctggccaccggcaccaccctgtgccagcacgccaacgccgtgaccgaggccgccagagccctggccgccgccagacccgccagaggcgtggccttccaggcccacagcgtggtgcccggcagcttcatggccagagacaacgtggccaccttcatcggctggtgcagagtggagctgggcgtgcccgaggtgctgatgttcgagaccgaggacctggtgctgagaaagaacgagaagagcgtggtgctgtgcctgctggaggtggccagaagaggcgccagactgggcctgctggcccccagactggtgcagttcgagcaggagatcgagagagagctgagagccgccccccccgcccccaacgcccccgccgccggcgaggacaccaccgagaccgcccccgcccccggcacccccgccagaggccccagaatgacccccagcgacctgagaaacctggacgagctggtgagagagatcctgggcagatgcacctgccccgaccagttccccatgatcaaggtgagcgagggcaagtacagagtgggcgacagcagcctgctgatcttcgtgagagtgctgagaagccacgtgatggtgagagtgggcggcggctgggacaccctggagcactacctggacaagcacgacccctgcagatgcagcagcaccgcccacagacccccccagcccagagtgtgcaccttcagcccccagagagtgagccccaccaccagccccagacccgccagccccgtgcccggcagcgagagaagaggcagcagacccgagatgacccccgtgagcctgagaagcaccaaggagggccccgagaccccccccagacccagagaccagctgcccccccaccccagaagcagaagatacagcggcgacagcgacagcagcgccagcagcgcccagagcggccccctgggcaccagaagcgacgacaccggcaccggccccagaagagagagacccagcagaagactgaccaccggcacccccgccagccccagaagaccccccctgagaagccagagcagagacagactggacagaggcagacccagaggcgcccccggcggcagaggcgcccagctgagcgtgcccagccccgccagaagagccagaagccagagcagagaggagcaggccgtgctgctggtgagaagagacagagacggccagcacagctgggtgcccagaggcagaggcagcggcggcagcggcagaagcaccccccagacccccagagccagaagccccgccgcccccagactgagcagagtgagcagccccagccccgagctgggcaccacccccgccagcatcttcagaacccccctgcagctggacccccagcaggagcagcagctgttcagaagactggaggaggagttcctggccaacgccagagccctggaggccgtggccagcgtgacccccaccggccccgcccccgaccccgccagagcccccgacccccccgcccccgacagcgcctactgcagcagcagcagcagcagcagcagcctgagcgtgctgggcggcaagtgcggccagcccggcgacagcggcagaaccgccaacggcctgcccggccccagaagccaggccctgagcagcagcagcgacgagggcagcccctgccccggcatgggcggccccctggacgcccccggcagccccctggcctgcaccgagcccagcagaacctgggccagaggcagaatggacacccagcccgacagaaagcccagcagaatccccacccccagaggccccagaagacccagcggccccgccgagctgggcacctggcacgccctgcacagcgtgacccccagagccgagcccgacagctggatgtag

SEQ ID NO: 242739 - DNA, 1614 bp, Artificial Sequence
  derived and/or modified sequence
atggccgaccccgtggccggcatcgccggcagcgccgccaagagcgtgagacccttcagaagcagcgaggcctacgtggaggccatgaaggaggacctggccgagtggctgaacgccctgtacggcctgggcctgcccggcggcggcgacggcttcctgaccggcctggccaccggcaccaccctgtgccagcacgccaacgccgtgaccgaggccgccagagccctggccgccgccagacccgccagaggcgtggccttccaggcccacagcgtggtgcccggcagcttcatggccagagacaacgtggccaccttcatcggctggtgcagagtggagctgggcgtgcccgaggtgctgatgttcgagaccgaggacctggtgctgagaaagaacgagaagagcgtggtgctgtgcctgctggaggtggccagaagaggcgccagactgggcctgctggcccccagactggtgcagttcgagcaggagatcgagagagagctgagagccgccccccccgcccccaacgcccccgccgccggcgaggacaccaccgagaccgcccccgcccccggcacccccgccagaggccccagaatgacccccagcgacctgagaaacctggacgagctggtgagagagatcctgggcagatgcacctgccccgaccagttccccatgatcaaggtgagcgagggcaagtacagagtgggcgacagcagcctgctgatcttcgtgagagtgctgagaagccacgtgatggtgagagtgggcggcggctgggacaccctggagcactacctggacaagcacgacccctgcagatgcagcagcaccgcccacagacccccccagcccagagtgtgcaccttcagcccccagagagtgagccccaccaccagccccagacccgccagccccgtgcccggcagcgagagaagaggcagcagacccgagatgacccccgtgagcctgagaagcaccaaggagggccccgagaccccccccagacccagagaccagctgcccccccaccccagaagcagaagatacagcggcgacagcgacagcagcgccagcagcgcccagagcggccccctgggcaccagaagcgacgacaccggcaccggccccagaagagagagacccagcagaagactgaccaccggcacccccgccagccccagaagaccccccgcctgcgccgccagccccgagaccggctggatcgccgccggccccggcggcccccaggaggccggcgagcccagctgcagaagccccgccctgcccggcggccccggcgccagagccgccagaagcagactgtgctgcctgtgcgccggcatcgagaccggcagcacccacggctgccagggcgccggcgccgtgggcgccagagccggcgccccccccagactgcccgtgcccgccgccctgcagcaccccggcttccccggcagccccgcccccgtgcagagctgggccccccacagacccgccagcagcgcccacccctgcagcagcaccagaagcagaagcagcagctgcagcggcgcctggaagagaagcagctggcccatgcccggccccctgagactgctgctggcctag

SEQ ID NO: 242740 - protein, 391 aa, Artificial Sequence
  derived and/or modified sequence
MPGPQGGRGAATMSLGKLSPVGWVSSSQGKRRLTADMISHPLGDFRHTMHVGRGGDVFGDTSFLSNHGGSSGSTHRSPRSFLAKKLQLVRRVGAPPRRMASPPAPSPAPPAISPIIKNAISLPQLNQAAYDSLVVGKLSFDSSPTSSTDGHSSYGLDSGFCTISRLPRSEKPHDRDRDGSFPSEPGLRRSDSLLSFRLDLDLGPSLLSELLGVMSLPEAPAAETPAPAANPPAPTANPTGPAANPPATTANPPAPAANPSAPAATPTGPAANPPAPAASSTPHGHCPNGVTAGLGPVAEVKSSPVGGGPRGPAGPALGRHWGAGWDGGHHYPEMDARQERVEVLPQARASWESLDEEWRAPQAGSRTPVPSTVQANTFEFADAEEDDEVKV

SEQ ID NO: 242741 - protein, 60 aa, Artificial Sequence
  derived and/or modified sequence
MPGPQGGRGAATMSLGKLSPVGWVSSSQGKRRLTADMISHPLGDFRHTMHVGRGGDVFGD

SEQ ID NO: 242742 - protein, 70 aa, Artificial Sequence
  derived and/or modified sequence
MPGPQGGRGAATMSLGKLSPVGWVSSSQGKRRLTADMISHPLGDFRHTMHVGRGGDVFGDTSFLSNHGGS

SEQ ID NO: 242743 - protein, 48 aa, Artificial Sequence
  derived and/or modified sequence
MPGPQGGRGAATMSLGKLSPVGWVSSSQGKRRLTADMISHPLGDFRHT

SEQ ID NO: 242744 - DNA, 1176 bp, Artificial Sequence
  derived and/or modified sequence
atgccaggtcctcaaggcggtcgtggcgccgcaactatgtccctaggcaaactaagccctgtgggctgggtttcaagcagtcagggcaagaggaggctgacagcagacatgatctctcaccctcttggggacttccgccacaccatgcatgtgggtagggggggcgacgtcttcggagacacatcttttctatctaatcatggtggctcctcagggtccacacatagatctcctagatccttcctggcaaaaaagctgcagctagtccgtcgcgttggagcgccacctaggcgcatggctagtcccccggctccgtcccctgctcctcccgccatttcacccataattaagaacgccatatctcttccacaattgaatcaggccgcatacgattcactcgtggttggaaaattaagctttgactccagtcctacctcgtccaccgacggacactcctcatatggccttgattctggcttctgcaccatctccaggttgccacgctctgagaaaccccacgacagggaccgagatgggagcttcccctctgagcccgggctcagaagatctgactcgttgctgagttttcgcttggacctggacctcggaccatctctgttatcagaacttctcggagttatgtcgctgccagaagctccagcagccgaaactcccgctccagccgccaatcctcctgcacctaccgcaaacccaacaggtccggctgcgaacccgcctgctactaccgctaacccaccagcacccgctgctaaccccagcgctcctgccgctaccccaactggacccgcggctaacccgccagctcccgctgccagttctactcctcatggacactgccctaacggggtgaccgccggtctcggccctgtcgctgaggtgaagtcctcacccgttggaggggggccaaggggtcccgctggtccagcactgggccggcactggggagcgggatgggatggaggccaccactatccagaaatggacgcaagacaggagcgtgtggaagtattgccgcaagctcgggctagctgggagtccctcgacgaagagtggagggcgcctcaggccgggtcccggactcctgttccttccacagtgcaggcaaacacgttcgagttcgccgacgctgaggaagatgacgaggtaaaggtctag

SEQ ID NO: 242745 - DNA, 183 bp, Artificial Sequence
  derived and/or modified sequence
atgccagggccacagggaggacgcggagctgctacgatgtctctcggcaaattgtcaccagtgggctgggtgagctcttcccaaggaaagcggcgactcactgcggacatgatatcccaccccctgggggattttagacacaccatgcacgttgggagagggggggatgtgtttggagactag

SEQ ID NO: 242746 - DNA, 213 bp, Artificial Sequence
  derived and/or modified sequence
atgccaggcccgcaagggggcaggggagcagccactatgagcttgggaaaactctcccctgtcggatgggtgagttcctcacagggaaaaaggcgcctgacagctgacatgatctctcatcccctgggagacttccgacataccatgcacgtagggcggggcggcgatgtgttcggcgatacaagtttcttgtcgaaccacgggggctcttag

SEQ ID NO: 242747 - DNA, 147 bp, Artificial Sequence
  derived and/or modified sequence
atgcctggcccgcaagggggccgaggagcagccaccatgagcctcggaaaactatcccctgtgggctgggtgagtagcagccagggaaaaaggcgtctaactgctgacatgattagccatccccttggggacttcaggcacacatag

SEQ ID NO: 242748 - DNA, 1176 bp, Artificial Sequence
  derived and/or modified sequence
atgcctggcccccagggcggccgcggggccgccaccatgagcctgggcaagctgagccctgtgggctgggtgagcagcagccagggcaagaggcggctgacagctgacatgatcagccaccccctgggggacttccgccacaccatgcacgtgggcagaggaggagatgtgtttggagacaccagcttcctgagcaaccacggcggcagcagcggcagcacccacaggagccccaggagcttcctggccaagaagctgcagctggtgcggcgggtgggcgccccacccaggaggatggccagccccccagcccccagccctgcccccccagccatcagccccatcatcaagaatgccatcagcctgccccagctgaaccaggccgcctatgacagcctggtggtgggcaagctgagctttgacagcagccccaccagcagcacagatggccacagcagctatggcctggacagcggcttctgcaccatcagccggctgcccaggtctgagaagccccatgaccgggacagagatggcagcttccccagcgagcccggcctgcggcggagtgacagcctgctgtccttccggctggacctggacctgggccccagcctgctgtctgagctgctgggcgtgatgagcctgcctgaggccccagctgctgagaccccagccccagctgccaaccccccagcccccacagccaaccccactggacctgctgccaaccccccagccaccacagccaaccccccagccccagctgccaaccccagcgccccagctgccacccccactggacctgctgccaaccccccagccccagctgccagcagcacccctcatggccactgccccaacggggtgacagctggcctgggccctgtggccgaggtgaagagcagccctgtgggcggcggcccccggggccctgctggccctgccctgggccgccactggggcgccggctgggatggcggccaccactacccagagatggatgcccggcaggagcgggtggaggtgctgccccaggcccgggcctcctgggagagcctggatgaggagtggagggccccccaggccggcagcaggacccctgtgcccagcacagtgcaggccaacacctttgaatttgctgatgctgaagaagatgatgaggtgaaggtgtag

SEQ ID NO: 242749 - DNA, 183 bp, Artificial Sequence
  derived and/or modified sequence
atgcctggcccccagggcggccgcggggccgccaccatgagcctgggcaagctgagccctgtgggctgggtgagcagcagccagggcaagaggcggctgacagctgacatgatcagccaccccctgggggacttccgccacaccatgcacgtgggcagaggaggagatgtgtttggagactag

SEQ ID NO: 242750 - DNA, 213 bp, Artificial Sequence
  derived and/or modified sequence
atgcctggcccccagggcggccgcggggccgccaccatgagcctgggcaagctgagccctgtgggctgggtgagcagcagccagggcaagaggcggctgacagctgacatgatcagccaccccctgggggacttccgccacaccatgcacgtgggcagaggaggagatgtgtttggagacaccagcttcctgagcaaccacggcggcagctag

SEQ ID NO: 242751 - DNA, 147 bp, Artificial Sequence
  derived and/or modified sequence
atgcctggcccccagggcggccgcggggccgccaccatgagcctgggcaagctgagccctgtgggctgggtgagcagcagccagggcaagaggcggctgacagctgacatgatcagccaccccctgggggacttccgccacacctag

SEQ ID NO: 242752 - DNA, 1176 bp, Artificial Sequence
  derived and/or modified sequence
atgcccggcccccagggcggccggggcgccgccaccatgagcctgggtaaactgtcccctgttggctgggtttcttcatctcaaggcaaaagaaggcttacagccgacatgatttcacatcctctgggggacttcaggcatacgatgcatgtgggtcggggcggcgacgtgtttggtgatacaagctttctgtctaatcatgggggatcctccggatccacccatcgctccccccgttcctttcttgctaagaaactgcagttggtccgacgagttggagcacccccccgaagaatggctagcccacctgccccaagtccagcaccgcctgcaatttctcctattattaagaatgctatttccctgccacagttgaaccaggctgcctacgactccctggtggttggcaagctgtcatttgacagtagccctacgagtagcacagacggacacagcagctatggacttgactcaggattttgcactatctcaaggttgccgagatctgaaaagccccacgatagggatcgggacggttcgttcccatctgagccaggcctgcgtaggagcgattctttactcagttttcggctggatttagacttggggccttctctgctctcggagctgctgggcgtgatgtctctgcctgaagcccccgccgccgaaacaccagcgcctgctgctaatccaccagcccctacagcaaaccctacagggcccgctgcaaatccacctgccaccaccgccaaccctccagcgccggctgctaacccctcggcacccgccgccacgcccacgggaccagccgctaacccccccgctcccgccgcatcctctaccccacacggtcactgtcctaacggagtcacagcaggactgggccccgtagccgaggttaagtcttcaccagtcggaggggggccccggggacccgccgggcccgctctgggtcgtcattggggcgcggggtgggacgggggacaccactatcccgaaatggatgcacggcaggagagggtagaggtgctgccccaggccagggcatcgtgggagtcactcgatgaggagtggagggccccccaggctgggagccgaacccctgtcccctccactgtgcaggccaacacttttgaattcgcggatgccgaagaagacgacgaggtaaaagtgtag

SEQ ID NO: 242753 - DNA, 183 bp, Artificial Sequence
  derived and/or modified sequence
atgcccggcccccagggcggccggggcgccgccaccatgagcctgggcaagctgtcccccgtgggatgggtttcgtcctcacaggggaaacgccggctgaccgctgacatgatcagccatccacttggtgatttcagacatactatgcacgtggggcggggcggtgacgtattcggcgactag

SEQ ID NO: 242754 - DNA, 213 bp, Artificial Sequence
  derived and/or modified sequence
atgcccggcccccagggcggccggggcgccgccaccatgagcctggggaagctgagtccggtgggatgggtgtcatccagtcagggcaaaaggcgcctgactgctgatatgatatctcaccccttaggcgacttcaggcacaccatgcacgtcggaaggggaggcgacgtctttggcgacacctccttcctgtctaatcacggaggatcctag

SEQ ID NO: 242755 - DNA, 147 bp, Artificial Sequence
  derived and/or modified sequence
atgcccggcccccagggcggccggggcgccgccaccatgagcctgggaaagctttcacctgtcggatgggtgagttcgagtcaaggcaagaggaggctgactgccgacatgatctctcacccattaggggacttccgccacacctag

SEQ ID NO: 242756 - DNA, 1176 bp, Artificial Sequence
  derived and/or modified sequence
atgccaggccctcagggtggtcggggagccgctactatgagcctcggaaagttaagtccagtcggctgggtgagcagtagccagggcaagaggagattaacagctgatatgatctcccatcctctcggcgattttcggcataccatgcatgttgggaggggaggcgatgtctttggcgacacttcattcttaagcaatcacgggggtagctccggatccacgcataggagccctagatccttcctggccaagaagctgcagctggtccgaagggtgggagcacctccgcgtagaatggcttctccacccgcacctagtcctgctccacccgctatctctcctattatcaaaaatgctattagcctgccccagttaaaccaggctgcttacgactcactggtggtgggtaagctctccttcgactcatcaccaaccagcagcactgatggccatagcagctacgggttagattcgggattctgcacaatatcgcggttgccacgctcagaaaaaccacatgacagggatcgagatggtagcttcccaagcgagcccggtctgcgacggagtgattctctgttgtcattccggctggaccttgatctgggcccaagcttgctgtctgaactgctgggggtaatgtccctgccagaggcccctgctgctgagactccagcccctgccgcaaatcctcctgccccaactgcaaaccccactggacccgctgccaacccacctgcgacgacagcaaacccccctgcacccgcagctaacccatccgcacctgccgcaacccccactgggccagctgccaatccgcctgcacccgctgcaagttccaccccacatggccattgtccaaatggcgtgacagccggactgggacccgtggctgaggtgaagagctcccctgtgggtggcggaccgagggggccagcgggacctgcattgggcaggcactggggagccggttgggacgggggacatcactaccccgagatggacgctcgacaggagagggtggaagttcttccccaggccagagcttcctgggaatctctggacgaggagtggcgggctccccaggccggatctagaactccggtgccatccacagtccaggccaatacgtttgagtttgccgatgctgaggaggacgatgaagtcaaagtgtag

SEQ ID NO: 242757 - DNA, 183 bp, Artificial Sequence
  derived and/or modified sequence
atgcccggaccacagggtggcaggggcgctgctacgatgagtctgggtaagctgtcccccgtcggctgggtgtctagttcccaaggcaaaaggcgcctaactgcggatatgataagccatcccctaggagactttcgacatactatgcacgtgggtcgaggaggggatgtttttggagattag

SEQ ID NO: 242758 - DNA, 213 bp, Artificial Sequence
  derived and/or modified sequence
atgcccggacctcagggcggacgcggtgcagccacaatgtccctgggaaaactcagtcccgtggggtgggtcagttcctctcaaggaaagcgtagattgacagctgatatgatttcacaccctcttggggactttcggcatactatgcacgtcggacgcggaggagacgtgtttggggacactagtttcctttcaaaccatggcggtagctag

SEQ ID NO: 242759 - DNA, 147 bp, Artificial Sequence
  derived and/or modified sequence
atgcctggtcctcagggaggtagaggagctgctaccatgtccctgggaaagctgagccctgtgggctgggtgtcgtcaagtcagggcaagcgtagactgaccgctgacatgatctcccatcccctgggagacttccggcacacctag

SEQ ID NO: 242760 - DNA, 2181 bp, Artificial Sequence
  derived and/or modified sequence
gatccagcccgcggagcccgcggccagggcggcgcagaccggcccagcgactctcccgggctgccagccgggacgcgcggccgccgccgctgcagacgacgagtccgccctcgtcccgcgcccccggggctcgcggagccaggtctccacctctgggcaggagagttgccgaccacctcgggggtgctttctctgcgcttgaacatctatagctgcttctgaggggctgggagccgggcccctgggagagacgagccatgaaccccccacagcctctgcatttggggacctcaccttaggagagtgccatttacagcttccgccagggcaaaggagctgagcagccatcccaagcccagcccacctccctcccccggcccctggtaggcatggactagcagctgtgagcagccagagctgatgcccggcccccaggggggcagaggcgccgccaccatgagcctgggcaagctctcgcctgtgggctgggtgtccagttcacagggaaagaggcggctgactgcagacatgatcagccacccactcggggacttccgccacaccatgcatgtgggccgtggcggggatgtcttcggggacacgtccttcctcagcaaccacggtggcagctccgggagcacccatcgctcaccccgcagcttcctggccaagaagctgcagctggtgcggagggtgggggcgcccccccggaggatggcatctccccctgcaccctccccggctccaccggccatctcccccatcatcaagaacgccatctccctgccccagctcaaccaggccgcctacgacagcctcgtggttggcaagctcagcttcgacagcagccccaccagctccacggacggccactccagctacggcctggactctgggttctgcaccatctcccgcctgccccgctcggaaaagccgcatgaccgagaccgggatggttccttcccctctgagcccgggcttcgccgctctgactctctcttgtccttccgcctggacctcgaccttgggccctcactcctcagcgagctgctaggggtcatgagcctcccagaagcccctgcagctgagactccagcccccgctgcaaaccccccagcccctactgcaaaccccacgggtcctgctgcaaaccccccagccactactgcaaaccccccagcgcctgctgcaaacccctcagcacctgccgcaacccccacgggtcctgctgcaaatcccccagcccctgccgcaagctccacaccccatggacactgtcccaatggggtaacagctgggttgggcccagtggctgaggtgaagtccagcccagtgggagggggtccccgaggacctgctggccctgccctcggcaggcactggggagcaggctgggatggcggccaccactacccagagatggatgcgcggcaggagcgggtggaggtgctgccccaagcccgggcctcctgggagagcctggacgaagagtggagggcgccccaggcaggcagcaggaccccagtgcccagcacagtgcaagcaaacacctttgaatttgcggatgctgaggaggatgatgaggtcaaggtgtgaggggctggggcacggtcccagggccccacctaggtgcagagccggcccctcacctaacagctggttcctaccagaccggagaggggagaagtcatgttgcccctaaacccctccccacctctgcaggacagacatgggagggaggacagggaaggccaggcttgctctgggacttttatgctcccagaggccctgccaaactgaccacctcccccgactgccactctggacctaatagctgttccttaggccccactccatgccacccccaccagctggaggacccagcctcacagtgtgtcctttgtgccagaccaagcggcccgtggggggtggggggcagggagtgtaccacacagggccattgtctcacctcccaaagggaccgcctgcccccagctcatcccagagcgtccctgctgcaaccctgacagccgtctcccaggccgcttccccaacatccccgccccagcctccctcttaccccagaaaggtcaggtatgacctcccggggaggaatcccacctgcctgtataccccagacttgcctctggggcctgattaaataaggctgttttgataaaa

SEQ ID NO: 242761 - DNA, 588 bp, Artificial Sequence
  derived and/or modified sequence
agtattgagatttctatgcttggaggtggcagcaatggttttaaaaaaggaagaaggctgagccgcagacataggtgttcttaaggatcattattgacttttatcagctgaggtcccaggtctgtgtaggtctccacctctgggcaggagagttgccgaccacctcgggggtgctttctctgcgcttgaacatctatagctgcttctgaggggctgggagccgggcccctgggagagacgagccatgaaccccccacagcctctgcatttggggacctcaccttaggagagtgccatttacagcttccgccagggcaaaggagctgagcagccatcccaagcccagcccacctccctcccccggcccctggtaggcatggactagcagctgtgagcagccagagctgatgcccggcccccaggggggcagaggcgccgccaccatgagcctgggcaagctctcgcctgtgggctgggtgtccagttcacagggaaagaggcggctgactgcagacatgatcagccacccactcggggacttccgccacaccatgcatgtgggccgtggcggggatgtcttcggggaca

SEQ ID NO: 242762 - DNA, 720 bp, Artificial Sequence
  derived and/or modified sequence
gcagaccggcccagcgactctcccgggctgccagccgggacgcgcggccgccgccgctgcagacgacgagtccgccctcgtcccgcgcccccggggctcgcggagccagacggaatgttgctcttgttgccgaggctggagtgccgtgatgtgatcttggctcactgcaacctctgcctccaaggttcaagtgattctcctgccacagcttcctgggtagctgggattacaggtctccacctctgggcaggagagttgccgaccacctcgggggtgctttctctgcgcttgaacatctatagctgcttctgaggggctgggagccgggcccctgggagagacgagccatgaaccccccacagcctctgcatttggggacctcaccttaggagagtgccatttacagcttccgccagggcaaaggagctgagcagccatcccaagcccagcccacctccctcccccggcccctggtaggcatggactagcagctgtgagcagccagagctgatgcccggcccccaggggggcagaggcgccgccaccatgagcctgggcaagctctcgcctgtgggctgggtgtccagttcacagggaaagaggcggctgactgcagacatgatcagccacccactcggggacttccgccacaccatgcatgtgggccgtggcggggatgtcttcggggacacgtccttcctcagcaaccacggtggcagc

SEQ ID NO: 242763 - DNA, 564 bp, Artificial Sequence
  derived and/or modified sequence
ttgaatatgctcacgcatggaggaggcagctggaaaaagccacttttgaccacaggatccttattccaggaagctccttgaaggtggatggttcagaggaacctctgctctggctgtttacccagcttcacaaagctttggtctccacctctgggcaggagagttgccgaccacctcgggggtgctttctctgcgcttgaacatctatagctgcttctgaggggctgggagccgggcccctgggagagacgagccatgaaccccccacagcctctgcatttggggacctcaccttaggagagtgccatttacagcttccgccagggcaaaggagctgagcagccatcccaagcccagcccacctccctcccccggcccctggtaggcatggactagcagctgtgagcagccagagctgatgcccggcccccaggggggcagaggcgccgccaccatgagcctgggcaagctctcgcctgtgggctgggtgtccagttcacagggaaagaggcggctgactgcagacatgatcagccacccactcggggacttccgccacaccat

SEQ ID NO: 242764 - DNA, 1176 bp, Artificial Sequence
  derived and/or modified sequence
atgcccggcccccagggcggcagaggcgccgccaccatgagcctgggcaagctgagccccgtgggctgggtgagcagcagccagggcaagagaagactgaccgccgacatgatcagccaccccctgggcgacttcagacacaccatgcacgtgggcagaggcggcgacgtgttcggcgacaccagcttcctgagcaaccacggcggcagcagcggcagcacccacagaagccccagaagcttcctggccaagaagctgcagctggtgagaagagtgggcgccccccccagaagaatggccagcccccccgcccccagccccgccccccccgccatcagccccatcatcaagaacgccatcagcctgccccagctgaaccaggccgcctacgacagcctggtggtgggcaagctgagcttcgacagcagccccaccagcagcaccgacggccacagcagctacggcctggacagcggcttctgcaccatcagcagactgcccagaagcgagaagccccacgacagagacagagacggcagcttccccagcgagcccggcctgagaagaagcgacagcctgctgagcttcagactggacctggacctgggccccagcctgctgagcgagctgctgggcgtgatgagcctgcccgaggcccccgccgccgagacccccgcccccgccgccaacccccccgcccccaccgccaaccccaccggccccgccgccaacccccccgccaccaccgccaacccccccgcccccgccgccaaccccagcgcccccgccgccacccccaccggccccgccgccaacccccccgcccccgccgccagcagcaccccccacggccactgccccaacggcgtgaccgccggcctgggccccgtggccgaggtgaagagcagccccgtgggcggcggccccagaggccccgccggccccgccctgggcagacactggggcgccggctgggacggcggccaccactaccccgagatggacgccagacaggagagagtggaggtgctgccccaggccagagccagctgggagagcctggacgaggagtggagagccccccaggccggcagcagaacccccgtgcccagcaccgtgcaggccaacaccttcgagttcgccgacgccgaggaggacgacgaggtgaaggtgtag

SEQ ID NO: 242765 - DNA, 183 bp, Artificial Sequence
  derived and/or modified sequence
atgcccggcccccagggcggcagaggcgccgccaccatgagcctgggcaagctgagccccgtgggctgggtgagcagcagccagggcaagagaagactgaccgccgacatgatcagccaccccctgggcgacttcagacacaccatgcacgtgggcagaggcggcgacgtgttcggcgactag

SEQ ID NO: 242766 - DNA, 213 bp, Artificial Sequence
  derived and/or modified sequence
atgcccggcccccagggcggcagaggcgccgccaccatgagcctgggcaagctgagccccgtgggctgggtgagcagcagccagggcaagagaagactgaccgccgacatgatcagccaccccctgggcgacttcagacacaccatgcacgtgggcagaggcggcgacgtgttcggcgacaccagcttcctgagcaaccacggcggcagctag

SEQ ID NO: 242767 - DNA, 147 bp, Artificial Sequence
  derived and/or modified sequence
atgcccggcccccagggcggcagaggcgccgccaccatgagcctgggcaagctgagccccgtgggctgggtgagcagcagccagggcaagagaagactgaccgccgacatgatcagccaccccctgggcgacttcagacacacctag

SEQ ID NO: 242768 - protein, 51 aa, Artificial Sequence
  derived and/or modified sequence
GLDFSQPFPSGEFAVCESCKLGRGKCRKECLENEKPDGNCRLNFLCCRQRI

SEQ ID NO: 242769 - protein, 51 aa, Artificial Sequence
  derived and/or modified sequence
GLDFSQPFPSDEFAVCESCKLGRGKCRKECLENEKPDGNCRLNFLCCRERI

SEQ ID NO: 242770 - protein, 51 aa, Artificial Sequence
  derived and/or modified sequence
GLDFSQPFPSGEFAVFESCKFSRGKCRKECLENEKPDGNCRLNFLCCRQSI

SEQ ID NO: 242771 - protein, 51 aa, Artificial Sequence
  derived and/or modified sequence
GLEFSEPFPSGRFAVCESCKLGRGKCRKECLENEKPDGSCRLNFLCCRPRM

SEQ ID NO: 242772 - protein, 51 aa, Artificial Sequence
  derived and/or modified sequence
GLEYSQSFPGGEIAVCETCRLGRGKCRRTCIESEKIAGWCKLNFFCCRERI

SEQ ID NO: 242773 - protein, 51 aa, Artificial Sequence
  derived and/or modified sequence
GLEYSQSFPGGEFAVCETCRLGRGKCRRTCLDSEKIAGKCKLNFFCCRERI

SEQ ID NO: 242774 - protein, 40 aa, Artificial Sequence
  derived and/or modified sequence
EIAVCETCRLGRGKCRRACIESEKIVGWCKLNFFCCRERI

SEQ ID NO: 242775 - protein, 78 aa, Artificial Sequence
  derived and/or modified sequence
MALIRKTFYFLFAMFFILVQLPSGCQAGLDFSQPFPSGEFAVCESCKLGRGKCRKECLENEKPDGNCRLNFLCCRQRI

SEQ ID NO: 242776 - DNA, 237 bp, Artificial Sequence
  derived and/or modified sequence
atggccctgattagaaagacgttttactttctgtttgccatgttctttatcctcgtgcagttacccagtggttgtcaggctggtttggatttttcacaaccctttccgtctggagaattcgcagtatgtgaatcatgtaagcttggcaggggcaagtgtagaaaagaatgccttgaaaacgagaagcctgatggaaactgccggctcaatttcctgtgttgcagacagcggatctag

SEQ ID NO: 242777 - DNA, 237 bp, Artificial Sequence
  derived and/or modified sequence
atggcgctcattaggaaaacgttctacttcctgtttgccatgttttttatcttggtccagctgccatccgggtgccaggcaggtctggatttttcgcagccctttccgtctggcgaattcgctgtctgtgagagttgtaagcttggccgtggtaagtgtcgaaaggaatgcctcgagaatgagaaaccagatgggaactgcaggcttaacttcctctgctgtaggcaaaggatctag

SEQ ID NO: 242778 - DNA, 237 bp, Artificial Sequence
  derived and/or modified sequence
atggccctgattaggaaaaccttttattttctttttgccatgtttttcatcctcgttcagctccccagcgggtgccaagcaggactggacttctcacaaccgtttccttcaggagaattcgccgtctgcgagtcttgcaaactcggtcgcgggaaatgcaggaaggagtgtttagaaaatgaaaaaccagatggaaactgcagactgaacttcctgtgctgtagacaacgaatttag

SEQ ID NO: 242779 - DNA, 237 bp, Artificial Sequence
  derived and/or modified sequence
atggctctgattcgcaaaaccttctacttcctgtttgccatgttttttattctggtacaattaccgagcggatgtcaagctggtctcgatttttcacagccgttcccatcaggagagttcgccgtgtgtgagagttgcaagctaggaaggggcaaatgtagaaaagaatgcttagagaacgaaaagcccgacggaaattgcaggctgaatttcctgtgttgtcgccagcgcatttag

SEQ ID NO: 242780 - DNA, 237 bp, Artificial Sequence
  derived and/or modified sequence
atggccctgatcagaaagaccttctacttcctgttcgccatgttcttcatcctggtgcagctgcccagcggctgccaggccggcctggacttcagccagcccttccccagcggcgagttcgccgtgtgcgagagctgcaagctgggcagaggcaagtgcagaaaggagtgcctggagaacgagaagcccgacggcaactgcagactgaacttcctgtgctgcagacagagaatctag

SEQ ID NO: 242781 - DNA, 330 bp, Artificial Sequence
  derived and/or modified sequence
ggtcttctcaaggaaatcccaatctctattccgaagagtcttccctaaaagatggccctgatcaggaagacattttattttctatttgctatgttcttcattttggttcaactgccatcagggtgccaggcaggacttgatttttcccaaccatttccatcaggtgagtttgctgtctgtgagtcgtgcaagcttggtcggggaaaatgcaggaaggagtgcttggagaatgagaagcccgatggaaattgcaggctgaactttctctgctgcagacagaggatctgacaaaccagaccagcacacttctggccttagaagcagacctgg

SEQ ID NO: 242782 - DNA, 331 bp, Artificial Sequence
  derived and/or modified sequence
gggtcttctcaaggaaatcccaatctctattccgaagagtcttccctaaaagatggccctgatcaggaagacattttattttctatttgctatgttcttcattttggttcaactgccatcagggtgccaggcaggacttgatttttcccaaccatttccatcaggtgagtttgctgtctgtgagtcgtgcaagcttggtcggggaaaatgcaggaaggagtgcttggagaatgagaagcccgatggaaattgcaggctgaactttctctgctgcagacagaggatctgacaaaccagaccagcacacttctggccttagaagcagacctgg

SEQ ID NO: 242783 - DNA, 237 bp, Artificial Sequence
  derived and/or modified sequence
atggccctgatcagaaaaacattctatttcctgtttgcaatgtttttcatcttggtgcagttgccatccggatgccaggctggcctggatttcagccaaccgttcccatctggcgagttcgcagtgtgtgaatcatgtaagttgggacgcggaaagtgcagaaaggagtgtttagagaacgaaaaacctgatggtaactgtagactgaactttctgtgttgtagacaacgtatctag

SEQ ID NO: 242784 - DNA, 237 bp, Artificial Sequence
  derived and/or modified sequence
atggccctgattcggaaaaccttctactttttgttcgctatgttctttatactcgtccagctgccctcgggctgtcaggccgggctcgacttctcccaaccatttccatccggtgaatttgctgtgtgcgagtcctgtaaacttgggaggggcaaatgtagaaaagagtgtctcgaaaacgagaagcctgacgggaactgccggctgaatttcctgtgctgccgccagcgcatctag

SEQ ID NO: 242785 - DNA, 237 bp, Artificial Sequence
  derived and/or modified sequence
atggccctgatcaggaagaccttctacttcctgtttgccatgttcttcatcctggtgcagctgcccagcggctgccaggccggcctggacttcagccagcccttccccagcggggagtttgctgtgtgtgagagctgcaagctgggccggggcaagtgcaggaaggagtgcctggagaatgagaagccagatggcaactgccgcctgaacttcctgtgctgccggcagaggatctag

SEQ ID NO: 242786 - DNA, 237 bp, Artificial Sequence
  derived and/or modified sequence
atggccctgatccggaagaccttctacttcctgttcgccatgttcttcatcctggtgcagcttccctccggatgtcaagctggcttggacttttcacagccttttccctctggagaattcgcggtgtgcgagtcttgtaagctgggccggggtaagtgccgcaaggagtgcttggagaatgagaagccagacgggaactgtagactcaacttcctctgctgccgacagagaatatag

SEQ ID NO: 242787 - DNA, 237 bp, Artificial Sequence
  derived and/or modified sequence
atggccctgatccggaagaccttctacttcctgttcgccatgttcttcatcctggtgcagcttccgtccgggtgccaggctgggcttgacttttcacaaccctttccatctggtgaattcgcggtctgcgagtcgtgtaagttgggtcgaggcaagtgtagaaaggaatgtcttgaaaatgaaaagccagacggcaactgccgcttaaatttcctgtgctgccgtcagagaatttag

SEQ ID NO: 242788 - RNA, 237 nt, Artificial Sequence
  derived and/or modified sequence
auggcccugauuaggaaaaccuuuuauuuucuuuuugccauguuuuucauccucguucagcuccccagcgggugccaagcaggacuggacuucucacaaccguuuccuucaggagaauucgccgucugcgagucuugcaaacucggucgcgggaaaugcaggaaggaguguuuagaaaaugaaaaaccagauggaaacugcagacugaacuuccugugcuguagacaacgaauuuag

SEQ ID NO: 242789 - RNA, 237 nt, Artificial Sequence
  derived and/or modified sequence
auggcucugauucgcaaaaccuucuacuuccuguuugccauguuuuuuauucugguacaauuaccgagcggaugucaagcuggucucgauuuuucacagccguucccaucaggagaguucgccgugugugagaguugcaagcuaggaaggggcaaauguagaaaagaaugcuuagagaacgaaaagcccgacggaaauugcaggcugaauuuccuguguugucgccagcgcauuuag

SEQ ID NO: 242790 - protein, 45 aa, Artificial Sequence
  derived and/or modified sequence
FFDEKCNKLKGTCKNNCGKNEELIALCQKSLKCCRTIQPCGSIID

SEQ ID NO: 242791 - protein, 61 aa, Artificial Sequence
  derived and/or modified sequence
FFFFDEKCSRINGRCTASCLKNEELVALCWKNLKCCVTVQSCGRSKGNQSDEGSGHMGTRG

SEQ ID NO: 242792 - protein, 45 aa, Artificial Sequence
  derived and/or modified sequence
FFDDKCDKLRGTCKNSCEKNEELTSFCQKSLKCCRTIQTCGNTTD

SEQ ID NO: 242793 - protein, 45 aa, Artificial Sequence
  derived and/or modified sequence
FFDEKCGKLKGTCKNNCGKNEELIALCQKSLKCCRTIQPCGSIID

SEQ ID NO: 242794 - protein, 59 aa, Artificial Sequence
  derived and/or modified sequence
FFDEKCSRVNGRCTASCLKNEELVALCQKNLKCCVTVQPCGKSKSNQSDEGSGHMGTWG

SEQ ID NO: 242795 - protein, 59 aa, Artificial Sequence
  derived and/or modified sequence
FFDEKCSRINGRCTESCLKNEELIALCQKNLKCCVTVQPCGRDKGDELDEDSGYNRTRG

SEQ ID NO: 242796 - protein, 65 aa, Artificial Sequence
  derived and/or modified sequence
MRTFLFLFAVLFFLTPAKNAFFDEKCNKLKGTCKNNCGKNEELIALCQKSLKCCRTIQPCGSIID

SEQ ID NO: 242797 - DNA, 198 bp, Artificial Sequence
  derived and/or modified sequence
atgagaaccttcctcttcctctttgctgtgctcttcttccttacccccgcaaaaaacgctttcttcgatgagaaatgcaataagctcaagggaacctgcaaaaacaattgcggtaaaaatgaggaactcatcgccctgtgtcagaaaagtctgaagtgttgtcggaccatccaaccctgtggctccatcatcgattag

SEQ ID NO: 242798 - DNA, 198 bp, Artificial Sequence
  derived and/or modified sequence
atgagaacgttcttatttctgtttgccgtgttgttttttctgactcccgcaaaaaacgccttttttgacgaaaagtgtaacaaattgaaagggacctgcaagaataactgcggtaagaacgaggaactgattgcgctctgccagaagagcctcaaatgctgccgtactatccaaccctgcggatccataatagactag

SEQ ID NO: 242799 - DNA, 198 bp, Artificial Sequence
  derived and/or modified sequence
atgcgaactttcctgtttttatttgccgtgttattcttcctaacccctgctaaaaatgcctttttcgacgaaaaatgtaacaaactgaagggcacatgcaaaaacaattgtggcaaaaacgaagaactgatcgctctttgccagaaatccctgaaatgctgccgtacgatacaaccttgtgggtcaataatcgattag

SEQ ID NO: 242800 - DNA, 198 bp, Artificial Sequence
  derived and/or modified sequence
atgagaacctttctcttcctattcgccgtcctcttctttctcacccccgcaaagaacgcttttttcgacgaaaagtgcaacaaactcaagggtacctgcaagaataactgtggaaaaaatgaagagctcattgctctgtgtcaaaaaagtttgaagtgttgtcgcacaattcaaccctgtgggtcaatcattgattag

SEQ ID NO: 242801 - DNA, 198 bp, Artificial Sequence
  derived and/or modified sequence
atgagaaccttcctgttcctgttcgccgtgctgttcttcctgacccccgccaagaacgccttcttcgacgagaagtgcaacaagctgaagggcacctgcaagaacaactgcggcaagaacgaggagctgatcgccctgtgccagaagagcctgaagtgctgcagaaccatccagccctgcggcagcatcatcgactag

SEQ ID NO: 242802 - DNA, 303 bp, Artificial Sequence
  derived and/or modified sequence
cagtcatgaggactttcctctttctctttgccgtgctcttctttctgaccccagccaagaatgcattttttgatgagaaatgcaacaaacttaaagggacatgcaagaacaattgcgggaaaaatgaagaacttattgctctctgccagaagtctctgaaatgctgtcggaccatccagccatgtgggagcattatagattaatgcagaagatttaggtttccagagaagcatacataacctagcttctttttactcttgcctctgctgtaggcagacactttaataaaaataaatgactgtc

SEQ ID NO: 242803 - DNA, 316 bp, Artificial Sequence
  derived and/or modified sequence
ctcaagacccacccagtcatgaggactttcctctttctctttgccgtgctcttctttctgaccccagccaagaatgcattttttgatgagaaatgcaacaaacttaaagggacatgcaagaacaattgcgggaaaaatgaagaacttattgctctctgccagaagtctctgaaatgctgtcggaccatccagccatgtgggagcattatagattaatgcagaagatttaggtttccagagaagcatacataacctagcttctttttactcttgcctctgctgtaggcagacactttaataaaaataaatgactgtc

SEQ ID NO: 242804 - DNA, 198 bp, Artificial Sequence
  derived and/or modified sequence
atgagaactttcctgttcttgtttgctgtactgttctttctcacaccagcaaaaaatgccttctttgacgagaaatgtaataagctcaagggcacctgcaagaacaattgcgggaagaacgaagaactgatcgcactgtgccagaagtccctgaaatgctgccggacaatccagccgtgtggatcaatcatagactag

SEQ ID NO: 242805 - DNA, 198 bp, Artificial Sequence
  derived and/or modified sequence
atgcggacctttctctttttattcgcggtcctatttttcctcactccagctaagaatgccttctttgatgagaaatgcaataaactaaagggcacatgtaagaacaattgtggcaagaacgaagagctaatcgcattatgtcaaaaatcactgaagtgctgccgtactatccagccttgcggcagcatcatagactag

SEQ ID NO: 242806 - DNA, 198 bp, Artificial Sequence
  derived and/or modified sequence
atgaggaccttcctgttcctgtttgctgtgctcttcttcctgaccccagccaagaatgccttctttgatgagaagtgcaacaagctgaagggcacctgcaagaacaactgtgggaagaatgaggagctgattgccctgtgccagaagagcctgaagtgctgcaggaccatccagccctgtggcagcatcatcgactag

SEQ ID NO: 242807 - DNA, 198 bp, Artificial Sequence
  derived and/or modified sequence
atgcggaccttcctgttcctgttcgccgtgctgttcttcctgacccccgccaagaatgccttctttgatgagaagtgtaacaaactgaaaggtacctgtaagaacaattgtggcaagaacgaagaactgatagcactttgccagaaatctctgaaatgctgcagaacgattcagccttgcggcagcattatcgactag

SEQ ID NO: 242808 - DNA, 198 bp, Artificial Sequence
  derived and/or modified sequence
atgcggaccttcctgttcctgttcgccgtgctgttcttcctgaccccagctaagaacgctttcttcgacgagaaatgtaacaagctgaagggaacttgcaaaaacaactgcggcaagaatgaagagcttatcgcgttgtgccaaaaatctctgaaatgttgccgaacaatccaaccttgtggatctatcattgactag

SEQ ID NO: 242809 - RNA, 198 nt, Artificial Sequence
  derived and/or modified sequence
augcgaacuuuccuguuuuuauuugccguguuauucuuccuaaccccugcuaaaaaugccuuuuucgacgaaaaauguaacaaacugaagggcacaugcaaaaacaauuguggcaaaaacgaagaacugaucgcucuuugccagaaaucccugaaaugcugccguacgauacaaccuugugggucaauaaucgauuag

SEQ ID NO: 242810 - RNA, 198 nt, Artificial Sequence
  derived and/or modified sequence
augagaaccuuucucuuccuauucgccguccucuucuuucucacccccgcaaagaacgcuuuuuucgacgaaaagugcaacaaacucaaggguaccugcaagaauaacuguggaaaaaaugaagagcucauugcucugugucaaaaaaguuugaaguguugucgcacaauucaacccugugggucaaucauugauuag

SEQ ID NO: 242811 - protein, 1910 aa, Artificial Sequence
  derived and/or modified sequence
MACCHKVMLLLDTAGGAARHSRVRRAALRLLTYLSCRFGLARVHWAFKFFDSQGARSRPSRVSDFRELGSRSWEDFEEELEARLEDRAHLPGPAPRATHTHGALMETLLDYQWDRPEITSPTKPILRSSGRRLLDVESEAKEAEAALGGLVNAVFLLAPCPHSQRELLQFVSGCEAQAQRLPPTPKQVMEKLLPKRVREVMVARKITFYWVDTTEWSKLWESPDHLGYWTVCELLHHGGGTVLPSESFSWDFAQAGEMLLRSGIKLSSEPHLSPWISMLPTDATLNRLLYNSPEYEASFPRMEGMLFLPVEAGKEIQETWTVTLEPLAMHQRHFQKPVRIFLKGSVAQWSLPTSSTLGTDSWMLGSPEESTATQRLLFQQLVSRLTAEELHLVADVDPGEGRPPITGVISPLSASAMILTVCRTKEAEFQRHVLQTAVADSPRDTASLFSDVVDSILNQTHDSLADTASAASPVPEWAQQELGHTTPWSPAVVEKWFPFCNISGASSDLMESFGLLQAASANKEESSKTEGELIHCLAELYQRKSREESTIAHQEDSKKKRGVPRTPVRQKMNTMCRSLKMLNVARLNVKAQKLHPDGSPDVAGEKGIQKIPSGRTVDKLEDRGRTLRSSKPKDFKTEEELLSYIRENYQKTVATGEIMLYACARNMISTVKMFLKSKGTKELEVNCLNQVKSSLLKTSKSLRQNLGKKLDKEDKVRECQLQVFLRLEMCLQCPSINESTDDMEQVVEEVTDLLRMVCLTEDSAYLAEFLEEILRLYIDSIPKTLGNLYNSLGFVIPQKLAGVLPTDFFSDDSMTQENKSPLLSVPFLSSARRSVSGSPESDELQELRTRSAKKRRKNALIRHKSIAEVSQNLRQIEIPKVSKRATKKENSHPAPQQPSQPVKDTVQEVTKVRRNLFNQELLSPSKRSLKRGLPRSHSVSAVDGLEDKLDNFKKNKGYHKLLTKSVAETPVHKQISKRLLHRQIKGRSSDPGPDIGVVEESPEKGDEISLRRSPRIKQLSFSRTHSASFYSVSQPKSRSVQRVHSFQQDKSDQRENSPVQSIRSPKSLLFGAMSEMISPSEKGSARMKKRSRNTLDSEVPAAYQTPKKSHQKSLSFSKTTPRRISHTPQTPLYTPERLQKSPAKMTPTKQAAFKESLKDSSSPGHDSPLDSKITPQKRHTQAGEGTSLETKTPRTPKRQGTQPPGFLPNCTWPHSVNSSPESPSCPAPPTSSTAQPRRECLTPIRDPLRTPPRAAAFMGTPQNQTHQQPHVLRAARAEEPAQKLKDKAIKTPKRPGNSTVTSSPPVTPKKLFTSPLCDVSKKSPFRKSKIECPSPGELDQKEPQMSPSVAASLSCPVPSTPPELSQRATLDTVPPPPPSKVGKRCRKTSDPRRSIVECQPDASATPGVGTADSPAAPTDSRDDQKGLSLSPQSPPERRGYPGPGLRSDWHASSPLLITSDTEHVTLLSEAEHHGIGDLKSNVLSVEEGEGLRTADAEKSSLSHPGIPPSPPSCGPGSPLMPSRDVHCTTDGRQCQASAQLDNLPASAWHSTDSASPQTYEVELEMQASGLPKLRIKKIDPSSSLEAEPLSKEESSLGEESFLPALSMPRASRSLSKPEPTYVSPPCPRLSHSTPGKSRGQTYICQACTPTHGPSSTPSPFQTDGVPWTPSPKHSGKTTPDIIKDWPRRKRAVGCGAGSSSGRGEVGADLPGSLSLLESEGKDHGLELSIHRTPILEDFELEGVCQLPDQSPPRNSMPKAEEASSWGQFGLSSRKRVLLAKEEADRGAKRICDLREDSEVSKSKEGSPSWSAWQLPSTGDEEVFVSGSTPPPSCAVRSCLSASALQALTQSPLLFQGKTPSSQSKDPRDEDVDVLPSTVEDSPFSRAFSRRRPISRTYTRKKLMGTWLEDL

SEQ ID NO: 242812 - DNA, 5733 bp, Artificial Sequence
  derived and/or modified sequence
atggcatgttgccataaagtcatgctactgttggatacagctgggggggcagccaggcattcccgggtccgtagagcagccctgaggctgctaacatatctgtcctgtaggtttggcctggccagagtccactgggcctttaaatttttcgactcacagggcgctcgttcccggcctagcagagtcagcgatttcagagaactgggaagcaggagttgggaggactttgaagaagagctggaggcccgcctcgaagatcgcgcccatctgcccggtccagcaccacgagccactcatacacatggggcgcttatggaaactttactggactatcagtgggacagaccagagattacctctcccactaaaccgattctgcggtccagtggacggcgcttacttgatgtggaaagcgaagcaaaggaagcggaggctgcactcggcggactcgttaacgctgtgttcctactcgctccatgtccacattcacagagagaactgctgcagtttgtttcaggctgcgaggcgcaggcgcagaggcttccacctacaccaaagcaggttatggagaagttactgcctaagcgcgtccgcgaggtcatggtcgcacggaagataaccttctactgggtggacaccacagagtggagcaaactctgggaaagcccagaccatctcggatactggactgtgtgtgaactactacatcacggggggggcacagttttgccttctgaatcttttagctgggattttgcccaggcaggtgaaatgctgcttaggtctggcatcaagctctctagtgaacctcacttaagcccatggattagtatgttacccactgatgctactctcaatcgactgctctataattcacctgagtacgaggcctcctttccacgcatggaggggatgttgtttctgccagtggaagctggaaaggaaattcaggaaacgtggacggtaaccctggagcccctggcaatgcaccagaggcattttcagaagccggtgagaatctttcttaagggaagtgtggcacagtggtccctccctacctcttctaccctgggaaccgacagctggatgctggggtctccagaggagagcaccgccactcagcggctcctctttcagcagctcgtcagcaggctgacagccgaagagctccatctcgtggccgacgtggatcccggcgagggccggccaccaatcaccggagttatctcacccctgagcgcatcagcgatgattctcactgtgtgtaggacaaaagaagcagaattccaacgccatgttctgcagacagcggtggctgatagcccccgcgatacggcatcattgttctcagatgtggtggacagcattctgaatcaaacccacgactccctggcggataccgcatcagcagcaagccccgtccctgagtgggcccaacaagaacttggccatactaccccatggagtccagccgtggtcgaaaagtggtttccattttgcaatatatccggggcaagctcagacctcatggagtccttcggcctgctgcaggcagcaagcgccaacaaggaagagagcagcaagaccgaaggcgaattaattcactgtttggccgaactctatcagcggaaatccagagaggaatccacaattgcccatcaagaggattctaagaagaaaaggggtgtccccaggacgccggtgaggcagaagatgaacactatgtgtcgaagcctcaaaatgctaaatgtagccaggctgaatgtcaaggcacaaaagctgcatcctgacggttcacccgatgtcgcaggcgagaagggtatccagaagataccttcgggccggactgttgacaaactggaggatcgcggccgaaccctgaggagctctaagccgaaggactttaaaacagaggaggaactgctttcttacatcagagaaaactatcagaagacagtggctaccggagagatcatgctctatgcgtgcgcacgcaatatgatatcgactgtcaaaatgtttctcaaaagtaaaggtactaaagagttagaagttaattgtctcaatcaggtgaagagctcactcctcaagacatccaagtccttgcgccagaacctagggaaaaagttagacaaggaggacaaggtacgagaatgccagctgcaggtgtttctcaggctagagatgtgtttacagtgtccctctatcaacgagtccacggacgatatggagcaggtggtggaagaggtgaccgacctcctgcggatggtgtgtctcactgaagactcagcctacctcgccgaattcttggaggagatccttcgcctttacatcgatagtattcccaagaccctgggaaatttgtacaacagcttggggtttgtgattcctcagaaactggcaggagtactacctaccgattttttttcagacgattccatgactcaggagaacaaatctccactcctctccgtgccctttctgtcatctgcacgccggtctgtctctggatcgcctgaatctgacgagctgcaagaactgaggactagatctgctaagaaacggcggaaaaacgccctgatccgccacaaaagtatagctgaagtgtcccagaatctccgccagatagagatcccgaaggtatcaaaacgggctaccaaaaaggagaacagccaccccgctccgcagcagccaagccaaccggtcaaagacacagttcaggaggtcaccaaggttcgccggaacctgtttaaccaggagctgctcagtcccagcaagagatcactgaaacgtggtctgccccgctctcactctgtgtctgctgtggacggattagaggacaagctagacaattttaagaagaataaaggatatcataaactgctaaccaagagcgtggcagagacccccgtgcataagcaaatctccaagcgcctcttacaccggcaaatcaagggaagaagcagcgaccctggccccgatataggagttgtagaagaaagcccagaaaagggggatgaaatttcactgaggaggtccccacggattaaacagttatccttttctcggactcacagtgcctctttctatagcgtctctcagcccaaaagcagaagcgttcagagagttcactcttttcagcaggataagtcagaccagcgcgagaatagtcccgtgcagtctattaggtccccaaaatccctgctcttcggcgcgatgtccgagatgatctcgccctccgaaaaggggagtgcacggatgaagaagcgtagccgaaacactctcgatagtgaggttccggccgcctatcagaccccaaagaagtcccaccagaagagcctaagcttcagcaaaaccacgcctcggcgcatttcgcatactcctcaaactcccctctatactcccgagaggctgcagaagtccccggccaaaatgacgcctaccaaacaggctgccttcaaggagtcactgaaagatagctcttcccccggccacgatagtcccctggactccaagataaccccgcaaaagaggcacactcaggctggggagggcacctctctcgaaacaaaaactcctaggacccccaaaagacagggaacccagccccctggattcttgcccaactgcacttggccacacagtgtgaactcgagtcccgaatctccatcgtgtcccgcaccccccacatcttccacagcccaacccagacgagagtgcctgacaccaatcagggaccccctgagaacacccccgcgcgccgcggcgttcatgggtaccccgcagaaccaaacccatcagcagccccacgtactgcgggctgctcgcgcagaagagcccgcgcagaaactgaaagacaaggccattaaaacccccaaacgccctggcaattctacggtgacgtcgtcccctccagtcactcccaaaaagctgttcacaagtccactgtgcgatgtgtctaaaaagtccccattcagaaaaagtaagatcgagtgcccaagtcctggggagctggaccagaaagagcctcagatgtcgccatccgtcgcagctagcttatcctgtcctgtcccctccaccccccccgagctctcccagcgcgctacccttgacactgttccacccccgcctccttccaaggtagggaagcggtgcagaaagacatctgaccccagacggtccattgtcgagtgtcagcccgacgcatccgccactcccggcgttggaacagcagattcccccgctgcccccacagacagcagagacgaccagaaaggactgagcctgtctcctcaatccccaccagagaggcggggctaccctggacctggtcttcgctctgattggcacgccagcagcccactgctaataactagtgataccgagcacgtaactctgctgtctgaagctgaacatcacggaattggtgatctgaagagcaacgtgctgtcggtggaggaaggggaaggcctgagaacagccgacgctgaaaaatcaagcctgtcacaccctggcatccccccctcaccaccctcctgcggccccggatccccactgatgcccagcagggatgtccactgcacaacagacggtcgtcaatgccaggcgtctgcacagcttgataacctgccggcttccgcctggcactctactgactctgcttcacctcagacttatgaggttgaactggagatgcaggccagcggcctgcctaaactgcggattaagaagattgacccttcctccagcctagaagctgagcccttgtccaaagaggaatcctccctgggggaggagtcttttctgcccgcactttccatgccacgggcctcaagatccctgagcaagcccgaacccacctacgttagtccaccatgtccccgacttagccactctacaccaggcaagtcccggggccagacctatatctgtcaggcctgcaccccgactcacggcccttcttccacgcccagtccgttccaaaccgatggggtcccttggaccccttctcctaagcattctggcaagaccactcccgatatcatcaaggattggccaagaaggaagcgggcggtgggatgcggcgcaggttcctcctccgggcggggcgaagtgggcgcggaccttccaggctctctgtccctgctcgagtccgaaggcaaagaccacgggctagagttatcgattcatagaacacccatcttggaagattttgaactagagggggtttgccagctccccgatcagagtcctccccgcaattctatgcctaaggctgaggaagcgtctagttggggccagttcggcctgagctctagaaagagggtgctgctggcaaaagaagaagctgatcgtggagctaaaagaatttgcgacctgagggaggacagcgaagtttccaaatcaaaagagggctctccctcttggtccgcatggcagctgccctctacaggcgacgaagaggttttcgtgagtgggtccacccccccaccatcttgtgctgtcaggagttgcctgtccgcatctgccctgcaggctctcacccagagtcctctactttttcaaggtaagacgcccagcagtcagtccaaagacccaagggatgaggacgtggacgtgctgccctctaccgtggaagacagtcccttcagccgagcattctctcggcggcggccaattagccgcacctatactcgtaagaagcttatgggcacatggttagaggatctgtag

SEQ ID NO: 242813 - DNA, 5733 bp, Artificial Sequence
  derived and/or modified sequence
atggcctgctgccacaaggtgatgctgctgctggacacagctgggggcgccgcccggcacagccgggtgcggcgggccgccctgcggctgctgacctacctgagctgccgcttcggcctggcccgggtgcactgggccttcaagttctttgacagccagggcgcccggagccggcccagccgggtgtctgacttccgggagctgggcagccgctcctgggaggactttgaggaggagctggaggcccggctggaggaccgggcccacctgcccggccctgccccccgggccacccacacccatggagccctgatggagaccctgctggactaccagtgggacaggcctgagatcaccagccccaccaagcccatcctgcggagcagtggaagaaggctgctggatgtggagagcgaggccaaggaggccgaggccgccctgggcggcctggtgaatgctgtgttcctgctggccccctgcccccacagccagcgggagctgctgcagtttgtgtctggctgtgaggcccaggcccagaggctgccccccacccccaagcaggtgatggagaagctgctgcccaagagggtgcgggaggtgatggtggccaggaagatcaccttctactgggtggacaccacagagtggagcaagctgtgggagagcccagaccacctgggctactggacagtgtgtgagctgctgcaccacggcggcggcaccgtgctgcccagcgagagcttctcctgggactttgcccaggccggggagatgctgctgcggagcggcatcaagctgagcagcgagccccacctgagcccctggatctccatgctgcccacagatgccaccctgaaccggctgctgtacaacagcccagaatatgaggccagcttccccaggatggagggcatgctgttcctgcctgtggaggccggcaaggagatccaggagacctggacagtgaccctggagcccctggccatgcaccagaggcacttccagaagcctgtgcgcatcttcctgaagggctctgtggcccagtggagcctgcccaccagcagcaccctgggcacagacagctggatgctgggcagccctgaggagagcacagccacccagaggctgctcttccagcagctggtgtcccggctgacagctgaggagctgcacctggtggctgatgtggaccccggggagggccggccccccatcaccggggtcatcagccccctgagcgccagcgccatgatcctgactgtgtgcaggaccaaggaggccgagttccagagacatgtgctgcagacagctgtggccgacagcccccgggacacagccagcctcttcagtgatgtggtggacagcatcctgaaccagacccatgacagcctggccgacacagccagcgctgccagccctgtgcctgagtgggcccagcaggagctgggccacaccaccccctggagccctgctgtggtggagaagtggttccccttctgcaacatcagcggggccagcagtgacctgatggagagctttggcctgctgcaggccgccagcgccaacaaggaggagagcagcaagacagaaggagagctgatccactgcctggccgagctgtaccagaggaagagccgggaggagagcaccatcgcccaccaggaggacagcaagaagaagaggggcgtgcccaggacccctgtgcggcagaagatgaacaccatgtgccgcagcctgaagatgctgaatgtggcccggctgaatgtgaaggcccagaagctgcacccagatggcagcccagatgtggccggggagaagggcatccagaagatccccagcggccgcacagtggacaagctggaggaccggggccgcaccctgcggagcagcaagcccaaggacttcaagacagaggaggagctgctgagctacatccgggagaactaccagaagacagtggccactggagagatcatgctgtatgcctgtgccaggaacatgatcagcacagtgaagatgttcctgaagagcaagggcaccaaggagctggaggtgaactgcctgaaccaggtgaagagcagcctgctgaagaccagcaagagcctgcggcagaacctgggcaagaagctggacaaggaggacaaggtgcgggagtgccagctgcaggtgttcctgcggctggagatgtgcctgcagtgccccagcatcaatgaaagcacagatgacatggagcaggtggtggaggaggtgacagacctgctgaggatggtgtgcctgacagaagattctgcctacctggccgagttcctggaggagatcctgcggctgtacatcgacagcatccccaagaccctgggcaacctgtacaacagcctgggcttcgtcatcccccagaagctggccggcgtgctgcccacagacttcttcagtgatgacagcatgacccaggagaacaagagccccctgctgtctgtgcccttcctgagcagcgcccggcgctctgtgtctggcagccctgagagtgatgagctgcaggagctgcggaccaggtctgccaagaagaggaggaagaatgccctgatccgccacaagagcattgctgaggtgtcccagaacctgcggcagatcgagatccccaaggtgtccaagagggccaccaagaaggagaacagccacccagccccccagcagcccagccagcctgtgaaggacacagtgcaggaggtgaccaaggtgagaagaaacctcttcaaccaggagctgctgagccccagcaagaggagcctgaagaggggcctgcccaggagccacagcgtgtctgctgtggatggcctggaggacaagctggacaacttcaagaagaacaagggctaccacaagctgctgaccaagtctgtggccgagacccctgtgcacaagcagatcagcaagaggctgctgcaccggcagatcaagggccgcagcagtgaccccggccctgacattggagtggtggaggagagccctgagaagggagatgagatcagcctgcggcgcagcccccgcatcaagcagctgtccttcagcaggacccacagcgccagcttctacagcgtgtcccagcccaagagccgctctgtgcagagggtgcacagcttccagcaggacaagagtgaccagcgggagaacagccctgtgcagagcatccgcagccccaagagcctgctgtttggagccatgtctgagatgatcagccccagcgagaagggcagcgccaggatgaagaagaggagcaggaacaccctggacagcgaggtgcctgctgcctaccagacccccaagaagagccaccagaagagcctgtccttcagcaagaccaccccccggcgcatcagccacaccccccagacccccctgtacaccccagagcggctgcagaagagccctgccaagatgacccccaccaagcaggccgccttcaaggagagcctgaaggacagcagcagccctggccatgacagccccctggacagcaagatcaccccccagaagaggcacacccaggccggggagggcaccagcctggagaccaagacccccaggacccccaagaggcagggcacccagcccccaggcttcctgcccaactgcacctggccccacagcgtgaacagcagccctgagagccccagctgcccagccccacccaccagcagcacagcccagcccaggagagaatgtctgacccccatccgggaccccctgcggaccccacccagggctgctgccttcatgggcaccccccagaaccagacccaccagcagccccacgtgctgcgggccgcccgggcagaggagcccgcccagaagctgaaggacaaggccatcaagacccccaagaggcctggcaacagcacagtgaccagcagcccccctgtgacccccaagaagctgttcaccagccccctgtgtgatgtgtccaagaagagccccttcaggaagagcaagattgaatgtcccagccctggagagctggaccagaaggagccccagatgagccccagcgtggccgccagcctgagctgccctgtgcccagcaccccacctgagctgagccagagggccaccctggacacagtgcccccacctccacccagcaaggtgggcaagcgctgcaggaagaccagtgacccccggcgcagcatcgtggagtgccagccagatgccagcgccaccccaggagtgggcacagctgacagccctgctgcccccacagacagcagagatgaccagaagggcctgagcctgagcccccagagccccccagagcggcggggctacccaggccctggcctgcggagtgactggcacgccagcagccccctgctgatcaccagtgacacagaacatgtgaccctgctgtctgaggccgagcaccacggcattggagacctgaagagcaatgtgctgtctgtggaggagggggagggcctgaggacagcagatgctgagaagagcagcctgagccaccctggcatcccccccagcccccccagctgtggccctggcagccccctgatgcccagcagagatgtgcactgcaccacagatggccggcagtgccaggccagcgcccagctggacaacctgcctgccagcgcctggcacagcacagattctgccagcccccagacctatgaggtggagctggagatgcaggccagcggcctgcccaagctgcgcatcaagaagattgaccccagcagcagcctggaggccgagcccctgagcaaggaggagagcagcctgggggaggagagcttcctgcctgccctgtccatgccccgggccagccgcagcctgagcaagccagagcccacctacgtgagccccccctgcccccggctgagccacagcacccctgggaagagccggggccagacctacatctgccaggcctgcacccccacccacggccccagcagcacccccagccccttccagacagatggagtgccctggacccccagccccaagcacagcggcaagaccaccccagacatcatcaaggactggcccaggaggaagagagctgtgggctgtggggccggcagcagcagcggccgcggggaggtgggcgctgacctgcccggcagcctgagcctgctggagagcgagggcaaggaccacggcctggagctgagcatccacaggacccccatcctggaggactttgagctggagggcgtgtgccagctgcctgaccagagccccccaagaaattccatgcccaaggccgaggaggccagctcctggggccagtttggcctgagcagcaggaagagggtgctgctggccaaggaggaggccgacagaggagccaagaggatctgtgacctgagagaagattctgaggtgtccaagagcaaggagggcagccccagctggagcgcctggcagctgcccagcactggagatgaggaggtgtttgtgtctggcagcaccccaccacccagctgtgctgtgcgcagctgcctgagcgccagcgccctgcaggccctgacccagagccccctgctcttccagggcaagacccccagcagccagagcaaggaccccagagatgaagatgtggatgtgctgcccagcacagtggaggacagccccttcagccgggccttcagcagaagaagacccatcagcaggacctacaccaggaagaagctgatgggcacctggctggaggacctgtag

SEQ ID NO: 242814 - DNA, 5733 bp, Artificial Sequence
  derived and/or modified sequence
atggcctgctgccacaaggtgatgctgctgctggacaccgccggcggagccgccaggcatagcagggtgcggagagctgccttgcgattactgacctacttgtcttgtcggtttgggttggcccgcgttcactgggcatttaagttctttgattctcaaggcgctcggagcaggccttctagggtgagcgacttccgcgaactgggctcccgatcatgggaggacttcgaagaggaactggaggcccgcctcgaagacagggctcatctgcccgggccggcccccagagctacacatacccatggcgccctcatggaaaccttgctggattaccagtgggaccgcccagagatcaccagccctacaaaaccgattctaaggagtagtggtcgtagactgctggatgtggaaagcgaggccaaggaggcggaagcagctttgggaggacttgtcaacgctgtctttctgctggcaccttgcccccacagccaaagagagctccttcagttcgtctctggctgcgaggcccaggctcagaggcttccacccacacccaagcaggtcatggaaaagctcctccctaagagagtgagagaagttatggtggcaagaaaaatcaccttttattgggtcgatacgaccgaatggtctaaattgtgggaaagtccggaccacctgggatactggactgtatgcgagctccttcaccacggcggtgggacagtgttaccctccgaatcatttagctgggacttcgcccaggcaggcgaaatgctgttgcggtctggcatcaaactcagcagtgaaccccacctcagtccatggataagtatgttaccaaccgacgctaccctgaataggcttctctataattcgccggaatatgaggcctcgttccctcggatggaaggcatgctcttcttgcccgtcgaagcaggcaaggaaatccaggagacctggaccgtcaccctggaacccctggctatgcaccagcgacattttcagaagcccgtgcgcatctttctcaagggctctgtggcgcagtggtcattgcccacatcttctacattgggtactgactcctggatgttgggatccccagaagagtctacggctacccagaggctgctgtttcagcaactagttagccgtcttaccgccgaggaactgcacctggtggctgacgtggatcccggcgagggacgccccccaattactggcgtcatatcacctttgtctgcctccgctatgatcctcacagtgtgcagaaccaaagaggcagaattccagcggcacgtgctccaaactgccgtcgcagatagcccaagggatactgcctcattgtttagcgacgtggtggattccattcttaaccagacccacgattcactggccgatactgcaagcgcagcctcacccgtgccagaatgggctcagcaagagctcggacacactacaccttggagtccggctgtcgttgagaagtggtttccattttgcaacatcagcggggcctctagcgatctgatggagagtttcggcctgctgcaggctgcaagtgcaaacaaagaagagagcagtaagaccgaaggtgagcttattcactgcctcgccgagctttaccagcggaagtctagagaggagagtacaattgcccaccaggaggacagtaaaaaaaaacgtggggtccctagaacgccagtgaggcaaaaaatgaatacaatgtgccgttccttgaagatgctgaacgtggcgcgccttaacgtcaaagcccaaaagctccaccctgatggtagccctgatgtggcaggtgaaaaagggatccaaaaaatcccatcgggtagaaccgtggataaactggaagaccgcggcaggaccctgaggtcaagtaagccaaaggattttaagaccgaggaggagctgctgtcttatattagagaaaactaccagaagactgtagccacaggtgagattatgctgtatgcttgcgcaagaaacatgatttccaccgtgaaaatgttcctgaaaagtaagggaacaaaagagcttgaggtgaattgcctcaaccaggtcaagtcttcgctactgaagacttcgaagagtttgcggcagaacttgggcaaaaaactagacaaagaagataaggtgagagagtgccagctccaagttttcctccgactggagatgtgcttacagtgtccaagcatcaatgagagtaccgacgatatggaacaggtagtcgaggaggtgaccgatctcctgcggatggtgtgcttgactgaagattccgcatatctcgctgagtttctcgaagagatcctgaggctgtacatcgattcaataccaaagactctgggtaacctctacaactcactcgggtttgttatcccccagaaattggccggcgtgctgccaacggactttttttctgatgactctatgacccaggagaacaagtcccctttgttgtccgttccattcctcagctcagccaggcggtctgtgagcggatcccctgagtctgacgagctgcaagagttaagaacgcggtccgccaaaaagcggaggaagaacgccctgattcggcacaaaagcatcgccgaagtttcacagaacctgcgccagattgaaatcccgaaggttagcaaacgggccaccaagaaagagaactctcacccagcacctcaacagcctagccagccagtgaaggatacagtgcaggaggtgactaaggttcgcagaaacctctttaaccaggaattactctctcccagtaagagatccctgaaaagaggactaccgcgctcacactccgtaagcgctgtcgatggactggaggataaacttgacaactttaagaaaaacaaagggtatcacaagctgctcacaaaatcagtagctgagacccccgtgcacaaacagatcagcaagcgattgctacatcgccagattaaaggtaggtcctcggatccaggccccgacataggggtggtcgaagagagcccggagaagggggacgagatttcccttcggaggagcccaagaatcaaacaactgtcattctccaggacacattcagctagcttctattctgttagccagccgaagagtagaagcgttcagcgcgttcatagctttcagcaagataagtctgaccaacgtgaaaattcccccgtacagagcattagaagccccaagtcactgctcttcggggcaatgtcggaaatgatctcaccgtctgaaaagggatctgccagaatgaagaagaggtcccgcaacaccttggatagtgaagtgccagcggcttatcagactccaaaaaagtcccatcagaaaagtctgtcattttccaagactacccccagaaggatatcacataccccccagaccccactgtacacgcctgaacggctgcagaaaagccccgccaagatgacacctaccaagcaggccgcgttcaaggaaagcctgaaagacagtagttcccctggtcacgacagccctctcgactcaaaaattacgccacagaagcggcacacacaagctggcgagggaacttccctcgagactaaaacaccgcgcacccctaagaggcaggggacgcagccacccggtttcctgccaaattgcacttggccccacagcgtgaattccagtcccgagtcaccttcatgccctgcaccccccacatcttccaccgcacaaccccggcgcgagtgcttgactccaattagagatccactgcgcactcctcccagagccgccgctttcatgggtacacctcaaaatcagacccaccaacaaccacatgtactaagggctgccagagcggaggaaccggcacaaaaactgaaagataaagccatcaagacacctaagaggccagggaactccacggtgacatcttcaccccctgtgacgcctaaaaaacttttcacctccccgctctgtgatgtgagcaaaaagtcaccatttcgcaaatctaaaattgaatgtccttcacctggggagttagaccagaaagaaccgcagatgtcgccgtccgtcgccgcgagtctgtcatgtccggttcctagtactccacccgaactgtcacagcgcgctacactggacacggtacccccgccgccccctagtaaggtgggaaagaggtgtcggaagacttcagaccccaggaggtcaatcgtggaatgtcagccagacgcctccgccacaccaggcgtgggtacagctgactctcctgcagcccccaccgacagccgcgatgatcagaagggtcttagcctgtctccccagtctccaccggagcgccgcggctaccccggacccgggctacgctcagattggcacgcctcaagccctctcctgataacctccgacactgagcacgtcaccctcctgtccgaagccgaacaccatggcataggggatctcaagagcaacgtcctgagcgtcgaagaaggagaagggcttcgaaccgccgacgcagaaaagagctctcttagccaccctggcatccctccttcccctccatcgtgcggccccgggtctccactcatgccctctagagatgttcactgtacaactgatgggcgacaatgtcaagcctctgcacagctggataacctccctgccagcgcctggcactccactgactctgccagtccccagacatacgaagtcgaattggagatgcaggctagcggcctgcccaagctgcgcatcaagaagatcgacccttcttcctcactggaggctgagccgctttcaaaagaggagagctccttgggggaggagtccttcctaccagctctgtccatgcctcgcgccagccgttccctcagcaaaccagagcccacgtacgtatctcctccctgcccccgcttgagccattctacaccaggtaagtccagagggcagacttacatatgccaggcttgcacgcctacccacgggccttcgtcaacaccatcgccttttcagaccgatggagtaccttggacgccaagccccaaacattcaggcaaaacaactccagacattataaaagactggccccggcgcaaacgggctgttgggtgtggtgccggttcttcttccggcagaggtgaggtgggcgccgacctgcccggctccttgagcttacttgaatcggagggtaaagatcacgggctggagctgagcatacaccggacccctatactcgaggacttcgagctggagggcgtctgccagcttcctgaccagtcgcccccccgaaattccatgccaaaggccgaagaggcctcctcctggggtcagttcggtcttagctcacgaaaacgggtgctgctcgccaaggaggaagcagacaggggcgctaaaaggatttgcgatttgagagaggatagcgaagtctcgaagtctaaagaaggatccccttcctggtcagcctggcagttaccgtctacaggcgatgaggaagtgttcgtttcgggtagcaccccgcctcctagctgcgccgtccgctcctgtctgagcgctagcgcgctccaagcccttactcagtcacccctactcttccagggcaaaacgcccagctctcagagtaaggaccctagggacgaggatgtggatgtgctgcccagcactgtggaagatagccccttcagccgggccttctcccggcggaggcctatatccaggacttatactaggaagaagttgatggggacctggctggaggacctgtag

SEQ ID NO: 242815 - DNA, 5732 bp, Artificial Sequence
  derived and/or modified sequence
atggcttgttgccacaaagtgatgctgttgcttgacactgccggtggcgctgcgaggcattctcgagttaggcgcgcagccctgaggctcctcacttacctctcttgtcgctttggactagcgagagtgcactgggcatttaaatttttcgactctcagggagcccgttcacggccttcacgcgtctcagattttcgcgaactcgggtcacgatcttgggaggatttcgaagaggagctcgaagcccgactggaagaccgcgctcacctccccggaccagcaccccgtgccacccatacgcatggggcactgatggagaccctgctggactaccaatgggacaggcccgaaattacttcccccactaagcctatcctgcgctccagtgggcgtcggctcctggacgtcgagagcgaggctaaggaagccgaagctgctcttgggggactggtgaacgccgttttcctcctggctccttgcccacattcacagcgcgaactccttcagtttgtgagcggctgcgaggcccaggctcagcggttaccgccaactccaaagcaagtgatggagaagctgctgcccaaaagggtgcgcgaggttatggtagccaggaaaattacattctactgggtcgacacaacagaatggtcaaagctgtgggaaagccccgaccacctaggttactggacagtctgtgaactgctgcaccacggaggcggaaccgttctcccaagcgagagcttttcctgggacttcgcccaggcaggcgagatgcttctccggtccggcatcaaactctcttctgaaccacacctctctccctggataagcatgctgcccacagacgctacgctgaataggctgttgtacaattcccctgaatacgaggcttccttcccgcgaatggagggcatgctgtttctgcctgtggaagcaggaaaagagatccaggagacctggaccgtgaccctggaacctctcgctatgcatcagaggcacttccagaaacctgtcaggatctttctgaagggtagcgtggcccaatggtctctgccaacttctagcacactaggcacagattcctggatgcttggatcacctgaagagagtacggccacacaaagattactgtttcagcaattggtcagccggctgacagccgaggaactgcacctcgttgccgacgtagatccaggtgaaggacgccctccaatcaccggtgtgatcagccctctgagtgccagtgcgatgatacttacggtgtgccgtaccaaagaagcagagttccagcggcacgtgttacagacagccgtggccgactctccaagagacaccgcttccttgttttccgacgtcgtggacagcatcctcaaccagacccatgacagcctggctgatactgctagcgctgctagtcctgtccccgaatgggcgcagcaggagcttggccacaccacaccatggtcaccagcagtggtcgagaagtggtttcctttctgcaacatcagcggcgcttccagcgacctaatggagtccttcgggctgctgcaggccgcatccgccaacaaggaggaatcttctaagactgagggagagctgattcactgcctggctgagttataccagagaaagtcccgtgaggagtcaactattgcccatcaggaagattcgaaaaagaaacggggagttcctcgaacacctgtgcgccagaagatgaatacaatgtgcaggagtctgaaaatgctgaatgtggccaggttgaatgttaaggcccagaagctgcatcctgatgggagcccggacgtcgccggagaaaaagggatccagaagatcccttctgggagaacagtcgacaaattggaggaccgaggacgtactcttcggtcaagcaagccaaaggactttaagactgaggaagagctgctctcttatattagggagaactaccagaaaacagtcgccacaggggaaatcatgctgtacgcctgcgctcggaacatgatcagtaccgtgaaaatgttccttaaatctaagggcaccaaagagttggaagtcaattgtctcaatcaggtgaaaagctccctgcttaagaccagtaaaagtctccgccagaacctgggaaaaaaacttgataaagaagacaaggtccgagagtgccagttgcaagtcttcctgagattggagatgtgtctccaatgcccatccattaacgaaagtaccgatgatatggagcaggtcgtggaagaggttacagaccttctgcgtatggtgtgcctcaccgaagacagcgcctacctggccgagtttctggaggaaatcttgagactatacatcgatagtatcccaaaaactctgggcaacctttacaattctctcggctttgttatcccccaaaaacttgccggtgtcctcccaaccgacttcttcagcgatgattctatgacccaagaaaataagtctcctttgctgagcgtgccttttctgagtagcgcccgtaggagcgtcagcgggtccccagagtctgacgagctccaagaactccgaacaagaagtgcaaagaaaagaagaaaaaacgcactgattcgccataagtccatcgccgaggtcagtcagaatttgcgacagatcgaaataccgaaagtttctaagcgcgcaaccaagaaagagaatagtcacccagcaccccaacagccctctcaacccgttaaagatacggtccaggaagttaccaaggttaggcgaaacctgttcaatcaggagctcctttctccgtcgaaacgctcgctgaagcggggacttcccagatcccactctgtttcggctgtggacggactggaggataagttagacaacttcaagaagaacaaaggttaccataagctcctgactaagtctgttgccgagacacccgtgcacaagcaaatctccaaaagactgttgcaccgccagatcaaaggcaggagctccgatccaggccctgacattggggttgtcgaggagtcacccgagaaaggagatgagatctcacttcggcgatccccacggattaaacaattgagttttagcagaacgcactccgctagcttttactcagtctcgcagcccaaatccagaagtgtgcagcgggtgcactctttccagcaagataagagcgaccagagagagaacagccccgtgcagtccattcgttcacctaaatctctgctctttggggctatgtctgagatgatatcaccttcagaaaagggatcagctaggatgaaaaagcggtcgaggaatactctcgactcagaggtaccagccgcataccagactcccaaaaagagtcaccagaaatctttgagcttcagtaagactacaccacgcagaattagtcacaccccacaaacacccctgtatactccagaacgcctgcagaagtctcccgctaagatgactccaacaaagcaggctgccttcaaagagtccttaaaggacagttcctcacccggacatgactctccccttgactccaaaatcactccccaaaagcgccacacacaggccggtgagggtacgagtctcgagacaaagaccccccgtacgcccaaacgccagggaactcagcctcctggatttcttcccaactgtacatggccacattccgtcaatagttctcccgagtccccctcatgccccgctccacctacatctagcacagctcaacccaggcgcgagtgcctaacacccatccgcgacccgctccgcaccccccctcgcgctgctgcatttatggggacacctcagaatcagacccaccaacagccgcatgtattacgtgccgctcgggcagaggagcccgctcagaagttaaaagacaaagctattaagactccaaaacgtccaggaaattctacggtcacaagttctccacccgttactccaaagaaattgttcactagccctctttgcgacgtgagtaagaaaagtccttttcgaaaatccaagatcgagtgccccagcccaggcgagctcgatcaaaaagaacctcagatgtcccccagcgttgctgctagtctctcatgccctgtaccgagcaccccacccgaactaagccagagagccacgctcgacactgttcctccccctccaccatcaaaagtcggtaaacgctgcaggaaaactagtgatccccgtcgcagcatagtcgaatgtcaacctgatgccagcgccactccaggggtgggaaccgctgactcgcctgctgccccaactgacagcagggatgaccaaaagggattgtccctctctcctcagagccccccagagcggagaggttacccaggaccaggactcagaagcgattggcacgcaagctcacccttgctaatcacgagcgataccgagcacgtgactctgctctccgaggcggaacatcacgggatcggcgacctgaagagcaatgtattgtccgtggaggaaggcgaaggcttgcggaccgccgatgcggagaagtctagcttgagccacccagggatcccgcctagtcccccttcctgcggcccaggatcccccttgatgccctcccgggacgtgcattgcaccacagacggcaggcaatgccaggcatctgcccagcttgacaatctccccgcatcggcctggcatagcaccgatagtgcttcacctcagacatatgaagtcgaactcgagatgcaagcctccgggttgcctaagctcaggatcaagaagattgatccttcctctagcctagaggccgagccattgtctaaggaggaatcctcacttggggaggaatccttcctgcctgcactgtctatgcctagggcctcaaggtccctctccaaacctgaacctacctatgtgtctccaccttgtcctaggctcagtcacagtaccccagggaagtcacgcggtcagacttatatctgccaggcctgtaccccaactcatgggccaagtagcaccccatcaccgtttcagactgacggcgtgccgtggaccccctctcctaagcattctggtaaaacaacaccggatattattaaggactggcccaggcgtaagagggctgtgggctgcggcgctggatcctcaagcggacggggtgaggttggagcagacttgcctggctccctctctctgctggaatctgaaggaaaggatcatggtctcgaactgtcaatccatcggacccccattctagaggactttgagctggaaggcgtgtgtcaactgcctgaccaatctccaccccgaaactccatgcccaaggcagaagaagcaagcagctggggacagtttgggctgtcttcacgaaaaagggtattactggcaaaagaagaggccgaccggggtgctaaaaggatctgtgacctgcgtgaagattccgaggtttcaaagtctaaggagggatccccatcctggtcagcctggcagctccccagcactggtgacgaagaagtgttcgtttctggcagcacccctccccctagttgtgccgtacgctcatgtctgagtgccagtgcactacaggccctgacccagagccctctgttgtttcagggaaagaccccatcctcccagtcaaaggacccacgggatgaggatgttgatgtactacctagcaccgtagaagacagccctttcagtcgcgctttctcccggagaaggccaatctcccggacttatactcgaaagaagctgatgggcacctggctggaagatctgta

SEQ ID NO: 242816 - DNA, 6771 bp, Artificial Sequence
  derived and/or modified sequence
gggtcccaaaggaaagcagtgagtggtgctgtttccctgaaggaagggactaagggacggtggcgcgggcccggaccggggccccggggcggcggcacggccgatatggcatgctgtcacaaagtaatgctgctgctggacaccgcgggcggcgccgcccgccacagccgggtccggcgggccgccctgcgcctcctcacctatctgagttgccgattcggcctggccagggtccactgggccttcaagttctttgactcgcagggggcgcggagccggccgtcccgcgtgtctgacttccgcgagctggggtcccgctcgtgggaggactttgaggaggagctggaggccaggctcgaggatcgcgcccacctgcccggcccggcgcccagggccacccacacgcacggcgccctgatggagacgctgctagactaccagtgggaccggcccgagatcacgtcgcccacgaagccgatcctgcggagcagcgggaggagactgctggacgtggagagcgaggccaaggaggccgaggccgcgctcgggggcttggtgaacgccgtcttcctcctggccccctgtccgcactcgcagagggagctgctgcagttcgtgtctgggtgcgaggcccaggcccagcgcctgccgcccacccctaagcaggtgatggagaagttgttgcccaagagagtccgggaagtcatggtcgcccgaaaaatcaccttctactgggtggataccaccgaatggtctaagttgtgggaatccccagaccaccttggatactggactgtttgtgaactgctccaccacggaggtggcactgtcttgccatctgaatctttcagctgggattttgctcaagctggggaaatgctgctcaggagtggaataaagctgtcaagtgaacctcatctttctccgtggatttcaatgctgccaactgatgccactttaaaccgtttgctctacaattctcctgagtatgaggcctcgtttccacgaatggaaggaatgttatttctccctgttgaagcaggcaaagagattcaagaaacatggacagtcaccctagagcccttggccatgcatcagagacattttcagaaaccagtcagaatttttctaaaaggctcagtggcccagtggtctctcccaacgagcagcactttgggcactgacagctggatgctaggaagtccagaggagagcacagcaactcaaaggctgttatttcagcagttggtaagcaggctgactgctgaagagttacacctggttgctgatgtggaccctggtgaaggccggccccccatcactggagttatttccccactctctgccagtgctatgatcctcactgtgtgccgcaccaaggaggctgaatttcaacgacatgttctccaaacagctgtggctgacagcccccgggacacagcttcccttttctcagatgttgtggatagtatattgaatcagactcatgattcgcttgcagatactgcttctgctgcttctcctgttccagagtgggcccagcaggagcttggccacaccactccctggagtccagctgttgtggaaaagtggtttcctttctgtaacatcagtggtgccagttccgatttgatggagtcatttgggttactacaggctgcctcagctaataaggaagagtcttccaaaactgaaggcgaattaatacattgccttgccgagctctaccagagaaaatctcgtgaagaatccactatagctcatcaagaagacagcaaaaagaaacgaggggtccctcgtactccagtgagacagaagatgaataccatgtgccgttccttaaagatgttgaatgtcgcaaggctgaatgtgaaggcccagaagttacatccagatggcagtccggatgtggctggggagaaaggaatccaaaagatacctagtgggagaacagtggataaattggaagacagaggaagaacactaagaagttctaaacctaaagattttaaaactgaggaagagctgctatcatatatacgtgaaaattaccaaaagactgtggccacaggagaaatcatgttgtatgcatgtgctcgaaacatgatctcaaccgttaaaatgttcctaaaatcaaaaggcaccaaggaattagaagtgaactgcctgaatcaagtaaaaagtagtctcttaaaaactagtaaaagtcttcgacagaatctaggaaaaaaactggataaggaagacaaagttagagagtgccagcttcaggtatttcttcgtttggagatgtgtctgcaatgcccttcaataaatgaaagtacagatgatatggaacaagtagtggaggaggtgacagatttgctgcgcatggtgtgtttaactgaggattcagcgtacctagcagagtttctggaggaaattttgagattgtatattgactctatcccaaagacacttggaaatctttacaacagcctagggtttgtgattcctcagaagctggctggtgtccttcctacagattttttcagtgatgactccatgacacaagagaacaaatcaccacttctttctgtgccttttttgtcaagtgctcgtagatcagtgtcaggcagccctgaatctgatgaactgcaggaacttcgtaccagatcagccaagaagagaaggaaaaatgcattaataagacataaaagcattgctgaggtttcacagaatcttcgacaaattgaaattcctaaagtgtcaaagagagctacgaaaaaagagaactctcaccctgctcctcagcagccttcccagccagtgaaagatacagtgcaagaagtgaccaaagttcgaagaaatcttttcaaccaggaattgctttccccttcaaagagatcactaaagcgggggttgcctagaagccattctgtgtcagctgtggatggtctagaggataaacttgacaacttcaagaagaacaaaggttatcacaaactgctgactaagagtgtggccgagactccagtgcataagcagatctccaaaaggctgctgcacagacaaatcaagggcaggtcctctgatcctggtcctgatattggtgttgttgaagagtcccctgaaaaaggagatgaaataagtctgagacgaagtcctcgaatcaagcagttgtcatttagcaggacacattctgcctccttctattctgtgtctcagccgaagtctcgaagtgtgcaaagagtccactctttccagcaagataagtcagaccaaagagaaaattctccagtccaaagtattcggtctcccaagagtcttctttttggggcaatgtctgagatgatcagcccctcagaaaagggttcagctcgaatgaaaaagcgttcaagaaacactttggattcggaggtacctgcagcttaccagactcccaagaagagtcaccagaaatctctgagcttttctaaaactacaccaagaaggatctctcatacaccacaaactccgttgtatactccagaaaggctgcagaagtcccctgcaaaaatgacccctacaaagcaggcagcttttaaggagtccttaaaagactcctcctcacccggccatgactcaccattggattcaaaaatcactcctcaaaaacgacatacccaggcaggagaaggtacctctcttgaaacgaagacaccaagaactcctaagaggcaaggtactcagccgcctgggtttttgccaaactgtacttggccacattcagtgaattccagtccagaaagcccctcctgtccagcccctccaacttcatcgactgcccagcccaggagagagtgtctcactcccatcagagaccctctcagaacacctccgagagcagcagccttcatgggcacgcctcagaatcaaacacaccaacagccccatgtcctcagagctgctcgggcagaggaaccagcccagaaactaaaggataaagctatcaaaactccaaaaagaccagggaattcaactgtgacttcttccccacctgttacgccaaagaaactgtttacctctcctttatgtgatgtctccaagaagagtccatttaggaaatctaaaatagagtgtccttccccaggagaactggatcagaaagagccccagatgtcacccagcgtagctgcatctctctcctgccctgttccctcaactccccctgaactctcacagagagctacattggacaccgtccctcctccacccccttctaaagttgggaaacggtgtagaaagacctctgatcccagaaggagcatcgtggagtgtcagcctgatgcctccgctactcctggggttggcacagctgacagcccagctgcccccacagactctagagatgaccagaagggactgagcctctctcctcagtctcctcctgaaagacggggctacccaggccctggtctcaggagtgattggcatgcatcctctcctctgctcattacaagtgacacagagcatgtcactctcctcagtgaagccgaacaccatggcattggtgacttgaaaagtaacgtcttatcagtggaagagggtgaggggctaaggacagcagatgctgagaagtcttctctgtctcaccctgggattcccccatctcctccttcctgtgggcctggctctcctctgatgccttcccgtgacgtgcactgtaccacagatgggagacagtgccaggcttcggcacaactagacaacctgccagcatcagcttggcattccacagactctgccagcccacagacctatgaggttgagctggagatgcaagcttctggccttcccaaacttcgaattaagaagatagaccccagctcttcattagaggctgagcccctcagcaaggaggagagctctctgggagaagagagcttcctccctgctctcagcatgcccagggccagcaggtccttaagcaaacctgaacccacctatgtgtcacccccctgcccccgcctctcccacagcacacctggcaagagcagggggcaaacctacatctgccaggcctgtacccccacccacggcccttctagtaccccctctccatttcaaacagatggggttccttggacaccatcccccaagcacagtgggaagacaactccagacataattaaagactggcccaggaggaagagggcggtgggctgtggcgccggctcctcttccgggaggggcgaggtcggtgcagaccttcctgggagcctgtcactgcttgagtcagagggcaaggaccacggccttgaactcagcatccacaggacgcccatcttggaggattttgagctcgagggagtgtgccagctcccagaccagtcgcctcccaggaacagcatgcctaaggccgaggaagcctcttcctggggacagtttgggttgagttccaggaagagagtcctgttggccaaggaagaagctgaccgtggagccaaaaggatctgtgacctgagagaagattcagaagttagtaagagtaaagaggggtctccaagttggagtgcatggcagctaccctccacgggagacgaagaggtgtttgtttccggctccaccccacctcccagctgtgccgtgcggagctgcctctctgccagtgccctccaggctctgacccagtctccgctgctgttccaggggaaaacaccttcctctcagagcaaagaccccagagatgaggatgtggatgttcttccctccactgtagaagactctcctttcagtcgcgctttctccaggaggcgccccatcagcagaacttatacacggaagaagctcatgggaacctggctggaggacttatagccacaaacattactgagcccaaaagatcaaggagtcagccaggaccctgtggacataaagaagttggatgcctggtcccaagcctcttttgccatggtcagtgttcagattgccattagaatgccttagggttttctaattccccttatggatccaatccatctcctggccctgccccttgttggggaagttgcaggaggagaggtggatggcaatgtgattggtgctataactcaggcagcctgggagtcaggaacccagacaaggaatcccattccagcctcaccccaaccatgaccttggcaagtcagggggccactctgcctcatttatgcaaatggagaaaggcgccctccctggggtcccttgagctgctgtaaggctgggctgctgcgacacaggcagcgctttgtaaactgtgaagccatatacgtgaaactgaagagtgcattgggcagtggaagctattttttgccttccctgtgtaacagtaaaatcatctctagtgactgagcactcagtacatttttgtttaatgttgggcctgaggttaactgtgaccatggtccagcttgagtggcttctggagcagccacattttcaaggactgtccaagagccagccagttcagggctcaggcctcacccattgcccactcctggggagaccatcacctggctcatcgtttccaccaagagtgccccacaggagtgccccacagacccgctggaccagcctgctgcgggtcctggccaggggtctggctaacggtgagggctgactctgaactgtctctcagtctccagaaagtgttcaagcctgttgtgttcccaaatctgattcctcctattgtcttgtaaatcaaactctaagtgaaaacttcccatttgtcccttcaaagatttttttttattaaatggttttttaagatcc

SEQ ID NO: 242817 - DNA, 5733 bp, Artificial Sequence
  derived and/or modified sequence
atggcctgctgccacaaggtgatgctgctgctggacaccgccggcggcgccgccagacacagcagagtgagaagagccgccctgagactgctgacctacctgagctgcagattcggcctggccagagtgcactgggccttcaagttcttcgacagccagggcgccagaagcagacccagcagagtgagcgacttcagagagctgggcagcagaagctgggaggacttcgaggaggagctggaggccagactggaggacagagcccacctgcccggccccgcccccagagccacccacacccacggcgccctgatggagaccctgctggactaccagtgggacagacccgagatcaccagccccaccaagcccatcctgagaagcagcggcagaagactgctggacgtggagagcgaggccaaggaggccgaggccgccctgggcggcctggtgaacgccgtgttcctgctggccccctgcccccacagccagagagagctgctgcagttcgtgagcggctgcgaggcccaggcccagagactgccccccacccccaagcaggtgatggagaagctgctgcccaagagagtgagagaggtgatggtggccagaaagatcaccttctactgggtggacaccaccgagtggagcaagctgtgggagagccccgaccacctgggctactggaccgtgtgcgagctgctgcaccacggcggcggcaccgtgctgcccagcgagagcttcagctgggacttcgcccaggccggcgagatgctgctgagaagcggcatcaagctgagcagcgagccccacctgagcccctggatcagcatgctgcccaccgacgccaccctgaacagactgctgtacaacagccccgagtacgaggccagcttccccagaatggagggcatgctgttcctgcccgtggaggccggcaaggagatccaggagacctggaccgtgaccctggagcccctggccatgcaccagagacacttccagaagcccgtgagaatcttcctgaagggcagcgtggcccagtggagcctgcccaccagcagcaccctgggcaccgacagctggatgctgggcagccccgaggagagcaccgccacccagagactgctgttccagcagctggtgagcagactgaccgccgaggagctgcacctggtggccgacgtggaccccggcgagggcagaccccccatcaccggcgtgatcagccccctgagcgccagcgccatgatcctgaccgtgtgcagaaccaaggaggccgagttccagagacacgtgctgcagaccgccgtggccgacagccccagagacaccgccagcctgttcagcgacgtggtggacagcatcctgaaccagacccacgacagcctggccgacaccgccagcgccgccagccccgtgcccgagtgggcccagcaggagctgggccacaccaccccctggagccccgccgtggtggagaagtggttccccttctgcaacatcagcggcgccagcagcgacctgatggagagcttcggcctgctgcaggccgccagcgccaacaaggaggagagcagcaagaccgagggcgagctgatccactgcctggccgagctgtaccagagaaagagcagagaggagagcaccatcgcccaccaggaggacagcaagaagaagagaggcgtgcccagaacccccgtgagacagaagatgaacaccatgtgcagaagcctgaagatgctgaacgtggccagactgaacgtgaaggcccagaagctgcaccccgacggcagccccgacgtggccggcgagaagggcatccagaagatccccagcggcagaaccgtggacaagctggaggacagaggcagaaccctgagaagcagcaagcccaaggacttcaagaccgaggaggagctgctgagctacatcagagagaactaccagaagaccgtggccaccggcgagatcatgctgtacgcctgcgccagaaacatgatcagcaccgtgaagatgttcctgaagagcaagggcaccaaggagctggaggtgaactgcctgaaccaggtgaagagcagcctgctgaagaccagcaagagcctgagacagaacctgggcaagaagctggacaaggaggacaaggtgagagagtgccagctgcaggtgttcctgagactggagatgtgcctgcagtgccccagcatcaacgagagcaccgacgacatggagcaggtggtggaggaggtgaccgacctgctgagaatggtgtgcctgaccgaggacagcgcctacctggccgagttcctggaggagatcctgagactgtacatcgacagcatccccaagaccctgggcaacctgtacaacagcctgggcttcgtgatcccccagaagctggccggcgtgctgcccaccgacttcttcagcgacgacagcatgacccaggagaacaagagccccctgctgagcgtgcccttcctgagcagcgccagaagaagcgtgagcggcagccccgagagcgacgagctgcaggagctgagaaccagaagcgccaagaagagaagaaagaacgccctgatcagacacaagagcatcgccgaggtgagccagaacctgagacagatcgagatccccaaggtgagcaagagagccaccaagaaggagaacagccaccccgccccccagcagcccagccagcccgtgaaggacaccgtgcaggaggtgaccaaggtgagaagaaacctgttcaaccaggagctgctgagccccagcaagagaagcctgaagagaggcctgcccagaagccacagcgtgagcgccgtggacggcctggaggacaagctggacaacttcaagaagaacaagggctaccacaagctgctgaccaagagcgtggccgagacccccgtgcacaagcagatcagcaagagactgctgcacagacagatcaagggcagaagcagcgaccccggccccgacatcggcgtggtggaggagagccccgagaagggcgacgagatcagcctgagaagaagccccagaatcaagcagctgagcttcagcagaacccacagcgccagcttctacagcgtgagccagcccaagagcagaagcgtgcagagagtgcacagcttccagcaggacaagagcgaccagagagagaacagccccgtgcagagcatcagaagccccaagagcctgctgttcggcgccatgagcgagatgatcagccccagcgagaagggcagcgccagaatgaagaagagaagcagaaacaccctggacagcgaggtgcccgccgcctaccagacccccaagaagagccaccagaagagcctgagcttcagcaagaccacccccagaagaatcagccacaccccccagacccccctgtacacccccgagagactgcagaagagccccgccaagatgacccccaccaagcaggccgccttcaaggagagcctgaaggacagcagcagccccggccacgacagccccctggacagcaagatcaccccccagaagagacacacccaggccggcgagggcaccagcctggagaccaagacccccagaacccccaagagacagggcacccagccccccggcttcctgcccaactgcacctggccccacagcgtgaacagcagccccgagagccccagctgccccgccccccccaccagcagcaccgcccagcccagaagagagtgcctgacccccatcagagaccccctgagaaccccccccagagccgccgccttcatgggcaccccccagaaccagacccaccagcagccccacgtgctgagagccgccagagccgaggagcccgcccagaagctgaaggacaaggccatcaagacccccaagagacccggcaacagcaccgtgaccagcagcccccccgtgacccccaagaagctgttcaccagccccctgtgcgacgtgagcaagaagagccccttcagaaagagcaagatcgagtgccccagccccggcgagctggaccagaaggagccccagatgagccccagcgtggccgccagcctgagctgccccgtgcccagcaccccccccgagctgagccagagagccaccctggacaccgtgcccccccccccccccagcaaggtgggcaagagatgcagaaagaccagcgaccccagaagaagcatcgtggagtgccagcccgacgccagcgccacccccggcgtgggcaccgccgacagccccgccgcccccaccgacagcagagacgaccagaagggcctgagcctgagcccccagagcccccccgagagaagaggctaccccggccccggcctgagaagcgactggcacgccagcagccccctgctgatcaccagcgacaccgagcacgtgaccctgctgagcgaggccgagcaccacggcatcggcgacctgaagagcaacgtgctgagcgtggaggagggcgagggcctgagaaccgccgacgccgagaagagcagcctgagccaccccggcatcccccccagcccccccagctgcggccccggcagccccctgatgcccagcagagacgtgcactgcaccaccgacggcagacagtgccaggccagcgcccagctggacaacctgcccgccagcgcctggcacagcaccgacagcgccagcccccagacctacgaggtggagctggagatgcaggccagcggcctgcccaagctgagaatcaagaagatcgaccccagcagcagcctggaggccgagcccctgagcaaggaggagagcagcctgggcgaggagagcttcctgcccgccctgagcatgcccagagccagcagaagcctgagcaagcccgagcccacctacgtgagccccccctgccccagactgagccacagcacccccggcaagagcagaggccagacctacatctgccaggcctgcacccccacccacggccccagcagcacccccagccccttccagaccgacggcgtgccctggacccccagccccaagcacagcggcaagaccacccccgacatcatcaaggactggcccagaagaaagagagccgtgggctgcggcgccggcagcagcagcggcagaggcgaggtgggcgccgacctgcccggcagcctgagcctgctggagagcgagggcaaggaccacggcctggagctgagcatccacagaacccccatcctggaggacttcgagctggagggcgtgtgccagctgcccgaccagagcccccccagaaacagcatgcccaaggccgaggaggccagcagctggggccagttcggcctgagcagcagaaagagagtgctgctggccaaggaggaggccgacagaggcgccaagagaatctgcgacctgagagaggacagcgaggtgagcaagagcaaggagggcagccccagctggagcgcctggcagctgcccagcaccggcgacgaggaggtgttcgtgagcggcagcacccccccccccagctgcgccgtgagaagctgcctgagcgccagcgccctgcaggccctgacccagagccccctgctgttccagggcaagacccccagcagccagagcaaggaccccagagacgaggacgtggacgtgctgcccagcaccgtggaggacagccccttcagcagagccttcagcagaagaagacccatcagcagaacctacaccagaaagaagctgatgggcacctggctggaggacctgtag

SEQ ID NO: 242818 - DNA, 858 bp, Artificial Sequence
  derived and/or modified sequence
atgatggaggccatcaagaagaagatgcagatgctgaagctggacaaggagaacgccctggacagagccgagcaggccgaggccgagcagaagcaggccgaggagagaagcaagcagctggaggacgagctggccgccatgcagaagaagctgaagggcaccgaggacgagctggacaagtacagcgaggccctgaaggacgcccaggagaagctggagctggccgagaagaaggccgccgacgccgaggccgaggtggccagcctgaacagaagaatccagctggtggaggaggagctggacagagcccaggagagactggccaccgccctgcagaagctggaggaggccgagaaggccgccgacgagagcgagagaggcatgaaggtgatcgagaacagagccctgaaggacgaggagaagatggagctgcaggagatccagctgaaggaggccaagcacatcgccgaggaggccgacagaaagtacgaggaggtggccagaaagctggtgatcatcgagggcgacctggagagaaccgaggagagagccgagctggccgagagcaagtgcagcgagctggaggaggagctgaagaacgtgaccaacaacctgaagagcctggaggcccaggccgagaagtacagccagaaggaggacaagtacgaggaggagatcaagatcctgaccgacaagctgaaggaggccgagaccagagccgagttcgccgagagaagcgtggccaagctggagaagaccatcgacgacctggaggacgagctgtacgcccagaagctgaagtacaaggccatcagcgaggagctggaccacgccctgaacgacatgaccagcatctag

SEQ ID NO: 242819 - DNA, 858 bp, Artificial Sequence
  derived and/or modified sequence
atgatggaggctattaaaaagaaaatgcagatgttaaagcttgacaaagaaaacgctttggatagggcagaacaagcggaggccgagcaaaagcaagccgaagagcgttcaaagcagctagaagatgagttagctgccatgcagaaaaagctaaaaggaacagaggacgagctcgataagtatagcgaggcattaaaggatgcacaggaaaagctcgagctggccgaaaaaaaagcggctgacgctgaggctgaagtagcatccctgaacagacggatccaactcgtggaagaagagctcgacagggctcaggaaagactcgctactgcacttcagaagctcgaggaagccgaaaaggctgctgacgaatcagaacgtggaatgaaggttattgagaatcgggctttaaaagatgaagaaaagatggagttgcaggaaatccaactgaaagaagctaagcacatcgccgaggaggccgataggaagtacgaagaggtcgctaggaaacttgtgatcattgaaggagatcttgagaggacagaggaacgtgctgagttagctgaatccaaatgttccgaactggaggaggaactgaaaaacgtcactaataacctgaaaagcctggaggcccaggccgaaaaatactctcaaaaagaggacaagtacgaagaagagatcaaaatcttgactgacaaactcaaggaggcggaaacccgcgccgagtttgcagaaaggtccgtagccaaactcgagaaaaccatcgacgacttggaggacgagctgtacgctcagaagctaaagtacaaagcgatctcggaggaattagaccacgccctcaatgacatgaccagtatctag

SEQ ID NO: 242820 - DNA, 858 bp, Artificial Sequence
  derived and/or modified sequence
atgatggaggccatcaagaagaagatgcagatgctgaagctggacaaggaaaatgccctggacagagctgagcaggccgaggccgagcagaagcaggccgaggagaggagcaagcagctggaggatgagctggccgccatgcagaagaagctgaagggcacagaagatgagctggacaagtacagcgaggccctgaaggatgcccaggagaagctggagctggccgagaagaaggccgcagatgctgaggccgaggtggccagcctgaacagacgcatccagctggtggaggaggagctggaccgggcccaggagcggctggccacagccctgcagaagctggaggaggccgagaaggctgctgatgagagcgagcggggcatgaaggtgattgagaacagagccctgaaggatgaggagaagatggagctgcaggagatccagctgaaggaggccaagcacatcgccgaggaggccgacagaaaatatgaggaggtggccaggaagctggtgatcattgaaggagacctggagaggacagaggagcgggcagagctggccgagagcaagtgcagcgagctggaggaggagctgaagaatgtgaccaacaacctgaagagcctggaggcccaggccgagaagtacagccagaaggaggacaagtatgaggaggagatcaagatcctgacagacaagctgaaggaggccgagaccagggctgagtttgctgagaggtctgtggccaagctggagaagaccattgatgacctggaggatgagctgtatgcccagaagctgaagtacaaggccatcagcgaggagctggaccacgccctgaatgacatgaccagcatctag

SEQ ID NO: 242821 - DNA, 858 bp, Artificial Sequence
  derived and/or modified sequence
atgatggaggccatcaagaagaagatgcagatgctgaagctggacaaggagaatgctctggatcgtgcagagcaggcggaggccgagcaaaagcaggctgaggagcgatcaaagcagcttgaggacgaactggcagccatgcagaaaaagctcaaaggcactgaagatgagctcgataaatattcagaagccttgaaggacgcccaagagaagctggaattggctgaaaagaaagccgccgacgcagaggctgaggtcgcctcactgaataggagaattcaactagtcgaggaagaattagaccgggcgcaggagcgactggcgacagcactacagaagttggaggaagccgaaaaggctgcagacgagtccgagagaggtatgaaggtgatcgagaaccgggctctcaaggatgaagagaagatggaacttcaggaaattcagcttaaagaggcaaaacatattgcagaagaagctgaccgcaagtacgaggaggttgccagaaagttagtgatcatcgagggagatctggagaggactgaggagcgagccgagctcgctgagtctaagtgcagtgagctggaggaggaactgaaaaacgtgacgaataacctcaagagcctggaggctcaggcagaaaaatactcccagaaagaagataaatacgaggaggaaatcaagatacttaccgataagctgaaagaggccgaaacgcgagctgagtttgcagagagaagcgtggctaagttggagaaaacaatcgatgatctggaagacgaactctatgcccaaaaattgaagtataaggccatttccgaggagctcgaccacgcactcaacgatatgacatccatttag

SEQ ID NO: 242822 - DNA, 858 bp, Artificial Sequence
  derived and/or modified sequence
atgatggaggccatcaagaagaaaatgcagatgctgaaattagacaaggaaaacgccctggatcgagccgagcaggccgaagccgagcagaagcaagcagaggagcggagtaaacaacttgaggatgagcttgcggcaatgcagaaaaaactgaagggtacagaggacgagctagataaatattctgaagcactgaaagacgctcaggaaaaactggaactggccgagaagaaggctgcagacgcggaagccgaggtcgccagcctgaaccgcagaatccaattagtggaggaagagctggaccgggcacaggagaggctcgctacggccctgcaaaagttggaggaggccgaaaaggccgcagatgagagcgaacggggaatgaaagtcattgagaatagggcgctcaaagatgaagagaagatggagctgcaggaaattcagttaaaagaagccaaacacatcgcagaggaagcagacagaaagtacgaagaggtagccaggaagctcgtaatcattgagggcgatctggagcggaccgaggagcgcgctgaactggctgaatctaaatgtagcgagcttgaggaagaattgaaaaatgtgaccaacaacctcaaatctctggaggcacaagccgaaaaatatagtcagaaggaagacaagtatgaggaagaaatcaaaatactgacagataaactgaaggaggccgagacccgagccgagtttgctgagcgtagtgtcgcgaagctggagaagactatcgacgacctggaagacgaattatatgcccagaaactgaagtacaaggccataagtgaagagctagaccacgctcttaacgacatgacgtctatttag

SEQ ID NO: 242823 - DNA, 1523 bp, Artificial Sequence
  derived and/or modified sequence
gttcccccaggagaacaatgatggggtggagggagctggaaagaccatattaggaacaaaaggtggagctatgagcacagataaagactcaagtctggggacctcctggtcactcaggcagcagccccttctttcttgccccagtctccagttctccagtgttcacaggtgagcctaccaacagccactgctcatgatggaggccatcaagaaaaagatgcagatgctgaagttagacaaggagaatgctctggatcgggcagagcaagctgaagctgagcagaagcaggcagaagaaagaagtaaacagctggaggatgagctggcagccatgcagaagaagctgaaagggacagaggatgagctggacaagtattctgaagctttgaaggatgcccaggagaagctggaactggcagagaagaaggctgctgatgctgaggctgaggtggcctccttgaaccgtaggatccagctggttgaagaagagctggaccgtgctcaggagcgcctggccactgccctgcaaaagctggaagaagctgaaaaagctgctgatgagagtgagagaggtatgaaggttattgaaaaccgggccttaaaagatgaagaaaagatggaactccaggaaatccaactcaaagaagctaagcacattgcagaagaggcagataggaagtatgaagaggtggctcgtaagttggtgatcattgaaggagacttggaacgcacagaggaacgagctgagctggcagagtctaagtgttctgagctggaggaggagctgaagaatgtcaccaacaacctcaagtctcttgaggctcaggcggagaagtactctcaaaaagaagataaatatgaggaagaaatcaagattcttactgataaactcaaggaggcagagacccgtgctgagtttgctgagagatcggtagccaagctggaaaagacaattgatgacctggaagatgagctctatgcccagaaactgaagtacaaggccattagcgaggagctggaccacgccctcaatgacatgacctctatataattatcaccgtttctgctctgttctggatctgccccctttactcctcggggaacccaaggccccactctcgctctggattccatttgggtcagcctggctggtccccaaggcattaggatgggggagcaaaaagcaacttatgtattttcttccacccccaccccaaattaaaatgttaagctgctggaaacctcatgccaccctgcatttgtgtcattgacaaagctgttgctgtccctaagaaggagccttgggggtgtgatgtggggaagagctattgtaggctccccctcctctgacttatgtaatcaaagccacttttgtgtgtgtctattttttcttgacatttaaactcagctgatctgattctaccagagtgatggatttagtacaggttactcaggatagtaattttagttatactcctcaagctgaacaagattaaattccttatttccaggttcttaaatca

SEQ ID NO: 242824 - DNA, 1095 bp, Artificial Sequence
  derived and/or modified sequence
atgccggggtgtccatgtccaggatgcggtatggccggcccaagattactcttccttactgcgctggccctagagctcctggaaagggccggcggcagccagccagccttacgcagcaggggcaccgcaaccgcgtgcagattggataataaggagtccgagagttggggggcccttctatcaggggaaaggcttgacacctggatctgcagcctgttgggctctctgatggttggactctcaggcgtcttccccctcttggtgattcccctggaaatgggaaccatgctgaggtctgaggcgggcgcttggcggctgaaacagctcctctctttcgctctgggcggtctgctgggaaacgtgttcctccatctgcttccagaagcatgggcctatacctgttctgccagtccaggcggcgaggggcagtctctccaacagcagcagcaattgggcttgtgggtcatcgctggtattttgacctttctggcccttgaaaaaatgtttctcgattccaaggaagaaggaacatcccaggctcctaataaagatccaacggcagctgctgcagccctcaacgggggtcactgcctcgcccagccagcagcggagcctggcctgggagctgtcgtacgcagcattaaagtctccggctatttaaatttattggccaatacaatagataactttacacacggcctggccgtggcagcttcctttctggtctcaaagaaaatcgggctgttgacgaccatggccattcttctccacgaaatacctcatgaagttggggactttgctattctgctaagggcagggttcgacagatggtccgctgcaaagctgcagctgtctacagccctgggcggcctgttaggggctgggttcgctatatgtacccagagtcccaagggcgtggaagagactgctgcttgggtgttgccgttcacttccggaggctttctctatatagcattagttaatgtgctcccagacctgctcgaagaagaggacccgtggagatcgctccagcagctgctccttttgtgcgcaggaattgttgtgatggtcctgttcagcctgtttgtggactag

SEQ ID NO: 242825 - DNA, 1095 bp, Artificial Sequence
  derived and/or modified sequence
atgcctggctgcccctgccccggctgcggcatggccggcccccggctgctcttcctgacagccctggccctggagctgctggagcgggccggcggcagccagcctgccctgcggagccggggcacagccacagcctgccgcctggacaacaaggagagcgagagctggggcgccctgctgtctggagagcggctggacacctggatctgcagcctgctgggcagcctgatggtgggcctgtctggagtcttccccctgctggtgatccccctggagatgggcaccatgctgcggtctgaggccggggcctggaggctgaagcagctgctgagctttgccctgggcggcctgctgggcaatgtgttcctgcacctgctgcctgaggcctgggcctacacctgcagcgccagccctggaggagagggccagagcctgcagcagcagcagcagctgggcctgtgggtgattgctggcatcctgaccttcctggccctggagaagatgttcctggacagcaaggaggagggcaccagccaggcccccaacaaggaccccacagctgctgctgctgccctgaatggaggccactgcctggcccagcctgctgctgagcccggcctgggcgctgtggtgcgcagcatcaaggtgtctggctacctgaacctgctggccaacaccatcgacaacttcacccacggcctggccgtggccgccagcttcctggtgtccaagaagattggcctgctgaccaccatggccatcctgctgcacgagatcccccatgaggtgggggactttgccatcctgctgcgggccggctttgaccgctggagcgctgccaagctgcagctgagcacagccctgggcggcctgctgggcgccggctttgccatctgcacccagagccccaagggcgtggaggagacagctgcctgggtgctgcccttcaccagcggcggcttcctgtacatcgccctggtgaatgtgctgcctgacctgctggaggaggaggacccctggaggagcctgcagcagctgctgctgctgtgtgccggcatcgtggtgatggtgctcttcagcctgtttgtggactag

SEQ ID NO: 242826 - DNA, 1095 bp, Artificial Sequence
  derived and/or modified sequence
atgcccggctgcccctgccccggctgcggcatggccggcccccggttacttttcttaacagccctcgccttggaactgctggagcgggctggagggagccaacccgctctaaggtcacggggcaccgctactgcatgtcggctcgacaacaaagagtctgaatcatggggagcccttctgtcaggggaacgtctcgacacctggatctgcagccttttgggctccctgatggtgggcctaagcggtgtattccccttgcttgtgattccactcgaaatgggcaccatgctgcggtcagaggccggagcctggcgtcttaagcagctgttgtcctttgctctgggaggcttgctgggcaacgtttttttgcatttactgccagaagcctgggcttatacgtgtagtgcttcacccggaggcgaagggcaaagtctgcagcagcaacagcagcttggcttgtgggtgattgccgggattttaaccttcttggctctcgaaaaaatgtttctggactcaaaggaggagggcacaagtcaagcgcctaacaaggaccctaccgcagcggcggctgcactgaacggtggacattgtttggcacagccagctgcggagccaggcttaggcgccgtagtaagaagcatcaaggtgtctgggtacttgaaccttctggccaacactattgataactttactcacggcctagccgtcgcagcatccttcttggtcagcaaaaagattggcttgctgacaaccatggccatactactgcacgagattccacacgaggtgggcgatttcgcgattttgctgcgggctggatttgatcgatggagcgccgctaaacttcagttatctacagcactgggcgggcttctgggagccggctttgctatctgcacacaaagccctaagggcgtggaggagaccgcggcttgggtgttgccatttacttcaggcgggtttttatatattgccctcgtgaacgtgctccctgacttgctggaggaggaggatccatggaggagtctgcaacagctcctgctactgtgtgccggaatcgtggtgatggtgctctttagtctcttcgtcgattag

SEQ ID NO: 242827 - DNA, 1095 bp, Artificial Sequence
  derived and/or modified sequence
atgccaggttgtccttgtcctggttgtggtatggctggcccaagattgctgtttctcacagcactggctttggagcttctcgagagggctggtggcagccagcctgcactcaggagccgcggaacggcaacagcctgcagactcgacaacaaggagtccgaatcttggggtgcactgctgtcaggcgagcgtctggacacttggatctgcagtctgttggggtcactcatggtggggctgtccggcgtgttccctctcctggttatacctttggagatggggacaatgctcagaagtgaagccggagcctggcgactgaagcagcttctgagcttcgccttggggggactgttggggaatgtcttccttcacctgcttccagaggcttgggcatacacatgttctgcctctcccggaggcgaaggacagtccctccagcagcaacagcagcttgggctctgggtgatcgccggaattctaacttttttggcactcgaaaagatgttcttggatagtaaagaggaagggacctcacaggcacctaacaaggaccccaccgctgcagctgcagctctaaacggtggccactgtctcgctcagcccgctgcagaacccggactgggggcagtagttcgctccattaaagtgtccgggtacttgaatctcctagctaacactattgataacttcacccatggcctggctgtagctgcctccttcctggtctcaaaaaagattggcctcttgactaccatggccatcctgttgcatgaaatcccccacgaggtcggagacttcgcaattctgttgagagccggatttgatagatggtcagctgccaagctgcagctgtcaacagccttggggggtctcctgggggctggcttcgcaatctgtacccagagcccgaaaggagtggaagagactgctgcctgggtgctaccatttacctcaggtggcttcctatatattgcactggttaatgttcttcccgatctccttgaggaggaggacccctggcggtccctccagcagttattgcttctgtgtgctggcattgttgtcatggtcctgttttccttattcgtggactag

SEQ ID NO: 242828 - DNA, 2289 bp, Artificial Sequence
  derived and/or modified sequence
gccgcccggatcgccgccgccgccgccgcacggtggccttttgtgtttttcagtacgtggcatgcctggatgtccctgccctggctgtggcatggcgggcccaaggctcctcttcctcactgcccttgccctggagctcttggaaagggctgggggttcccagccggccctccggagccgggggactgcgacggcctgtcgcctggacaacaaggaaagcgagtcctggggggctctgctgagcggagagcggctggacacctggatctgctccctcctgggttccctcatggtggggctcagtggggtcttcccgttgcttgtcattcccctagagatggggaccatgctgcgctcagaagctggggcctggcgcctgaagcagctgctcagcttcgccctggggggactcttgggcaatgtgtttctgcatctgctgcccgaagcctgggcctacacgtgcagcgccagccctggtggtgaggggcagagcctgcagcagcagcaacagctggggctgtgggtcattgctggcatcctgaccttcctggcgttggagaagatgttcctggacagcaaggaggaggggaccagccaggcccccaacaaagaccccactgctgctgccgccgcgctcaatggaggccactgtctggcccagccggctgcagagcccggcctcggtgccgtggtccggagcatcaaagtcagcggctacctcaacctgctggccaacaccatcgataacttcacccacgggctggctgtggctgccagcttccttgtgagcaagaagatcgggctcctgacaaccatggccatcctcctgcatgagatcccccatgaggtgggcgactttgccatcctgctccgggccggctttgaccgatggagcgcagccaagctgcaactctcaacagcgctggggggcctactgggcgctggcttcgccatctgtacccagtcccccaagggagtagaggagacggcagcctgggtcctgcccttcacctctggcggctttctctacatcgccttggtgaacgtgctccctgacctcttggaagaagaggacccgtggcgctccctgcagcagctgcttctgctctgtgcgggcatcgtggtaatggtgctgttctcgctcttcgtggattaactttccctgatgccgacgcccctgccccctgcagcaataagatgctcggattcactctgtgaccgcatatgtgagaggcagagagggcgagtggctgcgagagagaatgagcctcccgccagacaggagggaggtgcgtgtggatgtatgtggtgtgcacatgtggccagaggtgtgtgcgcgagaccgacactgtgatccctgtgctgggtccggggcccagtgtagcgcctgtccccagccatgctgtggttacctctccttgccgccctgtcaccttcacctcccggagtaagcagcgaggaagagcagcactggtcccaagcagaggccttgccctgctgggaccccgggagtgagagcagcccaaggatccagggtgcagggaactccagagctgcccacctcccactgccccctcagcacacacacagtccccaggcggcctaggggccaaggctggggcggctttggtcccttttcctggcccttccttccccacttctaagccaaagaaaggagaggcaggtgctcctgtaccccagccccactcagcactgacagtccccagctcctagtagtgagctgggaggcgcttcctaagaccctttcctcagggctgccctgggagctcattcctggccaacacgccctggcagcaccagcagctcttgccacctccagctgccaaacagcagcctgccgggcagggagcagccccaggccagagaggcctcccggtccagctcagggatgctcctgccagcacaggggccagggactcctggagcaggcacatagtgagcccgggcagccctgcccagctcaggcccctttccttccccattgaggttggggtaggtgggggcggtgagggctccacgttgtcagcgctcaggaatgtgctccggcagagtgctgaagccataatccccaaccatttcccttggctgacgcccaggtactcagctggcccactccacagccaggcctggccctgcccttcaccgtggatgttttcagaagtggccatcgagaggtctggatggttttatagcaactttgctgtgattccgtttgtatctgtaaatatttgttctatagataagatacaaataaatattatccacata

SEQ ID NO: 242829 - DNA, 1095 bp, Artificial Sequence
  derived and/or modified sequence
atgcccggctgcccctgccccggctgcggcatggccggccccagactgctgttcctgaccgccctggccctggagctgctggagagagccggcggcagccagcccgccctgagaagcagaggcaccgccaccgcctgcagactggacaacaaggagagcgagagctggggcgccctgctgagcggcgagagactggacacctggatctgcagcctgctgggcagcctgatggtgggcctgagcggcgtgttccccctgctggtgatccccctggagatgggcaccatgctgagaagcgaggccggcgcctggagactgaagcagctgctgagcttcgccctgggcggcctgctgggcaacgtgttcctgcacctgctgcccgaggcctgggcctacacctgcagcgccagccccggcggcgagggccagagcctgcagcagcagcagcagctgggcctgtgggtgatcgccggcatcctgaccttcctggccctggagaagatgttcctggacagcaaggaggagggcaccagccaggcccccaacaaggaccccaccgccgccgccgccgccctgaacggcggccactgcctggcccagcccgccgccgagcccggcctgggcgccgtggtgagaagcatcaaggtgagcggctacctgaacctgctggccaacaccatcgacaacttcacccacggcctggccgtggccgccagcttcctggtgagcaagaagatcggcctgctgaccaccatggccatcctgctgcacgagatcccccacgaggtgggcgacttcgccatcctgctgagagccggcttcgacagatggagcgccgccaagctgcagctgagcaccgccctgggcggcctgctgggcgccggcttcgccatctgcacccagagccccaagggcgtggaggagaccgccgcctgggtgctgcccttcaccagcggcggcttcctgtacatcgccctggtgaacgtgctgcccgacctgctggaggaggaggacccctggagaagcctgcagcagctgctgctgctgtgcgccggcatcgtggtgatggtgctgttcagcctgttcgtggactag

SEQ ID NO: 242830 - protein, 215 aa, Artificial Sequence
  derived and/or modified sequence
MEKNPPDDTGPVHVPLGHIVANEKWRGSQLAQEMQGKIKLIFEDGLTPDFYLSNRCCILYVTEADLVAGNGYRKRLVRVRNSNNLKGIVVVEKTRMSEQYFPALQKFTVLDLGMVLLPVASQMEASCLVIQLVQEQTKEPSKNPLLGKKRALLLSEPSLLRTVQQIPGVGKVKAPLLLQKFPSIQQLSNASIGELEQVVGQAVAQQIHAFFTQPR

SEQ ID NO: 242831 - DNA, 648 bp, Artificial Sequence
  derived and/or modified sequence
atggagaaaaatcctcccgacgatacagggcccgtacatgtgcctttaggtcacattgtagccaacgagaagtggaggggcagccagctggcacaggaaatgcaggggaagataaaactcatctttgaagacgggctgacaccggacttttacctcagcaatcgttgttgcattctctacgtcaccgaagccgaccttgtggccggcaatgggtatagaaagagactggttcgcgtgcggaatagcaacaatctgaaagggatagtcgttgtcgaaaagacgcgaatgagtgaacagtattttcccgccctccagaagttcacagtgctggatttaggaatggttctgctgcctgtggcctctcagatggaagcttcctgccttgtcatccagctcgtccaggaacagactaaggagcctagcaaaaatccgctgctaggaaaaaagcgggcacttcttctgtccgaaccaagcctgttgaggacggtgcagcaaatccctggtgtggggaaggttaaggccccattattactgcagaaatttccttctatccaacagttgagtaatgcctccatcggcgaacttgagcaggtcgtaggccaggctgttgctcaacagattcacgccttcttcacccagcctcgctag

SEQ ID NO: 242832 - DNA, 648 bp, Artificial Sequence
  derived and/or modified sequence
atggagaagaaccctccagacgacactggtccagtccatgtgccccttggacacatcgtggcaaatgaaaagtggaggggaagtcagttggcccaggagatgcagggtaaaatcaaactgatattcgaggacgggctgacgccggatttttatctctccaataggtgctgcattctctatgtgactgaggctgacctggtggccggtaacggttaccggaagcggctggtgagggtgcgcaatagcaacaacctcaagggtattgtggtggtggagaagacacggatgtccgagcagtacttcccggccctgcaaaagtttacagtgttggacctggggatggtgctgctccctgtggcctctcagatggaggcaagttgtctcgtgatccagctcgtgcaagagcagacgaaagaaccctcgaagaatccattgttaggtaagaagagggctctgctactgagcgaaccttctctcctgagaacggtgcaacaaatccctggagttggaaaagtcaaagccccgctgctcctccaaaagttccctagcatccagcaactcagtaacgcgtctatcggcgagctggagcaagtggtgggccaggctgtagcccaacaaatccacgcatttttcacacagccaagatag

SEQ ID NO: 242833 - DNA, 648 bp, Artificial Sequence
  derived and/or modified sequence
atggagaagaaccccccagatgacaccggccctgtgcacgtgcccctgggccacatcgtggccaatgagaagtggaggggcagccagctggcccaggagatgcagggcaagatcaagctgatctttgaagatggcctgaccccagacttctacctgagcaaccgctgctgcatcctgtatgtgacagaggccgacctggtggccggaaatggctacaggaagaggctggtgcgggtgaggaacagcaacaacctgaagggcatcgtggtggtggagaagaccaggatgtctgagcagtacttccctgccctgcagaagttcaccgtgctggacctgggcatggtgctgctgcctgtggccagccagatggaggccagctgcctggtgatccagctggtgcaggagcagaccaaggagcccagcaagaaccccctgctgggcaagaagagggccctgctgctgtctgagcccagcctgctgaggacagtgcagcagatccctggggtgggcaaggtgaaggcccccctgctgctgcagaagttccccagcatccagcagctgagcaatgccagcatcggggagctggagcaggtggtgggccaggccgtggcccagcagatccacgccttcttcacccagcccaggtag

SEQ ID NO: 242834 - DNA, 648 bp, Artificial Sequence
  derived and/or modified sequence
atggagaagaacccccccgacgacaccggccccgtgcacgtgcccttgggacacattgtggctaacgaaaagtggaggggtagccagctggcccaggaaatgcaggggaaaattaaactgatcttcgaagatggattgacacccgacttctacttaagcaacaggtgttgtattttatatgtcaccgaggccgacctcgtcgcaggaaatggctaccgcaagcgactggtgcgagtaaggaatagtaacaacctcaagggaatcgtggtggtagagaagacacggatgtccgagcaatatttccccgccctccagaagttcaccgtactcgatctcgggatggtgctgctgccagtggccagccagatggaggcctcatgtctggtgattcagctcgttcaggagcaaaccaaagagccaagcaagaacccactgctgggaaagaaaagggcactgttgctgagcgagcccagtctgttacggacagtgcaacaaatacccggcgtgggtaaagttaaagcacccctgctgctacaaaagttcccaagtatccagcagttgagtaatgcatctatcggtgagctggaacaagtcgtcggacaggctgtggcccaacagatccacgcttttttcacacagccaaggtag

SEQ ID NO: 242835 - DNA, 648 bp, Artificial Sequence
  derived and/or modified sequence
atggagaagaacccccccgacgacaccggccccgtgcacgtgcccctcggccatatcgtggccaacgaaaaatggaggggcagtcagctggcacaagagatgcaaggtaaaattaaattaatatttgaggatggattgactcccgatttttacctgtctaatagatgttgcattctgtacgtgacagaagctgatctcgtcgccggcaacggctatcgaaaacggctggtgagggtacggaatagcaataaccttaagggcatagtcgttgttgaaaaaaccaggatgagcgagcaatatttcccggcactacagaaattcacagtgctcgatctgggaatggtgctgttgcccgtggcttcccagatggaggccagctgtttggtgattcagctggtccaggagcagaccaaggagccttcaaaaaacccactgttaggtaaaaaacgggctctcttgcttagcgaacctagcctgctgcgaacagttcagcagattccaggcgtgggcaaagtgaaggctcccctacttcttcagaaatttccctccatccagcagcttagtaatgcctctattggcgagcttgagcaggtcgtcggacaggcagtggctcaacaaattcatgcatttttcacccaaccccgctag

SEQ ID NO: 242836 - DNA, 648 bp, Artificial Sequence
  derived and/or modified sequence
atggaaaaaaaccctcctgacgacactggccctgtccacgtgccccttgggcacattgtcgccaacgaaaagtggagaggcagtcagctggcccaagagatgcaaggaaagataaaactcattttcgaagatgggctcacacctgatttctatctgtccaaccgctgttgtattctctacgtgaccgaagccgacctggttgctggtaacggttatcgaaaacgactcgtgcgcgttaggaactccaataatctcaaaggcattgtcgtagtcgaaaagacccgtatgtccgagcagtattttcccgctcttcagaaattcacagtgctcgatcttggtatggtcttgcttcctgtcgcatctcaaatggaggccagttgcttggtgatacagctggtgcaggagcaaacaaaagagccttcgaagaacccactgttaggaaagaaacgggctcttctgctttcagaaccgtccctgctgcgcaccgtccagcaaattcctggcgtcggaaaagtaaaggccccacttctgctgcaaaaattccccagcattcagcagttgagcaatgccagtattggcgagctggaacaggttgtgggccaggctgtcgctcaacaaatccatgccttcttcacgcagcctcggtag

SEQ ID NO: 242837 - DNA, 648 bp, Artificial Sequence
  derived and/or modified sequence
atggagaagaatcctccagatgacacagggccagtgcacgtcccactcggacacattgtagctaacgagaagtggcgtggatctcaactggcccaggagatgcagggaaaaataaagctgatttttgaggacggactaaccccagacttctacctctccaaccgttgttgtattctttatgtcacagaggccgacttggtcgccggtaatggatatcgtaagcgtctagtcagagtaagaaattcaaataacctaaaaggcatcgtcgtcgtggagaaaacacgcatgagcgagcagtactttccagctcttcagaagttcactgtcttggacctgggcatggtgctgctcccagtcgcgtctcagatggaagcatcttgtctggtcattcagctagtgcaggagcagacaaaagagccaagcaagaaccctctactgggtaaaaagagagcccttcttctgagcgaaccaagtctcctgaggactgtgcagcaaatacccggagtgggaaaagtgaaagcgccactgcttttgcagaagtttccttctattcaacagctgtccaatgcaagcatcggagaactggagcaggtcgtggggcaagcagtggctcagcagatccacgccttctttacacagcctagatag

SEQ ID NO: 242838 - DNA, 1124 bp, Artificial Sequence
  derived and/or modified sequence
gtgaacccggaaggtggcgcggccaccagtaacatgatctctagactgggacggtggggttcctgccggctgtattcgggccttggactggactgagaagctacggtggagaccatccatggaaaagaacccccctgatgatacgggccccgtgcacgtgcctttggggcatattgtggccaatgagaaatggcgcgggtcacagctggcgcaggagatgcaagggaaaattaagctcattttcgaggatggcttgacaccagacttttatctgtcgaacagatgctgcattctttatgtcaccgaagctgatttggtggcaggaaatggctacagaaagaggcttgttcgggttagaaattccaataatcttaaaggaattgtagtcgttgaaaaaacccggatgagtgaacaatacttcccagccctacagaagtttactgtgctggaccttggaatggtgctgcttccagtggccagccagatggaagcatcctgcctcgtcatccagttggttcaagagcaaaccaaagagcccagtaagaaccctcttctcgggaagaaacgggccctgctgctgtctgagccttcgctccttcgaaccgtgcagcagatcccaggagttggaaaagttaaagctccccttctcctccagaagtttccaagcatccagcaactgagtaatgcttccattggggaactggagcaggtggtcggacaagcagtggcacagcagatccatgccttcttcacgcagcccaggtgagggctggcctcagggccacggcatcttctcctgagaccacaaacaccaggatcttgttttcagctttaaaaaccaagagaatgggccgggtgcactggctcacgcctctaatctcagcactttgggaggccgaagacagcggatcatctgaggtcaggagttcaagaccagcctggccaacatggagaaacccctaaaaataggaacaattagccaggcatggtgacaggtgcctgtaatcccagctacttgggaggccgaggcatgagaatcacttgaacccgggaggcggaggttgcagtgagctgagatcgtgccactgcactccagcctgggcaccagagcgagactccgtctc

SEQ ID NO: 242839 - DNA, 2298 bp, Artificial Sequence
  derived and/or modified sequence
ggaaggtggcgcggccaccagtaacatgatctctagactgggacggtggggttcctgccggctgtattcgggccttggactggactgagaagctacggtggagaccatccatggaaaagaacccccctgatgatacgggccccgtgcacgtgcctttggggcatattgtggccaatgagaaatggcgcgggtcacagctggcgcaggagatgcaagggaaaattaagctcattttcgaggatggcttgacaccagacttttatctgtcgaacagatgctgcattctttatgtcaccgaagctgatttggtggcaggaaatggctacagaaagaggcttgttcgggttagaaattccaataatcttaaaggaattgtagtcgttgaaaaaacccggatgagtgaacaatacttcccagccctacagaagtttactgtgctggaccttggaatggtgctgcttccagtggccagccagatggaagcatcctgcctcgtcatccagttggttcaagagcaaaccaaagagcccagtaagaaccctcttctcgggaagaaacgggccctgctgctgtctgagccttcgctccttcgaaccgtgcagcagatcccaggagttggaaaagttaaagctccccttctcctccagaagtttccaagcatccagcaactgagtaatgcttccattggggaactggagcaggtggtcggacaagcagtggcacagcagatccatgccttcttcacgcagcccaggtgagggctggcctcagggccacggcatcttctcctgagaccacaaacaccaggatcttgttttcagctttaaaaaccaagagaatgggccgggtgcactggctcacgcctctaatctcagcactttgggaggccgaagacagcggatcatctgaggtcaggagttcaagaccagcctggccaacatggagaaacccctaaaaataggaacaattagccaggcatggtgacaggtgcctgtaatcccagctacttgggaggccgaggcatgagaatcacttgaacccgggaggcggaggttgcagtgagctgagatcgtgccactgcactccagcctgggcaccagagcgagactccgtctcaaagaaaacaacaaaaaaaaaaaaaaaagaaaaaggattttctccagcagcaaccagtgaaagatgaggcgaggcttgaatggagcccgtgggtcgtcctgccttagcgtctgagttcagcttgtgaagttagtgggccgcagagggcactgccttcattctgctaagacgaaaagggctggtgggatcttcgcaagagagtcagggactcacactcagcaaaaagcattagggccgattttaatgtgcgaccttgacctgcatctgtcatggaaagtgccttctaaaaagcttcagtggtggatgtgaccatctgaaggaaacaaatgtacaaggaagcactgtgtatcctaagccctgggttcccagagtttcacctgctgttcatcaggtctggccttcatatacccgtactgcgagggctgtttccaatgtaaataaataactgcgcaacagttccttcctcctttcctttgttcctccctccccccggcctttttttttggcagatgtacagtttgtttataatcactgcatatgtcttctgcacacagaaagtatgaagtctgaagttcccacttaaagttgaaaactcaacggccgggcatagtggctcacacctgtaatcccagcactttgggaggccaaggggggtgaatcacaaggtcaggagatccagaccatcctggccgacatggtgaagccctgtctctactaaaaatacaaaaattagctgggtgtggtggcacacacctgtaatcccaactactcaggagactgaggcacgagaatcgcttgaacccaggaggtggaggttgcaatgggccgagattgcaccactgcactccagcctggatgacagagtgagactccatctcaaaaaaaaaaaaaaaaaatttaaagttgaaaactcaacatgcatgaggcagaacaggctgtgtttgtatatgaaaggcccaacaatggaaggatacaagaaaatgatggcagcagctgcatctagtgagggaagcaggggctggggatcaaaaggtacaaattgcccattcaaaaaatagacacaggccaggcacagtggctcacacctgtagtcccagcactttgggaggctgaggtgggaggattgcttgagtccaggatttcgagatcagcctgggcaacatggcaagaccccatctctac

SEQ ID NO: 242840 - DNA, 648 bp, Artificial Sequence
  derived and/or modified sequence
atggagaagaacccccccgacgacaccggccccgtgcacgtgcccctgggccacatcgtggccaacgagaagtggagaggcagccagctggcccaggagatgcagggcaagatcaagctgatcttcgaggacggcctgacccccgacttctacctgagcaacagatgctgcatcctgtacgtgaccgaggccgacctggtggccggcaacggctacagaaagagactggtgagagtgagaaacagcaacaacctgaagggcatcgtggtggtggagaagaccagaatgagcgagcagtacttccccgccctgcagaagttcaccgtgctggacctgggcatggtgctgctgcccgtggccagccagatggaggccagctgcctggtgatccagctggtgcaggagcagaccaaggagcccagcaagaaccccctgctgggcaagaagagagccctgctgctgagcgagcccagcctgctgagaaccgtgcagcagatccccggcgtgggcaaggtgaaggcccccctgctgctgcagaagttccccagcatccagcagctgagcaacgccagcatcggcgagctggagcaggtggtgggccaggccgtggcccagcagatccacgccttcttcacccagcccagatag

SEQ ID NO: 242841 - protein, 773 aa, Artificial Sequence
  derived and/or modified sequence
MSSPAVARTSPGGSREMAPAPQGRGRFWEVGGGSGHRLERAAAESERWELLLRRGELLALGGHLKGALEAFAAALRRGAPARPECLGALVDCLVFNYRLRHGLGWSAAPVAGADGGAGGLLRCLGCRGFLSEPVTVPCGHSYCRRCLRRELRARCRLCRDRLPPATASATDAEGTAPRPPPLAAAIAASDFRTSVVLNHLAEKWFPGQRERARAAGRLGELLHQGRYREALAAACEALRAEPSDLIVKIYRAESYAGLQEFKAAIEDLNAVLFQLPDWPEVYFRKGKVLCDAGFLGDALQLFLQCLALDEDFAPAKLQVQKILCDLLLPENLKEGLKESSWSSLPCTKNRPFDFHSVMEESQSLNEPSPKQSEEIPEVTSEPVKGSLNRAQSAQSINSTEMPAREDCLKRVSSEPVLSVQEKGVLLKRKLSLLEQDVIVNEDGRNKLKKQGETPNEVCMFSLAYGDIPEELIDVSDFECSLCMRLFFEPVTTPCGHSFCKNCLERCLDHAPYCPLCKESLKEYLADRRYCVTQLLEELIVKYLPDELSERKKIYDEETAELSHLTKNVPIFVCTMAYPTVPCPLHVFEPRYRLMIRRSIQTGTKQFGMCVSDTQNSFADYGCMLQIRNVHFLPDGRSVVDTVGGKRFRVLKRGMKDGYCTADIEYLEDVKVENEDEIKNLRELHDLVYSQACSWFQNLRDRFRSQILQHFGSMPEREENLQAAPNGPAWCWWLLAVLPVDPRYQLSVLSMKSLKERLTKIQHILTYFSRDQSK

SEQ ID NO: 242842 - DNA, 2322 bp, Artificial Sequence
  derived and/or modified sequence
atgagcagccccgccgtggccagaaccagccccggcggcagcagagagatggcccccgccccccagggcagaggcagattctgggaggtgggcggcggcagcggccacagactggagagagccgccgccgagagcgagagatgggagctgctgctgagaagaggcgagctgctggccctgggcggccacctgaagggcgccctggaggccttcgccgccgccctgagaagaggcgcccccgccagacccgagtgcctgggcgccctggtggactgcctggtgttcaactacagactgagacacggcctgggctggagcgccgcccccgtggccggcgccgacggcggcgccggcggcctgctgagatgcctgggctgcagaggcttcctgagcgagcccgtgaccgtgccctgcggccacagctactgcagaagatgcctgagaagagagctgagagccagatgcagactgtgcagagacagactgccccccgccaccgccagcgccaccgacgccgagggcaccgcccccagacccccccccctggccgccgccatcgccgccagcgacttcagaaccagcgtggtgctgaaccacctggccgagaagtggttccccggccagagagagagagccagagccgccggcagactgggcgagctgctgcaccagggcagatacagagaggccctggccgccgcctgcgaggccctgagagccgagcccagcgacctgatcgtgaagatctacagagccgagagctacgccggcctgcaggagttcaaggccgccatcgaggacctgaacgccgtgctgttccagctgcccgactggcccgaggtgtacttcagaaagggcaaggtgctgtgcgacgccggcttcctgggcgacgccctgcagctgttcctgcagtgcctggccctggacgaggacttcgcccccgccaagctgcaggtgcagaagatcctgtgcgacctgctgctgcccgagaacctgaaggagggcctgaaggagagcagctggagcagcctgccctgcaccaagaacagacccttcgacttccacagcgtgatggaggagagccagagcctgaacgagcccagccccaagcagagcgaggagatccccgaggtgaccagcgagcccgtgaagggcagcctgaacagagcccagagcgcccagagcatcaacagcaccgagatgcccgccagagaggactgcctgaagagagtgagcagcgagcccgtgctgagcgtgcaggagaagggcgtgctgctgaagagaaagctgagcctgctggagcaggacgtgatcgtgaacgaggacggcagaaacaagctgaagaagcagggcgagacccccaacgaggtgtgcatgttcagcctggcctacggcgacatccccgaggagctgatcgacgtgagcgacttcgagtgcagcctgtgcatgagactgttcttcgagcccgtgaccaccccctgcggccacagcttctgcaagaactgcctggagagatgcctggaccacgccccctactgccccctgtgcaaggagagcctgaaggagtacctggccgacagaagatactgcgtgacccagctgctggaggagctgatcgtgaagtacctgcccgacgagctgagcgagagaaagaagatctacgacgaggagaccgccgagctgagccacctgaccaagaacgtgcccatcttcgtgtgcaccatggcctaccccaccgtgccctgccccctgcacgtgttcgagcccagatacagactgatgatcagaagaagcatccagaccggcaccaagcagttcggcatgtgcgtgagcgacacccagaacagcttcgccgactacggctgcatgctgcagatcagaaacgtgcacttcctgcccgacggcagaagcgtggtggacaccgtgggcggcaagagattcagagtgctgaagagaggcatgaaggacggctactgcaccgccgacatcgagtacctggaggacgtgaaggtggagaacgaggacgagatcaagaacctgagagagctgcacgacctggtgtacagccaggcctgcagctggttccagaacctgagagacagattcagaagccagatcctgcagcacttcggcagcatgcccgagagagaggagaacctgcaggccgcccccaacggccccgcctggtgctggtggctgctggccgtgctgcccgtggaccccagataccagctgagcgtgctgagcatgaagagcctgaaggagagactgaccaagatccagcacatcctgacctacttcagcagagaccagagcaagtag

SEQ ID NO: 242843 - DNA, 2322 bp, Artificial Sequence
  derived and/or modified sequence
atgtctagccccgcagtggccagaacctcccctggtggcagcagagagatggcccctgccccccagggccgggggagattctgggaagtgggtggagggtctggacacaggttggaacgcgccgccgccgaatccgagaggtgggagcttctcctgagaaggggggaactcttagccctcggcggccatctaaagggtgctcttgaggccttcgccgctgcattaaggagaggcgccccggccagacccgaatgcttgggcgcactggtggattgtctcgtgttcaattaccgccttaggcatggattaggttggagtgccgctccagtggccggcgcagacggcggcgcaggtggtctcttgaggtgtctagggtgccgagggtttcttagtgagcctgtgaccgtgccctgcggtcactcatactgccgacgctgtctgaggagggagctcagagcgcgctgcagactgtgccgggatagactgccacccgcaaccgcctccgccaccgatgccgaaggcactgccccgcggccaccacctctggccgccgccatagcagcatccgactttcgcacgtcggttgtcttgaaccacctggctgagaaatggtttcctggccaacgtgagcgagcacgggctgcgggccggcttggcgagctactgcaccagggtaggtacagagaagctctcgccgccgcgtgtgaagccctgcgcgcagagcctagcgatctgatagttaagatttaccgtgccgaaagttacgcaggtctacaggagtttaaggcggcgatcgaagatttaaacgccgtacttttccagcttcccgactggccagaggtctatttccgcaaggggaaggtcctgtgcgatgcgggctttctgggagatgcattgcagttgttcctccaatgcctcgccttggacgaagattttgcgccggctaagctgcaggtgcaaaagatcttgtgtgacctgctgctgcccgaaaacctcaaggagggactcaaagaaagtagttggtccagtcttccctgcacaaaaaatagaccctttgactttcactcggtcatggaagagtctcaatccctgaatgaacccagccctaaacaatcagaagagattcctgaggtcacttcggaacccgtaaagggcagtctgaatcgtgcgcaaagtgctcaatccattaactcgacagaaatgcccgctcgcgaagattgtctgaagcgggtgtcttctgagcctgttttgtcggtccaggaaaaaggggttctgttgaagcgtaaactctcgctcttagagcaggatgtgatcgtaaacgaagatggcagaaacaaacttaagaagcagggagagacgccaaacgaggtttgcatgttcagcttagcctacggggatatacccgaagagctgatcgatgtatctgattttgagtgtagtctttgcatgcggttgttttttgagcccgtgaccacgccctgcggccactcattctgcaagaactgcctggagaggtgtctggaccacgctccttactgccctctgtgcaaggagagcctcaaagagtatctagccgacaggcgatactgtgtgactcagcttctcgaggagctgattgtgaagtacctacccgatgagctttccgaaaggaaaaaaatttacgatgaagaaactgccgaattgtcccacctaaccaaaaacgtgcccatcttcgtctgcactatggcctacccaacagtgccttgtcccctacacgtcttcgagccccgatacagactgatgatcaggaggtctatccagactggcactaaacaatttggaatgtgcgtgtctgacacgcagaattcttttgcggattatggctgcatgctgcaaataagaaatgtacacttcctgcctgacggcaggtcggtcgtagacacagtgggcggcaagcggtttcgcgtcttaaagcgtggaatgaaggatggttactgcaccgctgatattgagtatctagaagacgttaaagtggaaaatgaggacgaaattaagaacttgcgcgagctccatgatctcgtgtactcgcaggcgtgctcttggtttcagaatctgagagatcgattccggtcccagattctccagcacttcggaagtatgcccgagagggaagagaatctgcaagccgctcctaatggccccgcctggtgctggtggctcctggcggtcctccccgtggatccccggtaccagctgagcgttttaagcatgaaaagcctgaaagaacggctgacgaaaatacagcacattctgacatatttttctagggatcagagtaaatag

SEQ ID NO: 242844 - DNA, 2322 bp, Artificial Sequence
  derived and/or modified sequence
atgagcagccctgctgtggcccggaccagccctgggggcagccgggagatggccccagccccccagggccggggccgcttctgggaggtgggcggcggcagcggccaccggctggagagagctgctgctgagagcgagcgctgggagctgctgctgcggcggggggagctgctggccctgggcggccacctgaagggggccctggaggcctttgctgctgccctgcggcggggggccccagcccggcctgagtgcctgggcgccctggtggactgcctggtgttcaactaccgcctgcggcacggcctgggctggagcgctgcccctgtggccggggctgatggaggagctgggggcctgctgcgctgcctgggctgccggggcttcctgtctgagcctgtgacagtgccctgtggccacagctactgccgccgctgcctgcggcgggagctgcgggcccgctgccgcctgtgccgggaccggctgcccccagccacagccagcgccacagatgctgagggcacagccccccggcccccacccctggccgccgccatcgccgccagtgacttccgcacctctgtggtgctgaaccacctggccgagaagtggttccctggccagcgggagcgggcccgggctgctggccgcctgggggagctgctgcaccagggccgctaccgggaggccctggccgccgcctgtgaggccctgcgggcagagcccagcgacctgattgtgaagatctacagagctgagagctatgccggcctgcaggagttcaaggccgccatcgaggacctgaatgctgtgctcttccagctgcctgactggccagaggtgtacttcaggaagggcaaggtgctgtgtgatgctggcttcctgggagatgccctgcagctgttcctgcagtgcctggccctggatgaggactttgccccagccaagctgcaggtgcagaagatcctgtgtgacctgctgctgcctgagaacctgaaggagggcctgaaggagagctcctggagcagcctgccctgcaccaagaaccggccctttgacttccacagcgtgatggaggagagccagagcctgaatgagcccagccccaagcagagcgaggagatccctgaggtgaccagcgagcctgtgaagggcagcctgaacagagcccagagcgcccagagcatcaacagcacagagatgcctgcccgggaggactgcctgaagagggtgtcctctgagcctgtgctgtctgtgcaggagaagggcgtgctgctgaagaggaagctgagcctgctggagcaggacgtcatcgtgaatgaagatggcaggaacaagctgaagaagcagggcgagaccccaaatgaggtgtgcatgttcagcctggcctacggggacatccctgaggagctgattgatgtgtctgactttgagtgcagcctgtgcatgaggctcttctttgagcctgtgaccaccccctgtggccacagcttctgcaagaactgcctggagcgctgcctggaccacgccccctactgccccctgtgcaaggagagcctgaaggagtacctggccgaccggcgctactgtgtgacccagctgctggaggagctgattgtgaagtacctgcctgatgagctgtctgagaggaagaagatctatgatgaggagacagctgagctgagccacctgaccaagaatgtgcccatctttgtgtgcaccatggcctaccccaccgtgccctgccccctgcacgtgtttgagccccgctaccgcctgatgatccgccgcagcatccagacaggcaccaagcagtttggcatgtgtgtgtctgacacccagaacagctttgctgactatggctgcatgctgcagatcagaaatgtgcacttcctgcctgatggccgctctgtggtggacacagtgggcggcaagcgcttccgggtgctgaagaggggcatgaaggatggctactgcacagctgacatcgagtacctggaggatgtgaaggtggagaatgaagatgagatcaagaacctgcgggagctgcatgacctggtgtacagccaggcctgctcctggttccagaacctgcgggaccgcttccgcagccagatcctgcagcacttcggctccatgcctgagcgggaggagaacctgcaggccgccccaaatggacctgcctggtgctggtggctgctggccgtgctgcctgtggacccccgctaccagctgtctgtgctgtccatgaagagcctgaaggagcggctgaccaagatccagcacatcctgacctacttcagccgggaccagagcaagtag

SEQ ID NO: 242845 - DNA, 3594 bp, Artificial Sequence
  derived and/or modified sequence
gcggagccgcgcgcccgggaggctccgggaccgtggcggcgggcggcggcggcgcagccctccgcgggccatgtcctctccggcggtggcgaggacctccccaggagggagtcgggagatggccccagcgccgcagggccgaggccggttctgggaagtgggcggcggcagcggccatcggctggagcgcgcggccgcggagtcggagcgctgggagctgctgctccgccgcggggagctgctggcgctgggcggccacctgaagggcgcgctggaggcgttcgcggcggcgctgcgccgcggggccccggccaggcccgagtgcctgggcgccctggtggactgcctggtgttcaactaccggctccgccacgggctgggctggagcgcggccccggttgcaggcgctgacggcggcgccggcgggctcctcagatgcctgggctgccggggcttcctgagcgagccggtgaccgtgccctgtggccacagctactgccgccgctgcctgcggagggaactccgcgcccgctgccgcctctgccgggaccggctgccgcccgccaccgccagtgccactgatgctgaagggaccgccccgcggccgccgcctctggccgccgccatcgccgcttcagacttcagaaccagcgtcgtcctcaaccacctggccgagaagtggtttccgggccagcgcgagcgggcccgggcggccggcaggctcggggagctactgcaccaggggcgctaccgggaggccctggccgccgcctgcgaggcgctgcgagcagaacccagtgacttgattgtaaaaatttacagagcggaatcatatgctggtctccaagagtttaaagcagccatagaagatttaaatgcagttctttttcaacttccagattggcctgaggtctacttcaggaaaggaaaagtactctgcgatgctggttttttaggtgatgccttacaactctttcttcagtgcttagcccttgatgaagattttgcacctgcaaagctgcaagtacaaaagattttatgtgatttattattacctgaaaacttaaaagaaggcctgaaggaatcttcctggagttcattaccatgtactaaaaacagaccttttgattttcattcagtgatggaagagtctcagtctctcaatgaacctagcccaaagcagagtgaagaaataccagaggtcacttcagagcctgtcaaaggaagcttaaaccgtgctcagtcagcacagtctataaattcaacagaaatgcctgccagagaggactgtttaaaaagagtgtcctcagaacctgttctgtcagttcaagaaaaaggtgttctgctgaaaagaaagttgtctcttttagaacaggatgtgattgtaaatgaagatggaagaaataagctgaaaaaacaaggagaaactcccaatgaagtctgtatgttttccttagcttatggtgatattccagaagaattaatcgatgtctcagatttcgagtgttctctctgcatgaggttgttttttgagccagtaacaaccccttgcggacattcgttctgtaagaattgtcttgagcgttgtttagatcatgcaccatattgtcctctttgcaaagaaagcttaaaagagtatctagcagataggaggtactgtgtcacacagctgttggaagaattaatagtgaagtatctgcctgatgaactgtctgagagaaaaaaaatatatgatgaagaaactgctgaactctcacacttgaccaagaatgttccaatatttgtttgcactatggcctaccccactgtgccttgccctctccatgtatttgagccaagatacagattgatgattcgaagaagtatacagactggaaccaaacagtttggcatgtgtgtcagtgatacacaaaatagttttgcagattatggttgtatgttacaaattagaaacgtgcatttcttaccggacggaaggtctgtggttgatacagttggaggaaagcggtttagggttttaaaaagaggaatgaaagatggatattgcactgccgacattgaatatctggaagatgttaaggttgagaatgaagatgagattaagaatctcagagagcttcatgatttggtttactctcaagcctgcagctggtttcagaatttaagagacagatttcgaagccaaattcttcagcatttcggatcaatgcccgagagggaggaaaaccttcaggcagcccctaatggacctgcatggtgttggtggcttcttgcagttctccctgtagacccacgataccagctgtcggttttgtcaatgaagtctttgaaagaacggttgaccaagatacagcatatactgacctatttttctagagaccaatctaagtaactaactctttggatctccctttaaagtgaccctaatctggctgcattgatggccagattgtctgctgcctttgcacatctagtgctggtttcagaaatttaatgaaacttttctttttccttcgacctcctgaatcatgtggttctgcaaatgaataccttcaactaggatttagaccactaagaacttgcacagaaaaacacgcattgaatgtgtgtcgaacctctacattgtgaagttgcactatgtaccatactctaaaatgaaataagaactctttatgtctgtgagagagtgtgtgtgtgtgtgtgcgtgcgtgtgtgcttgtgggggttgggtagtgtgtgtgtattttctctggctttaaaattttaaaacaaacaaacaaaaaagccatagagagcagaacttgccgagggtcatttattgcccaagtttacaagagtagcgatacaagtttttgcaaattgaatttgcctcagatatatctgtcctaatgcttatatttgcacaagtatgtaaaatatcgtgttgaggatcattctttgttggaaacactgctcttgctgaactgtcttgaccattgactatgacacagtttcttatttatgtaaatacttgcatcacagtggccgacaggcattggatgcagaacctagagccagttttcaggaacaattgtaaacctgacatggtactgtgcatctattcataaaacactcaaaactgtgaaaatatggtttacatttaattgtacataaaggtaaagggagaactcaattcagtaccagttagtttgtacattttagggggcttttcacattaactgcccatttgtgtaatttatagtttgacatgatgtgtttgttttaaaaaaaaatgcatagtataaacccattaaggatctgggaaaagagaagaagtttaatatagaactaagcttttaaagtttgtttttgtttttaattctggtctcggtgcaaatgttagttatgccttattcatatcacagttagatcaccatgctgcaacatggtttatattcatgctgccctagaaacttttgtaattatttgttgcaaatttgtgactgtccttattaactttcttttatgtaagtaatttgtaaaagtttcttaaaatttttgcttttgcttatttaattttgaataaaagctaaattcctaatactttttcttaaa

SEQ ID NO: 242846 - DNA, 2322 bp, Artificial Sequence
  derived and/or modified sequence
atgagcagccccgccgtggcccggaccagccccggcggcagccgggagatggctcctgccccccaagggcgagggcgtttttgggaagttgggggcggcagtggacataggctggagagggccgccgccgagagcgaaaggtgggaactgctactacgccgcggtgaacttctagccctgggcggtcaccttaaaggcgccctggaggcgtttgccgctgctctcagacgtggggccccggccagacctgagtgccttggcgctcttgtcgattgcctggtctttaactaccggctccgacacggactgggatggagcgccgccccggtcgccggggccgacgggggcgccgggggcctcttacgctgcctgggctgccggggctttctttctgagcccgtgaccgtcccctgcggacactcgtattgccgccgttgtctccgccgggagctcagagcgcgctgtagactgtgcagagatcggctcccacccgcaactgcgagtgctactgacgcggaaggaacggccccccggcccccgccccttgccgccgcaatagctgccagtgacttccgtacatcagtcgtgctgaatcatctggccgagaaatggttccccggccagcgggagagagccagagctgctggcaggctcggtgagttgctgcaccaaggacgctatcgtgaggctctggcagcagcttgtgaagcactaagagccgagccctccgacctaattgtcaagatttaccgggcggaaagctatgccggactacaggaatttaaggctgcaattgaggaccttaacgcagtgctcttccagctgcccgattggcccgaggtttacttccgcaaggggaaggtcctgtgtgacgctggctttcttggcgatgctttgcaattgttcttacagtgtctggcgctggatgaggactttgctcccgccaaactgcaagtgcagaaaatcctctgcgacttgctcctccctgaaaatttaaaagaagggctgaaagagtcatcctggagctctctgccgtgcactaagaatcggccctttgactttcacagcgtgatggaggagagtcagtccctcaacgagccctctccaaaacagtcagaagagatacccgaagtcacatctgagccagtgaaaggaagtctgaatcgggcgcaaagcgcccaaagcataaattctaccgagatgcctgccagagaggactgcctgaagcgcgtctcgtccgaaccagtgctgagcgttcaagaaaagggggtgctgttgaaacgaaagctgagtcttctggagcaagacgtgattgtgaacgaagacggtcggaacaagctgaagaagcagggcgagactccaaatgaggtgtgtatgttttcattagcctacggcgacattcctgaggaacttattgacgtttctgattttgagtgcagtctctgtatgcggcttttcttcgagcccgtcacaactccttgcggtcacagcttctgcaaaaactgtctcgagagatgcctagaccatgctccatattgtccgctctgtaaggagtccctgaaagaatatttggcagaccggcgctactgcgtgacccagctcttggaagaactcatcgtgaagtacctgcctgacgagctgtcggaaagaaagaaaatttacgacgaggaaaccgccgagttgtcccatctcactaagaacgtccccatattcgtgtgcacgatggcctatccaacagtgccatgccctcttcacgtattcgaaccaaggtaccggctgatgattagacggagtatccagacaggcacgaaacagttcggcatgtgcgtgagtgatacccagaacagcttcgcggattatggctgtatgctgcagataagaaatgtgcactttctgcctgatggacgttctgttgtcgacaccgtgggcggtaagagattccgcgtgttaaagcgcggaatgaaggatggctactgcacagcggacatagaatatctcgaagatgtgaaggtcgagaatgaggatgagataaagaatctccgggaactccatgacctggtgtacagtcaggcgtgctcttggtttcagaacctcagagaccggttccggagccaaatcctacagcattttggatcaatgcctgaaagggaagaaaacctgcaggctgcccccaatggccctgcttggtgctggtggctactagctgtgctgccggtggacccccggtatcagctctccgtgctcagcatgaaatcactcaaagagaggctcaccaaaattcaacacattctgacctacttttcgcgggaccagtccaagtag

SEQ ID NO: 242847 - DNA, 2322 bp, Artificial Sequence
  derived and/or modified sequence
atgtcttcaccagcagtagctaggacttcacctgggggatcacgggagatggcccctgcaccccagggtagaggcaggttctgggaagtcggaggaggatctgggcataggcttgagcgtgccgcagctgaaagcgagcggtgggaactcctcctcagacggggagaacttctggctctggggggacaccttaaaggggcactcgaggcattcgccgcagctctcaggagaggtgcgcctgcccgtcctgagtgccttggcgcactagtcgattgcctcgtgtttaattatcgtctccgtcacggcctcggatggtctgcagcgcctgtcgccggtgccgatggcggtgccggtggcttactcagatgtttaggatgtagaggctttctctccgagccggtgaccgtcccctgcggtcattcatactgtcggaggtgcttgcgtagggagctgagggccaggtgtcgactctgccgcgaccggctgccaccggctaccgcctccgcaacagatgccgaggggactgcaccaagacccccaccactggcagccgctatcgccgcatccgacttccggacgtctgtcgtcctgaaccacctggctgagaagtggttcccaggacaacgagagagggccagagccgctgggcgactcggagaactgctccatcagggtagataccgagaggccctggccgcagcatgtgaagccctacgcgcagaaccaagtgacctcattgtgaaaatttatcgagcagagagctatgccggtcttcaggagtttaaagccgctatagaggacctgaacgccgtgctgtttcagcttcctgactggcctgaggtttacttcaggaagggcaaagtgctctgtgatgccggattcctgggcgacgccctccagctgtttttacaatgcctggcccttgacgaggattttgccccagctaagcttcaggttcagaaaatcctttgtgatctgctgttacccgagaacctaaaagaagggctcaaagagtcatcctggtcctccttaccctgtacaaagaaccgcccatttgatttccacagcgtaatggaggagtctcagagtcttaacgaacccagcccgaaacagagtgaggaaattccagaagtaacttctgagccggtcaaaggctcactgaatagagctcagtcagcgcaaagcatcaactctaccgagatgcccgctcgtgaagattgtcttaagagagtgagcagtgaaccagtactttcggtccaggagaagggcgtgttgctgaagcgcaagctcagcctgctggagcaggatgtcattgtaaacgaagacggcaggaacaaattaaagaaacagggagaaacgccgaacgaagtctgtatgttcagtctggcttacggtgacatccccgaggagttgatcgacgtgagcgacttcgagtgtagcttatgtatgaggctattctttgagcctgtgaccaccccatgtggccacagcttttgtaaaaactgtcttgaaagatgtctggaccacgctccgtactgcccactctgtaaagaaagcctcaaagagtatctcgcagatcgtaggtactgtgtcacccaattgctggaagagctgattgtgaagtacctcccagacgagctgtctgagaggaagaaaatatacgacgaagaaacagctgagttgtctcacttaaccaagaacgtccctatctttgtgtgcacaatggcttacccgaccgtgccttgccctctgcacgtttttgagcccaggtaccgcctgatgattcggagaagtattcagaccggaacgaaacagttcggcatgtgtgtttccgatactcaaaattctttcgccgactacggttgtatgcttcaaatccgcaatgtacactttctgccggatggtaggagcgtcgtggacaccgtagggggaaaaaggtttagagtgctgaagaggggtatgaaggacggctattgtacagccgacattgagtacttggaggatgtcaaggtcgagaacgaggacgagatcaagaatctgcgagaactccacgatctagtgtacagccaggcctgttcatggttccaaaacttgagggatcgattcaggagtcaaatcctgcagcacttcggctcgatgcctgaacgcgaggaaaacctgcaggcggcacctaatggacccgcttggtgctggtggctcctggctgtgctgccggttgaccctcgataccagctgagcgtgctctctatgaagagcctgaaggagcgcctaaccaagatccagcatatcctgacgtacttttcccgggaccagtctaagtag

SEQ ID NO: 242848 - protein, 248 aa, Artificial Sequence
  derived and/or modified sequence
MEAPEGGGGGPAARGPEGQPAPEARVHFRVARFIMEAGVKLGMRSIPIATACTIYHKFFCETNLDAYDPYLIAMSSIYLAGKVEEQHLRTRDIINVSNRYFNPSGEPLELDSRFWELRDSIVQCELLMLRVLRFQVSFQHPHKYLLHYLVSLQNWLNRHSWQRTPVAVTAWALLRDSYHGALCLRFQAQHIAVAVLYLALQVYGVEVPAEVEAEKPWWQVFNDDLTKPIIDNIVSDLIQIYTMDTEIP

SEQ ID NO: 242849 - protein, 246 aa, Artificial Sequence [sequence omitted]

SEQ ID NO: 242850 - protein, 214 aa, Artificial Sequence
  derived and/or modified sequence
MEAGVKLGMRSIPIATACTIYHKFFCETNLDAYDPYLIAMSSIYLAGKVEEQHLRTRDIINVSNRYFNPSGEPLELDSRFWELRDSIVQCELLMLRVLRFQVSFQHPHKYLLHYLVSLQNWLNRHSWQRTPVAVTAWALLRDSYHGALCLRFQAQHIAVAVLYLALQVYGVEVPAEVEAEKPWWQVFNDDLTKPIIDNIVSDLIQIYTMDTEIP

SEQ ID NO: 242851 - protein, 246 aa, Artificial Sequence
  derived and/or modified sequence
MEAPEGGGGPAARGPEGPAPEARVHFRVARFIMEAGVKLGMRSIPIATACTIYHKFFCETNLDAYDPYLIAMSSIYLAGKVEEQHLRTRDIINVSNRYFNPSGEPLELDSRFWELRDSIVQCELLMLRVLRFQVSFQHPHKYLLHYLVSLQNWLNRHSWQRTPVAVTAWALLRDSYHGALCLRFQAQHIAVAVLYLALQVYGVEVPAEVEAEKPWWQVFNDDLTKPIIDNIVSDLIQIYTMDTEIP

SEQ ID NO: 242852 - protein, 142 aa, Artificial Sequence
  derived and/or modified sequence
MEAGVKLGMRSIPIATACTIYHKFFCETNLDAYDPYLIAMSSIYLAGKVEEQHLRTRDIINVSNRFIPWTQRSPKVLAQACPKRSPGWSAAWGHCHHVAMTAGPHRTSWEDWLCCWRRAGEGNGMLPLCQSLEVAVQVMVGA

SEQ ID NO: 242853 - DNA, 747 bp, Artificial Sequence
  derived and/or modified sequence
atggaggcccccgagggcggcggcggcggccccgccgccagaggccccgagggccagcccgcccccgaggccagagtgcacttcagagtggccagattcatcatggaggccggcgtgaagctgggcatgagaagcatccccatcgccaccgcctgcaccatctaccacaagttcttctgcgagaccaacctggacgcctacgacccctacctgatcgccatgagcagcatctacctggccggcaaggtggaggagcagcacctgagaaccagagacatcatcaacgtgagcaacagatacttcaaccccagcggcgagcccctggagctggacagcagattctgggagctgagagacagcatcgtgcagtgcgagctgctgatgctgagagtgctgagattccaggtgagcttccagcacccccacaagtacctgctgcactacctggtgagcctgcagaactggctgaacagacacagctggcagagaacccccgtggccgtgaccgcctgggccctgctgagagacagctaccacggcgccctgtgcctgagattccaggcccagcacatcgccgtggccgtgctgtacctggccctgcaggtgtacggcgtggaggtgcccgccgaggtggaggccgagaagccctggtggcaggtgttcaacgacgacctgaccaagcccatcatcgacaacatcgtgagcgacctgatccagatctacaccatggacaccgagatcccctag

SEQ ID NO: 242854 - DNA, 1289 bp, Artificial Sequence
  derived and/or modified sequence
ggacgcggccgggtggggcggcagcgcccgccgcgagcacctccagttctgccggcttctgcgcgccggggccgcctctccttccgccggtgccgcggcgcctcatggaagccccggagggcggcggaggggggcctgcagcgcggggcccggaggggcagccggcgcccgaagccagggtgcacttccgagtggcgaggttcatcatggaggcaggtgtcaagctagggatgcggtccattcccattgccactgcttgcaccatttaccataagttcttttgcgagaccaacctggacgcctatgacccttacctgattgccatgtcttcaatttacttggccggcaaagtggaagagcagcacctgcggactcgtgacatcatcaatgtgtccaacaggtactttaacccaagcggtgagcccctggaattggactcccgcttctgggaactccgggacagcatcgtgcagtgtgagcttctcatgctgagagttctgcgcttccaggtctccttccagcatccacacaagtacctgctccactacctggtttccctccagaactggctgaaccgccacagctggcagcggacccctgttgccgtcaccgcctgggccctgctgcgggacagctaccatggggcgctgtgcctccgcttccaggcccagcacatcgccgtggcggtgctctacctggccctgcaggtctacggagttgaggtgcccgccgaggtcgaggctgagaagccgtggtggcaggtgtttaatgacgaccttaccaagccaatcattgataatattgtgtctgatctcattcagatttataccatggacacagagatcccctaaggtcctggcccaggcctgcccaaagagaagcccaggatggtcggctgcctggggacattgtcaccacgtcgccatgacggctggtccccacaggaccagctgggaggactggttgtgctgctggagaagggctggagaaggcaatggcatgctgccgctttgccagtccctagaagtcgcggtgcaggtgatggtgggagccgcgcctccagcgggcaggccgggagtgtactgtgtgcagctgacccaaggcagccacatctgcgtttgtcctttgagaggactttgactacaatacaggcatgacatcaatgaaaggaaagtcatgaaatcgatgagactgaatccctacggatttcttaaaagccagatttgtagggagaatgaatgtgcaacgtggctgaaatctattttgtgtaataaaaggtgatacaagtc

SEQ ID NO: 242855 - DNA, 747 bp, Artificial Sequence
  derived and/or modified sequence
atggaggcccctgaaggcggtggaggagggccagctgccagaggacccgaagggcagcctgccccagaggcacgcgtgcatttcagagtggccaggttcattatggaggcaggagtaaagcttggcatgcgttccatccccatcgccaccgcctgtactatttaccacaagtttttctgcgagacaaatctggatgcttacgatccgtatctgattgctatgtcttctatctatctggcaggtaaagtggaggagcagcacctgagaactcgggatataataaatgtgtctaaccgctactttaacccatctggagaaccactggagctcgactcccgcttttgggagttgcgggactcaattgtgcagtgcgaacttcttatgcttagagtgctgaggttccaagtcagcttccaacatcctcataaatacctcctccactatttggtatcactgcagaattggttgaataggcactcttggcagcgcacccctgtggcagttaccgcctgggcgctgcttagagacagttaccatggcgctctctgcctccggtttcaggcacagcacatagctgtcgccgtactgtacctggcactccaggtttacggcgtagaggtgcccgcagaagtcgaagcagagaagccttggtggcaggtgtttaatgatgatttaacaaagcccatcattgacaacatcgtgagcgatctcattcaaatctacacaatggacaccgaaatcccttag

SEQ ID NO: 242856 - DNA, 747 bp, Artificial Sequence
  derived and/or modified sequence
atggaggcccctgagggcggcggcggcggccctgctgcccggggccctgagggccagcctgcccctgaggcccgggtgcacttccgggtggcccgcttcatcatggaggccggcgtgaagctgggcatgaggagcatccccatcgccacagcctgcaccatctaccacaagttcttctgtgagaccaacctggatgcctatgacccctacctgattgccatgagcagcatctacctggccggcaaggtggaggagcagcacctgcggacccgggacatcatcaacgtgagcaaccgctacttcaaccccagcggggagcccctggagctggacagccgcttctgggagctgcgggacagcatcgtgcagtgtgagctgctgatgctgcgggtgctgcgcttccaggtgtccttccagcacccccacaagtacctgctgcactacctggtgtccctgcagaactggctgaacagacacagctggcagaggacccctgtggccgtgacagcctgggccctgctgcgggacagctaccatggagccctgtgcctgcgcttccaggcccagcacatcgctgtggccgtgctgtacctggccctgcaggtgtatggagtggaggtgcctgctgaggtggaggccgagaagccctggtggcaggtgttcaatgatgacctgaccaagcccatcatcgacaacatcgtgtctgacctgatccagatctacaccatggacacagagatcccctag

SEQ ID NO: 242857 - DNA, 747 bp, Artificial Sequence
  derived and/or modified sequence
atggaggcccccgagggcggcggcggcggccccgccgcccggggccctgaagggcagcccgctcctgaggcacgggtacattttagggtggcccgcttcataatggaggcaggcgtgaaactcggtatgagatcaatccctatcgccacggcttgtaccatttatcacaagtttttctgcgaaactaacctggatgcgtacgacccctatttaatcgccatgagttctatctacctagccggcaaagtggaagagcaacatctaagaactcgagatatcatcaacgtctcaaatagatatttcaacccgtccggagaacctctcgagttggactctcgtttttgggagttacgcgacagcatcgtccaatgcgagctgctaatgctgagggtcttgaggtttcaggtaagtttccagcatccacataagtacttgctccattatctcgtctccctgcaaaactggctaaatcgacacagctggcagcgaactccagtcgctgtaacagcatgggcactgctgagggattcctaccatggggccttgtgtctaagatttcaggcccagcatatagccgttgccgtcctctatctggctcttcaggtgtacggggtcgaggtgcccgcagaggttgaagctgaaaagccctggtggcaagtgtttaacgacgaccttaccaaacccataatcgacaacatcgtttccgatcttatacagatctatactatggacactgagattccgtag

SEQ ID NO: 242858 - DNA, 747 bp, Artificial Sequence
  derived and/or modified sequence
atggaggcacccgagggagggggtgggggtcctgctgccaggggaccagagggacagccagcccctgaagcacgcgtacattttcgcgtggctcggttcatcatggaagcgggagtgaagctgggtatgcgaagcatccccatagccactgcctgcacaatctatcacaagtttttttgcgagacaaacctggacgcatatgacccctacctaatcgctatgagcagcatatacctcgccggtaaggtagaagagcagcatctcaggactagagacatcatcaatgtgtctaataggtacttcaacccctccggcgaaccactggaattggatagtagattctgggaattgcgagattccatagtccaatgcgagctcctcatgctgcgcgtgctcagatttcaagtatcttttcagcacccccacaagtacctgttgcactatttggtgtcgctgcaaaactggctaaacaggcacagctggcagcgaacgcccgtggctgttaccgcatgggcactgctgagagactcttaccatggtgctctgtgtctgcggtttcaggctcagcacatagctgtggctgtcctgtatcttgcgttgcaggtgtacggcgtggaggtgcccgcagaagttgaggcagaaaaaccttggtggcaggtctttaacgatgacttaaccaagcccatcatcgataatatcgtatcggatctgatacagatatacacaatggacacagaaatcccttag

SEQ ID NO: 242859 - DNA, 1218 bp, Artificial Sequence
  derived and/or modified sequence
gcgcgccggggccgcctctccttccgccggtgccgcggcgcctcatggaagccccggaggcggcggaggggggcctgcagcgcggggcccggagggcagccggcgcccgaagccagggtgcacttccgagtggcgaggttcatcatggaggtgtcaagctagggatgcggtccattcccattgccactgcttgcaccatttaccataagttcttttgcgagaccaacctggacgcctatgacccttacctgattgccatgtcttcaatttacttggccggcaaagtggaagagcagcacctgcggactcgtgacatcatcaatgtgtccaacaggtactttaacccaagcggtgagcccctggaattggactcccgcttctgggaactccgggacagcatcgtgcagtgtgagcttctcatgctgagagttctgcgcttccaggtctccttccagcatccacacaagtacctgctccactacctggtttccctccagaactggctgaaccgccacagctggcagcggacccctgttgccgtcaccgcctgggccctgctgcgggacagctaccatggggcgctgtgcctccgcttccaggcccagcacatcgccgtggcggtgctctacctggccctgcaggtctacggagttgaggtgcccgccgaggtcgaggctgagaagccgtggtggcaggtgtttaatgacgaccttaccaagccaatcattgataatattgtgtctgatctcattcagatttataccatggacacagagatcccctaaggtcctggcccaggcctgcccaaagagaagcccaggatggtcggctgcctggggacattgtcaccacgtcgccatgacggctggtccccacaggaccagctgggaggactggttgtgctgctggagaagggctggagaaggcaatggcatgctgccgctttgccagtccctagaagtcgcggtgcaggtgatggtgggagccgcgcctccagcgggcaggccgggagtgtactgtgtgcagctgacccaaggcagccacatctgcgtttgtcctttgagaggactttgactacaatacaggcatgacatcaatgaaaggaaagtcatgaaatcgatgagactgaatccctacggatttcttaaaagccagatttgtagggagaatgaatgtgcaacgtggctgaaatctattttgtgtaataaaaggtgatac

SEQ ID NO: 242860 - DNA, 1303 bp, Artificial Sequence
  derived and/or modified sequence
ggcggggccggacgcggccgggtggggcggcacgcccgccgcgagcacctccagttctgccggcttctgcgcgccggggccgcctctccttccgccggtgccgcggcgcctcatggaagccccggaggcggcggaggggggcctgcagcgcggggcccggagggcagccggcgcccgaagccagggtgcacttccgagtggcgaggttcatcatggaggcaggtgtcaagctagggatgcggtccattcccattgccactgcttgcaccatttaccataagttcttttgcgagaccaacctggacgcctatgacccttacctgattgccatgtcttcaatttacttggccggcaaagtggaagagcagcacctgcggactcgtgacatcatcaatgtgtccaacaggtactttaacccaagcggtgagcccctggaattggactcccgcttctgggaactccgggacagcatcgtgcagtgtgagcttctcatgctgagagttctgcgcttccaggtctccttccagcatccacacaagtacctgctccactacctggtttccctccagaactggctgaaccgccacagctggcagcggacccctgttgccgtcaccgcctgggccctgctgcgggacagctaccatggggcgctgtgcctccgcttccaggcccagcacatcgccgtggcggtgctctacctggccctgcaggtctacggagttgaggtgcccgccgaggtcgaggctgagaagccgtggtggcaggtgtttaatgacgaccttaccaagccaatcattgataatattgtgtctgatctcattcagatttataccatggacacagagatcccctaaggtcctggcccaggcctgcccaaagagaagcccaggatggtcggctgcctggggacattgtcaccacgtcgccatgacggctggtccccacaggaccagctgggaggactggttgtgctgctggagaagggctggagaaggcaatggcatgctgccgctttgccagtccctagaagtcgcggtgcaggtgatggtgggagccgcgcctccagcgggcaggccgggagtgtactgtgtgcagctgacccaaggcagccacatctgcgtttgtcctttgagaggactttgactacaatacaggcatgacatcaatgaaaggaaagtcatgaaatcgatgagactgaatccctacggatttcttaaaagccagatttgtagggagaatgaatgtgcaacgtggctgaaatctattttgtgtaataaaaggtgatacaagtcaataggga

SEQ ID NO: 242861 - DNA, 1282 bp, Artificial Sequence
  derived and/or modified sequence
ggacgcggccgggtggggcggcacgcccgccgcgagcacctccagttctgccggcttctgcgcgccggggccgcctctccttccgccggtgccgcggcgcctcatggaagccccggagggcggaggggggcctgcagcgcggggcccggagggcccggcgcccgaagccagggtgcacttccgagtggcgaggttcatcatggaggcaggtgtcaagctagggatgcggtccattcccattgccactgcttgcaccatttaccataagttcttttgcgagaccaacctggacgcctatgacccttacctgattgccatgtcttcaatttacttggccggcaaagtggaagagcagcacctgcggactcgtgacatcatcaatgtgtccaacaggtactttaacccaagcggtgagcccctggaattggactcccgcttctgggaactccgggacagcatcgtgcagtgtgagcttctcatgctgagagttctgcgcttccaggtctccttccagcatccacacaagtacctgctccactacctggtttccctccagaactggctgaaccgccacagctggcagcggacccctgttgccgtcaccgcctgggccctgctgcgggacagctaccatggggcgctgtgcctccgcttccaggcccagcacatcgccgtggcggtgctctacctggccctgcaggtctacggagttgaggtgcccgccgaggtcgaggctgagaagccgtggtggcaggtgtttaatgacgaccttaccaagccaatcattgataatattgtgtctgatctcattcagatttataccatggacacagagatcccctaaggtcctggcccaggcctgcccaaagagaagcccaggatggtcggctgcctggggacattgtcaccacgtcgccatgacggctggtccccacaggaccagctgggaggactggttgtgctgctggagaagggctggagaaggcaatggcatgctgccgctttgccagtccctagaagtcgcggtgcaggtgatggtgggagccgcgcctccagcgggcaggccgggagtgtactgtgtgcagctgacccaaggcagccacatctgcgtttgtcctttgagaggactttgactacaatacaggcatgacatcaatgaaaggaaagtcatgaaatcgatgagactgaatccctacggatttcttaaaagccagatttgtagggagaatgaatgtgcaacgtggctgaaatctattttgtgtaataaaaggtgatacaagtc

SEQ ID NO: 242862 - DNA, 741 bp, Artificial Sequence
  derived and/or modified sequence
atggaagcacccgaggcagccgagggaggtttgcagagaggggcacggagagctgccggggctcggtctcagggggccctcccatcaggcgaagttcatcacggaggcgtgaagctcggcatgcggtcaatcccgatcgccaccgcctgcacaatttatcataaatttttttgtgagactaacctggatgcatatgatccttatttaatcgccatgtcctctatctatttggctggcaaagttgaagaacagcaccttcgaactcgcgatatcatcaatgtcagcaatagatactttaatccatcgggcgaacctctcgaactcgactcgaggttctgggagctcagagattcaatcgtgcagtgtgaacttctgatgttgcgggtgcttagattccaagtgtcgttccaacacccgcacaaatatttattgcactatttggtaagtctccagaactggttaaaccgtcacagctggcagagaaccccagtagccgttacggcctgggccctcctgagggactcatatcacggcgccttgtgtcttcgctttcaggcacagcacatcgcagtggcagtcctgtatctggccctacaggtatatggcgtcgaggtgccagccgaggtggaggctgaaaaaccatggtggcaggtatttaatgatgacttaacaaagcctattatcgacaatatcgtatccgatctgatccagatctacaccatggataccgagattccttag

SEQ ID NO: 242863 - DNA, 645 bp, Artificial Sequence
  derived and/or modified sequence
atggaagctggcgtcaaactggggatgcggagtattcctatcgccaccgcctgcacaatataccacaagttcttctgtgaaaccaacctcgacgcatacgacccatatctgatagctatgagctcaatctacctggccgggaaagtagaagaacaacatcttcgcaccagagacattatcaacgtatctaacaggtatttcaacccatctggcgaaccattagagctggattcacgattctgggaattacgggattccatagtgcagtgcgagcttctgatgctcagagtcctccgatttcaggtttcttttcagcatccccacaaatacctgcttcattatcttgtgtccctccagaactggttaaaccgccacagctggcagaggacaccggtcgccgtgactgcgtgggccctgctgcgcgactcgtatcacggggccctctgccttcgttttcaggcgcagcacattgccgttgccgtgttgtatttggccctccaggtgtatggagtagaggtgccggccgaggttgaggctgagaagccatggtggcaggtgttcaacgatgacctgactaagcccattattgacaacatcgtcagcgatctaatccaaatctacaccatggatacagaaattccctag

SEQ ID NO: 242864 - DNA, 741 bp, Artificial Sequence
  derived and/or modified sequence
atggaagcacctgagggcggaggtggaccggcggctaggggaccagagggtccggccccagaagctagggtccatttcagagtcgctagattcataatggaagctggcgttaaactgggcatgaggagcattccaattgccactgcctgtacaatttaccacaagtttttctgtgaaacgaatctggacgcctatgacccgtatctgatcgctatgtcttctatttatctggctgggaaagtggaggaacagcacctccgaactcgcgacatcatcaacgtctccaaccgctatttcaatccaagcggggagccactggaactggattctcgcttttgggagctgagggattctatagtccagtgcgagctcctgatgcttcgagtcctcagattccaagtatctttccagcacccccataagtacctattgcattatctagtaagcctgcagaattggttgaatcggcacagttggcagaggacccctgtggctgtgacagcttgggcgttattgcgagattcctatcatggagcactgtgtctcaggttccaagcccagcacatcgccgtggcagtgttgtacctggccctccaggtctatggcgtcgaggttcccgctgaagtggaggccgaaaagccttggtggcaggtgttcaatgacgatctcaccaaacccattatcgacaatatagtctctgacttgatacagatttataccatggacaccgagattccatag

SEQ ID NO: 242865 - DNA, 741 bp, Artificial Sequence
  derived and/or modified sequence
atggaggcccctgaggccgctgagggcggcctgcagagaggagcccggcgggctgctggggcccggagccagggcgccctgcccagcggggaggtgcaccacggcggcgtgaagctgggcatgaggagcatccccatcgccacagcctgcaccatctaccacaagttcttctgtgagaccaacctggatgcctatgacccctacctgattgccatgagcagcatctacctggccggcaaggtggaggagcagcacctgcggacccgggacatcatcaacgtgagcaaccgctacttcaaccccagcggggagcccctggagctggacagccgcttctgggagctgcgggacagcatcgtgcagtgtgagctgctgatgctgcgggtgctgcgcttccaggtgtccttccagcacccccacaagtacctgctgcactacctggtgtccctgcagaactggctgaacagacacagctggcagaggacccctgtggccgtgacagcctgggccctgctgcgggacagctaccatggagccctgtgcctgcgcttccaggcccagcacatcgctgtggccgtgctgtacctggccctgcaggtgtatggagtggaggtgcctgctgaggtggaggccgagaagccctggtggcaggtgttcaatgatgacctgaccaagcccatcatcgacaacatcgtgtctgacctgatccagatctacaccatggacacagagatcccctag

SEQ ID NO: 242866 - DNA, 645 bp, Artificial Sequence
  derived and/or modified sequence
atggaggccggcgtgaagctgggcatgaggagcatccccatcgccacagcctgcaccatctaccacaagttcttctgtgagaccaacctggatgcctatgacccctacctgattgccatgagcagcatctacctggccggcaaggtggaggagcagcacctgcggacccgggacatcatcaacgtgagcaaccgctacttcaaccccagcggggagcccctggagctggacagccgcttctgggagctgcgggacagcatcgtgcagtgtgagctgctgatgctgcgggtgctgcgcttccaggtgtccttccagcacccccacaagtacctgctgcactacctggtgtccctgcagaactggctgaacagacacagctggcagaggacccctgtggccgtgacagcctgggccctgctgcgggacagctaccatggagccctgtgcctgcgcttccaggcccagcacatcgctgtggccgtgctgtacctggccctgcaggtgtatggagtggaggtgcctgctgaggtggaggccgagaagccctggtggcaggtgttcaatgatgacctgaccaagcccatcatcgacaacatcgtgtctgacctgatccagatctacaccatggacacagagatcccctag

SEQ ID NO: 242867 - DNA, 741 bp, Artificial Sequence
  derived and/or modified sequence
atggaggcccctgagggcggcggcggccctgctgcccggggccctgagggccctgcccctgaggcccgggtgcacttccgggtggcccgcttcatcatggaggccggcgtgaagctgggcatgaggagcatccccatcgccacagcctgcaccatctaccacaagttcttctgtgagaccaacctggatgcctatgacccctacctgattgccatgagcagcatctacctggccggcaaggtggaggagcagcacctgcggacccgggacatcatcaacgtgagcaaccgctacttcaaccccagcggggagcccctggagctggacagccgcttctgggagctgcgggacagcatcgtgcagtgtgagctgctgatgctgcgggtgctgcgcttccaggtgtccttccagcacccccacaagtacctgctgcactacctggtgtccctgcagaactggctgaacagacacagctggcagaggacccctgtggccgtgacagcctgggccctgctgcgggacagctaccatggagccctgtgcctgcgcttccaggcccagcacatcgctgtggccgtgctgtacctggccctgcaggtgtatggagtggaggtgcctgctgaggtggaggccgagaagccctggtggcaggtgttcaatgatgacctgaccaagcccatcatcgacaacatcgtgtctgacctgatccagatctacaccatggacacagagatcccctag

SEQ ID NO: 242868 - DNA, 741 bp, Artificial Sequence
  derived and/or modified sequence
atggaggcccccgaggccgccgagggcggcctgcagcggggcgcccggcgcgcagctggcgccagatcacaaggtgcgctcccttccggtgaggtacatcacgggggtgttaagctgggcatgaggtccattcccattgccaccgcatgtacaatctaccacaagttcttctgtgaaactaatctagatgcatatgacccttatctcattgcaatgagctccatctacctggccggaaaggtcgaggaacagcacctccggacacgcgatatcatcaatgtttcgaaccgctattttaacccctccggtgagccgttggaactggatagtcggttctgggaactaagagatagcatcgttcaatgcgaattgctgatgctgcgggtccttcgctttcaagttagcttccagcacccacacaaatacctgcttcattacctcgttagtctccagaattggctgaatagacacagttggcagaggacccctgtggcggtgactgcctgggccctcttacgagactcatatcacggcgccctgtgcctccggttccaggctcagcatattgcagttgctgtgttatacctcgctttacaagtatacggcgtcgaagtgccggctgaggtagaggcagaaaaaccctggtggcaggtgttcaatgacgatctgactaagccaatcatcgacaatattgtgtctgacttaattcagatctatacaatggacactgaaataccctag

SEQ ID NO: 242869 - DNA, 645 bp, Artificial Sequence
  derived and/or modified sequence
atggaggccggcgtgaagctgggcatgcggagcatccccatcgccacagcctgtaccatctaccacaagtttttttgcgaaactaacctggacgcatacgacccatatctcattgccatgtcttccatttacctggccggaaaggtcgaagagcagcatttacgcacccgggacatcattaatgtgtctaaccggtatttcaatccgtctggggagcctctcgagctggattcgaggttttgggagctgagggattccatagtccagtgcgagcttctgatgctgcgcgttttgaggtttcaagtctctttccagcatccacacaagtatcttcttcactaccttgtgagcctccagaactggctgaacaggcattcatggcaaagaactccggtagcggtaaccgcatgggctttgctgcgcgattcataccacggcgcgctgtgtctgaggttccaggcacagcatatcgctgttgctgttctgtacctggccttacaggtgtacggggtcgaggttccggcagaggtggaggctgagaagccatggtggcaggtgtttaacgacgacctcacaaaaccaatcatcgacaatatcgtatctgatctgatccagatctacactatggataccgaaatcccttag

SEQ ID NO: 242870 - DNA, 741 bp, Artificial Sequence
  derived and/or modified sequence
atggaggcccccgagggcggcggcggccccgccgcccggggccccgagggcccagcacccgaggcccgggtgcacttcagagtagcccggttcatcatggaggctggcgtcaagcttggaatgagaagcataccaatcgccaccgcctgtacgatttaccacaaatttttttgcgagacaaacttggacgcttatgatccttatctaatcgcaatgtcttccatctacctggcaggaaaggtcgaggagcagcacctgaggaccagggatattatcaatgtgagtaacaggtactttaatccatctggagagccgctggaacttgattctcgtttctgggaactgcgcgattccatcgtccaatgtgaactgcttatgctaagagtgttgagatttcaggtgtccttccaacaccctcacaaatacttactccactacttagtgtccctgcagaattggctaaatcgacatagctggcagagaaccccagttgccgtgaccgcctgggctttgctccgcgattcctaccacggggcgctgtgtctgcgcttccaggctcagcatattgcagtggccgttttgtacctagcattgcaggtgtatggagtggaggtcccagccgaggtggaggcggaaaagccttggtggcaggtatttaacgacgatctgactaaaccgattatcgacaacatcgtgtctgacttgatacaaatatacacaatggacacagagattccatag

SEQ ID NO: 242871 - DNA, 741 bp, Artificial Sequence
  derived and/or modified sequence
atggaggctccagaagcagctgaggggggactgcagagaggagcacggagagccgcaggggctagaagccagggtgcgctcccctctggagaagtgcatcacggcggagtgaagctcgggatgagaagcataccaatagccacagcgtgtacgatttaccataaattcttttgcgaaaccaatcttgacgcatatgacccatatctgatcgccatgtcatcaatttacttggctgggaaggttgaagagcaacaccttagaactcgtgatattatcaacgtgtctaatcggtacttcaatccaagcggggagcctctggagctagactcgaggttttgggagcttcgcgacagtatagtacagtgcgaacttctcatgctgcgagtgctgcggttccaagtgagcttccaacatcctcacaaatatctgctgcactacctcgtgagcctgcagaattggctcaacagacactcttggcagagaacaccagtcgccgttacggcgtgggcactgttgcgcgatagttatcacggagcactgtgccttaggttccaggcccagcatatagccgtggcagttctgtatctggccctacaggtgtacggagttgaggtccccgcagaggttgaggcggaaaaaccctggtggcaggtgttcaacgacgacctgacaaagcctataatagataacatcgtgtcagacctgattcagatttacacaatggacacggaaattccatag

SEQ ID NO: 242872 - DNA, 645 bp, Artificial Sequence
  derived and/or modified sequence
atggaggctggtgtgaagttgggaatgagaagcatcccgatagctacggcatgtacaatctaccataaattcttctgtgaaaccaatctggatgcttacgacccctacctcatcgcaatgagctctatttaccttgcgggtaaggttgaggaacagcacctgcggacgcgggatattattaacgtgtcaaacaggtacttcaatccttccggtgagcccctggaactggacagtcgattttgggaactcagagattcgatcgtgcagtgcgaattgctgatgctaagagtgttgcgtttccaggtgagtttccagcaccctcacaaatatttgttacattacctcgtgtcactccaaaactggcttaaccggcactcgtggcagagaactcccgtggccgtgactgcttgggctcttcttcgtgacagctatcacggcgctctgtgcttgagatttcaggctcagcatatcgctgtcgccgttctgtatctggcactccaagtatacggcgtggaggtgcctgctgaagtagaggcagagaagccctggtggcaggtcttcaatgatgacttgactaagccgataatcgataacatcgttagcgatctgattcagatctacacaatggacaccgaaatcccctag

SEQ ID NO: 242873 - DNA, 741 bp, Artificial Sequence
  derived and/or modified sequence
atggaagcccctgaaggaggaggaggtcccgctgctagagggcctgaaggtcctgcccctgaagctcgggtccattttagggttgcacgttttatcatggaggcgggagtgaagctgggtatgcggtccattcccatcgcaacggcttgcaccatataccacaagttcttttgcgagacgaacctggatgcctatgacccttatctgatcgccatgtcctccatctacttggccggaaaggtggaagagcaacacctgagaactagggacatcattaacgtcagcaaccggtattttaatccctctggtgagccgttggaattagactcacgattctgggagctccgggatagtatcgtccagtgcgagcttctgatgcttagagtactgcgcttccaggtgtccttccagcacccccacaagtacctactgcactatctggtttcattacagaactggcttaaccggcactcctggcagcgaacgcccgttgccgtgaccgcttgggcacttctgagggatagctatcatggcgcactctgcctgagatttcaggctcagcacatcgcggtggcggttctctatctcgcattgcaggtatatggagtagaagtaccagccgaagtggaagccgaaaaaccatggtggcaggttttcaatgatgacctaactaagccgataatcgataacatagtgtccgacctgattcagatctacactatggacaccgagatcccgtag

SEQ ID NO: 242874 - DNA, 741 bp, Artificial Sequence
  derived and/or modified sequence
atggaggcccccgaggccgccgagggcggcctgcagagaggcgccagaagagccgccggcgccagaagccagggcgccctgcccagcggcgaggtgcaccacggcggcgtgaagctgggcatgagaagcatccccatcgccaccgcctgcaccatctaccacaagttcttctgcgagaccaacctggacgcctacgacccctacctgatcgccatgagcagcatctacctggccggcaaggtggaggagcagcacctgagaaccagagacatcatcaacgtgagcaacagatacttcaaccccagcggcgagcccctggagctggacagcagattctgggagctgagagacagcatcgtgcagtgcgagctgctgatgctgagagtgctgagattccaggtgagcttccagcacccccacaagtacctgctgcactacctggtgagcctgcagaactggctgaacagacacagctggcagagaacccccgtggccgtgaccgcctgggccctgctgagagacagctaccacggcgccctgtgcctgagattccaggcccagcacatcgccgtggccgtgctgtacctggccctgcaggtgtacggcgtggaggtgcccgccgaggtggaggccgagaagccctggtggcaggtgttcaacgacgacctgaccaagcccatcatcgacaacatcgtgagcgacctgatccagatctacaccatggacaccgagatcccctag

SEQ ID NO: 242875 - DNA, 645 bp, Artificial Sequence
  derived and/or modified sequence
atggaggccggcgtgaagctgggcatgagaagcatccccatcgccaccgcctgcaccatctaccacaagttcttctgcgagaccaacctggacgcctacgacccctacctgatcgccatgagcagcatctacctggccggcaaggtggaggagcagcacctgagaaccagagacatcatcaacgtgagcaacagatacttcaaccccagcggcgagcccctggagctggacagcagattctgggagctgagagacagcatcgtgcagtgcgagctgctgatgctgagagtgctgagattccaggtgagcttccagcacccccacaagtacctgctgcactacctggtgagcctgcagaactggctgaacagacacagctggcagagaacccccgtggccgtgaccgcctgggccctgctgagagacagctaccacggcgccctgtgcctgagattccaggcccagcacatcgccgtggccgtgctgtacctggccctgcaggtgtacggcgtggaggtgcccgccgaggtggaggccgagaagccctggtggcaggtgttcaacgacgacctgaccaagcccatcatcgacaacatcgtgagcgacctgatccagatctacaccatggacaccgagatcccctag

SEQ ID NO: 242876 - DNA, 741 bp, Artificial Sequence
  derived and/or modified sequence
atggaggcccccgagggcggcggcggccccgccgccagaggccccgagggccccgcccccgaggccagagtgcacttcagagtggccagattcatcatggaggccggcgtgaagctgggcatgagaagcatccccatcgccaccgcctgcaccatctaccacaagttcttctgcgagaccaacctggacgcctacgacccctacctgatcgccatgagcagcatctacctggccggcaaggtggaggagcagcacctgagaaccagagacatcatcaacgtgagcaacagatacttcaaccccagcggcgagcccctggagctggacagcagattctgggagctgagagacagcatcgtgcagtgcgagctgctgatgctgagagtgctgagattccaggtgagcttccagcacccccacaagtacctgctgcactacctggtgagcctgcagaactggctgaacagacacagctggcagagaacccccgtggccgtgaccgcctgggccctgctgagagacagctaccacggcgccctgtgcctgagattccaggcccagcacatcgccgtggccgtgctgtacctggccctgcaggtgtacggcgtggaggtgcccgccgaggtggaggccgagaagccctggtggcaggtgttcaacgacgacctgaccaagcccatcatcgacaacatcgtgagcgacctgatccagatctacaccatggacaccgagatcccctag

SEQ ID NO: 242877 - protein, 234 aa, Artificial Sequence
  derived and/or modified sequence
MGGCVGAQHDSSGSLNENSEGTGVALGRNQPLKKEKPKWKSDYPMTDGQLRSKRDEFWDTAPAFEGRKEIWDALKAAAHAFESNDHELAQAIIDGANITLPHGALTECYDELGNRYQLPVYCLAPPINMIEEKSDIETLDIPEPPPNSGYECQLRLRLSTGKDLKLVVRSTDTVFHMKRRLHAAEGVEPGSQRWFFSGRPLTDKMKFEELKIPKDYVVQVIVSQPVQNPTPVEN

SEQ ID NO: 242878 - DNA, 705 bp, Artificial Sequence
  derived and/or modified sequence
atgggcggctgcgtgggcgcccagcacgacagcagcggcagcctgaacgagaacagcgagggcaccggcgtggccctgggcagaaaccagcccctgaagaaggagaagcccaagtggaagagcgactaccccatgaccgacggccagctgagaagcaagagagacgagttctgggacaccgcccccgccttcgagggcagaaaggagatctgggacgccctgaaggccgccgcccacgccttcgagagcaacgaccacgagctggcccaggccatcatcgacggcgccaacatcaccctgccccacggcgccctgaccgagtgctacgacgagctgggcaacagataccagctgcccgtgtactgcctggccccccccatcaacatgatcgaggagaagagcgacatcgagaccctggacatccccgagcccccccccaacagcggctacgagtgccagctgagactgagactgagcaccggcaaggacctgaagctggtggtgagaagcaccgacaccgtgttccacatgaagagaagactgcacgccgccgagggcgtggagcccggcagccagagatggttcttcagcggcagacccctgaccgacaagatgaagttcgaggagctgaagatccccaaggactacgtggtgcaggtgatcgtgagccagcccgtgcagaaccccacccccgtggagaactag

SEQ ID NO: 242879 - DNA, 705 bp, Artificial Sequence
  derived and/or modified sequence
atggggggatgcgttggagctcagcacgattcctccggttcattgaacgagaattcagaaggcactggggtcgccctcgggaggaatcagccactgaagaaagagaaacctaaatggaaaagcgattaccctatgaccgatgggcaactgcggtcaaaaagggacgagttctgggacacagcaccggccttcgaggggcgaaaagagatctgggatgccctgaaagctgctgcacacgcgttcgagagcaacgaccatgagctcgcccaggcaataattgacggagcaaacattacactgccgcacggcgctctcaccgaatgctacgatgaattggggaatcgataccagctgcctgtgtattgcctcgctcccccaataaatatgatagaagagaaatctgatatcgagaccttggacatcccagaaccgccaccaaattctggctatgagtgccagttgcggctgcgactgtccactggaaaagacctgaaactggtggtgagatcaacagatactgtgtttcatatgaaacgaagactccacgccgccgagggcgtagagcctggcagccaaaggtggttcttctcgggccggccactcaccgacaagatgaagttcgaagagctgaagatacccaaagattatgtagtccaggtcatcgtgagtcaaccggttcagaatccaacccccgtggagaattag

SEQ ID NO: 242880 - DNA, 705 bp, Artificial Sequence
  derived and/or modified sequence
atgggcggctgtgtgggcgcccagcacgacagcagcggcagcctgaatgaaaattctgagggcaccggggtggccctgggcaggaaccagcccctgaagaaggagaagcccaagtggaagagtgactaccccatgacagatggccagctgcggagcaagagagatgagttctgggacacagccccagcctttgagggcaggaaggagatctgggatgccctgaaggctgctgcccacgcctttgagagcaatgaccacgagctggcccaggccatcattgatggagccaacatcaccctgccccacggggccctgacagaatgttatgatgagctgggcaaccgctaccagctgcctgtgtactgcctggccccacccatcaacatgattgaggagaagagtgacatcgagaccctggacatccctgagcccccacccaacagcggctatgagtgccagctgcggctgcggctgagcacaggcaaggacctgaagctggtggtgcgcagcacagacacagtgttccacatgaagaggcggctgcatgctgctgagggcgtggagcccggcagccagcgctggttcttcagcggccggcccctgacagacaagatgaagtttgaggagctgaagatccccaaggactatgtggtgcaggtgattgtgtcccagcctgtgcagaaccccacccctgtggagaactag

SEQ ID NO: 242881 - DNA, 705 bp, Artificial Sequence
  derived and/or modified sequence
atgggcggctgcgtgggcgcccagcacgacagcagcggcagcctgaatgaaaactctgagggcaccggggtggcacttggcaggaatcagcccctgaaaaaggaaaaaccaaagtggaagtccgactaccccatgacagatggacaactgcgaagcaagagagacgagttttgggatactgcccctgcattcgagggaagaaaggagatctgggatgccctcaaggccgcagcccacgcatttgagtccaacgatcatgaactggcccaggccataatagatggcgcaaatatcaccctcccccatggcgccttgacagaatgttacgacgagttaggtaacaggtaccagcttcccgtgtactgtctcgcacctcccatcaacatgatcgaagaaaaaagcgatattgagaccctcgacattcccgagcctccccctaattccgggtacgagtgccagctgcggctacgattgtccactggtaaggacttgaaactcgtcgtcagaagcacggatacagtgttccatatgaagagaaggctgcacgctgccgaaggagtagaacccgggtcccagcgatggttcttcagcggcagaccccttacagacaagatgaagtttgaggagctcaaaatcccgaaagattacgtggtgcaggtcattgttagtcagcctgtgcagaatccaacacctgtggagaattag

SEQ ID NO: 242882 - DNA, 705 bp, Artificial Sequence
  derived and/or modified sequence
atgggaggatgcgtgggcgcacaacacgactctagtggttccctgaacgaaaacagtgaggggactggggtagccttaggacggaatcagcccttgaaaaaagaaaagccaaaatggaaaagtgactaccccatgaccgatggccagcttcgatctaagagggatgagttttgggatacagccccagccttcgagggtagaaaggaaatatgggatgctttgaaagccgcagcccacgcctttgagagtaatgatcacgagctcgcccaggccattatagacggggcaaatatcactctccctcacggcgctttgactgagtgctatgacgagctggggaacaggtatcagctacctgtgtactgcttagctccccctattaatatgatcgaagaaaagagcgacatcgaaacgctggacatccccgaacccccacccaacagcggatacgagtgtcagctcagattgcgcctcagtacaggcaaggacctaaaactggtggtgcggtccaccgacacagtgtttcacatgaagcgaaggctgcatgcagctgaaggtgtggagccaggctcccagagatggtttttctccgggaggcctctgaccgacaagatgaaattcgaagagctgaaaattcctaaagactatgtggtgcaagttattgtgtcgcagccggtgcagaacccgacacccgtcgaaaattag

SEQ ID NO: 242883 - DNA, 3301 bp, Artificial Sequence
  derived and/or modified sequence
ggcgccgcgggccgggggccgatgggtcctggcggacgcgaggcgccggcgcggggctcgcctggactcgggtgtgcggggctgtgagggggcgaggcgggcgctgcggcccgcccgggatgggccagccctggcctggcggggctgagccgaaggcgagggcggcgcgcgggccaggcctgccgggcgggcggcccgggggttgaggtagaagtgggcgcggaggaaggggccgagccaaggcggtgggtggagcggcgaggggggcggaggctgggccgcggcgggcgagcggagcggcgcgcctgtccggagctcggcggtggcgccggaggaggctgcagcggcggcggcggcgggcccggacgagcgtccggaggtggcggacgaggcgccgggggcccccatgggcgggtgtgtgggcgcccagcacgactcctcgggcagcctcaacgagaactcggagggcaccggagttgctctaggtcgtaaccagcctttgaaaaaggagaaaccaaaatggaaaagcgattatcctatgacagatggacaactacgcagcaagagggatgaattttgggatacagcaccagcttttgaaggccggaaagagatttgggatgccttgaaggctgctgcacatgcttttgagagcaatgatcatgaactggcacaagcaatcattgatggtgcaaacataacattaccacatggtgcacttacagagtgctacgatgaactggggaacagatatcagcttccagtgtattgcttggcaccgccaatcaacatgatagaggaaaagagcgacatagagactctggatattcctgagccaccacccaattctggatatgaatgtcagcttcgtttgcgcctttccacaggcaaagacctcaagcttgtggttcgcagcacagacacagtattccacatgaagagacggttgcatgcagcagagggagtggaaccaggtagtcagcggtggtttttttctggcagacctctcactgacaaaatgaagttcgaagagctgaagatcccaaaggactatgttgtacaggttatagtgagccaacctgtgcagaacccaacaccagtggagaactgaactgagccctgttggccagctcccacatccctctgctcctttttatggttcttgttgtcatttcctactctgcggcgtgaaatctatttcactgctctaaattccctatgaatggatttagttctgaggaattaccagtgaaaaattccatctgtgatggagaccaacaaaaataataaaacacaaagagccaggctttgagactcatgtaattacaatttctaatttgaaaggcagttaagaaatagataaccatttattttagaacactcaacaactatgtaatggctatatttcagtgacttggactgtaaatgaaacattgcatccatgaaggacagcaccaagcacctttttgaatacagaatttttttagaaaaatatatcaaattatataatttccagaaaccataaataatggatataaaacttaacctttttgttttgttttgttttgttttgttttgttttgttttgttttggttaatggaaactgaaaagagcagtatttgaggttgcttctattctggttttttattcttagctcaattaatatttagccataaatgagtagagactggcaaattgtgctttagtgttgctttcctcatccccacatcttgagctccttatttacattcacactaaattttggtgccttccagcacattagtggcaggcacccttctggaacactaggcaataatttcatcaatacagtcaggtctcttgagtttcaacagatactcagttgaaaagtcgctgtcatcttgctgcataagtattttgaaaggtctgtataacgaagccatttttatatccaggcttagaaggtcactactatatagtaccttcattgatctatctattctgcttggaacttttcatagctaagtataacccccaaatgcatggttcctgggtcaggagacaccaaaatcaattatagctgttcccactcaagttaataaagtaaatgatttcctccactttgcatggaggggtgtaaggaaagcctattttatctgtgcctgggagaactgtgcctattttcagtcttttagaggaaatttcaactcaaaatttttaagtgtgaaagatttactggtgtcacataaacattagcagtgagaccaaataatgaaacattgctttataccttagtgctttccagttcactgttacctctagtcatggtagatgacaattttcctccctcatcttttgtagcaaagaagcaaattaagagccttttgcaagttagattaggggactgaaaaatccagggagataacctgattcttctatactatgactggagtaaagctgccaagagttaggttgaatttggagccttttaaaagttggttccataagtgagaaggggggctaacatgtgaccactgtgcccctgagaatccatgagatggaaaagtacagacaagaaggcacttaacgctgttctcagttggaaaatgtcagccctccacacctgtttggatgtgaagtgcattattaattttaatgacaaaatgaaactgctaattagtttaaatgtaatgtttaaatggtattgaatttcctattgcctgattaaatatatctgtaattgtaacatcatgtttctgagagctttaactacttccttatttttatgcaatcattttaaagattgtggctatatctaatttaaatttgctgatgattgaatctaaattcaagtgaagaccacagcattaatcccaaaggagattttttttatgtttagaggtggagatattagggtaaatcagtatattgctcctgtcatcaaagtttttgttcatttgtgtgccacatcgaatagcagcacttctcaaagtttgtcaactggaaaaaagtgtttaaaactgtttttttcttaagcagatttggtgatgtcatcaatatctatgatatcgattggtaaaaggtctttctttgttgaggatttgagctctctttttaagagtttattttattttaaaggaacatatgctttgaataacaattctctgggcatgtttaactaacctaggtgggaaaaccatggtgctgtttaattgtaaatagattgatataagattggaccagtacttgatgtgtataattttagtatgtagggtttatgtgctttttttaaaaaaaaaaaaaaggttcaatttttctctt

SEQ ID NO: 242884 - protein, 100 aa, Artificial Sequence
  derived and/or modified sequence
MQKPCKENEGKPKCSVPKREEKRPYGEFERQQTEGNFRQRLLQSLEEFKEDIDYRHFKDEEMTREGDEMERCLEEIRGLRKKFRALHSNHRHSRDRPYPI

SEQ ID NO: 242885 - DNA, 303 bp, Artificial Sequence
  derived and/or modified sequence
atgcagaagccctgcaaggagaacgagggcaagcccaagtgcagcgtgcccaagagagaggagaagagaccctacggcgagttcgagagacagcagaccgagggcaacttcagacagagactgctgcagagcctggaggagttcaaggaggacatcgactacagacacttcaaggacgaggagatgaccagagagggcgacgagatggagagatgcctggaggagatcagaggcctgagaaagaagttcagagccctgcacagcaaccacagacacagcagagacagaccctaccccatctag

SEQ ID NO: 242886 - DNA, 303 bp, Artificial Sequence
  derived and/or modified sequence
atgcagaagccatgtaaggagaatgagggtaaaccaaagtgctccgtgcccaaaagggaagaaaaaagaccatatggtgaattcgagcgccagcaaactgaaggtaatttccgccagcggctactgcagagtctcgaggagttcaaagaagacattgattaccgtcacttcaaggatgaagaaatgacgcgtgagggtgatgagatggaacgatgcctagaagagatccgcggattaagaaagaaattccgggccttgcattccaaccaccgacatagcagagatcgtccttatccaatctag

SEQ ID NO: 242887 - DNA, 303 bp, Artificial Sequence
  derived and/or modified sequence
atgcagaagccatgtaaggaaaatgagggaaagccaaagtgttccgtacccaagcgagaggagaagagaccttacggagaattcgaaaggcagcagactgagggcaatttcaggcagagattactccagtccctcgaagagttcaaggaagatatagactatcgtcatttcaaggatgaagagatgacacgagagggggacgaaatggagcgctgtcttgaggaaatccggggccttagaaagaaattcagagccctccattccaaccacaggcacagccgagacagaccttaccccatttag

SEQ ID NO: 242888 - DNA, 303 bp, Artificial Sequence
  derived and/or modified sequence
atgcagaagccctgcaaggaaaatgaaggcaagcccaagtgcagcgtgcccaagcgggaggagaagaggccctatggagaatttgagcggcagcagacagagggcaacttccggcagaggctgctgcagagcctggaggagttcaaggaggacatcgactaccgccacttcaaggatgaggagatgacccgggagggagatgagatggagcgctgcctggaggagatccggggcctgaggaagaagttccgggccctgcacagcaaccaccgccacagccgggaccggccctaccccatctag

SEQ ID NO: 242889 - DNA, 303 bp, Artificial Sequence
  derived and/or modified sequence
atgcagaagccctgcaaggagaacgagggcaagcccaagtgcagcgtgcccaaacgggaggaaaaacggccatacggcgagttcgaaaggcagcagacagagggcaatttcagacaacgcctgctccagtcactggaagagttcaaggaagacattgactacagacatttcaaagatgaagagatgacacgggagggagacgaaatggagcgttgtctggaggagatcagaggcttacgcaagaaatttcgggccctccattccaaccatcgccattctagagacagaccttaccctatctag

SEQ ID NO: 242890 - DNA, 303 bp, Artificial Sequence
  derived and/or modified sequence
atgcagaagccctgcaaggagaacgagggcaagcccaagtgcagcgtgcccaagagggaagagaagaggccatatggcgagtttgagaggcagcagactgaaggaaatttccgacagcggcttctgcagtcccttgaagagtttaaagaagacatcgattataggcactttaaggatgaagaaatgacccgtgagggtgatgagatggaacgctgcctagaagagataagagggttgaggaaaaagtttcgcgcccttcactctaaccaccgccatagtagagacaggccgtaccccatctag

SEQ ID NO: 242891 - DNA, 303 bp, Artificial Sequence
  derived and/or modified sequence
atgcagaaaccctgcaaggagaatgagggaaaaccaaagtgttcggtgccaaagagggaggagaaaaggccttatggggagttcgaaagacagcagactgagggcaacttcaggcagcgcctgctccagagcctcgaagagttcaaagaggacattgactatcgccatttcaaggacgaggagatgaccagagaaggagatgagatggaacgctgccttgaagagattcgtggtttgaggaagaaattcagggctctacacagtaatcaccgccatagtagagatcggccataccccatttag

SEQ ID NO: 242892 - DNA, 303 bp, Artificial Sequence
  derived and/or modified sequence
atgcagaaaccgtgcaaagagaacgagggcaaacccaaatgctccgtgcccaagcgggaagagaaacggccttacggtgaattcgagcgacagcagaccgaaggcaactttaggcagaggcttctgcagtctctggaggaattcaaggaagatatagattaccgacatttcaaagacgaagagatgacaagggagggcgatgaaatggaacggtgtttggaggagatacgcggtctgcggaaaaagttcagagctctccacagcaaccaccgccacagcagggaccgaccctatcctatctag

SEQ ID NO: 242893 - DNA, 1177 bp, Artificial Sequence
  derived and/or modified sequence
gtgaaccgaagtccttatattcccgggcttctttctcctctgggtaccagctccttactgccctgcagacaagcgtgccgtgcgtgcttgtggccaagggaaggaagagctggttgatccacagatagctccttcctccccgccccttcctttttgtttggaggtcccaggatctgtgttcacagacatctgggggaagaaaaggagcaggaaactaccccgcacagagttaagcaggaaacaacaacaacatcatgcaaaaaccctgcaaagaaaacgaaggaaagccaaagtgcagcgtgccaaagagggaggaaaaacgcccgtatggagaatttgaacgccagcaaacagaagggaattttagacagaggctgcttcagtctctcgaagaatttaaagaggacatagactataggcattttaaagatgaagaaatgacaagggagggagatgagatggaaaggtgtttggaagagataaggggtctgagaaagaaatttagggctctgcattctaaccataggcattctcgggaccgtccttatcccatttaattaatttctctgacaattcaattattttctgttattaatgttgccactgctttctgtttgtctgcactttcttgataaatatttgctatcgttttactccagtcattcgatgttgctgagatttacatatgactcttgtcaacatctcatcttttgacccaatcttattcatttaataagaggtctcattcatttgcatggaaaaatgctcattgtatattgcaaagtgaaaataacgagttgcaaaacagtgtatacatatatgtgtgtatatatgtacactttatttgtacatttctatgtgacataatgcaaaggaaagtgtctgattttattatacaccaaaggttaacagtgaatctctgtgtgatctctttttttttctttttgcctatctgcatcttctcacttgccaaaaaatgaatatatgtttatgtgtgtatattacttgtgtcacaaaaaaccctaaagtagacagtaaaagaacttgtcaatcgcctttggaaggcaatgaaacacttaataaactctcaataacagaagcgtaaaaatgaaatgtaaacctccaattacctctggatctcttagccagagtaataaactggtaattattacagata

SEQ ID NO: 242894 - DNA, 852 bp, Artificial Sequence
  derived and/or modified sequence
tctcctctgggtaccagctccttactgccctgcagacaagcgtgccgtgcgtgcttgtggccaagggaaggaagaggtcccaggatctgtgttcacagacatctgggggaagaaaaggagcaggaaactaccccgcacagagttaagcaggaaacaacaacaacatcatgcaaaaaccctgcaaagaaaacgaaggaaagccaaagtgcagcgtgccaaagagggaggaaaaacgcccgtatggagaatttgaacgccagcaaacagaagggaattttagacagaggctgcttcagtctctcgaagaatttaaagaggacatagactataggcattttaaagatgaagaaatgacaagggagggagatgagatggaaaggtgtttggaagagataaggggtctgagaaagaaatttagggctctgcattctaaccataggcattctcgggaccgtccttatcccatttaattaatttctctgacaattcaattattttctgttattaatgttgccactgctttctgtttgtctgcactttcttgataaatatttgctatcgttttactccagtcattcgatgttgctgagatttacatatgactcttgtcaacatctcatcttttgacccaatcttattcatttaataagaggtctcattcatttgcatggaaaaatgctcattgtatattgcaaagtgaaaataacgagttgcaaaacagtgtatacatatatgtgtgtatatatgtacactttatttgtacatttctatgtgacataatgcaaaggaaagtgtctgattttattatacaccaaaggttaacagtgaatctctgtgtgatctctttttttt

SEQ ID NO: 242895 - protein, 357 aa, Artificial Sequence
  derived and/or modified sequence
MKCGLAFIRKAHLITHQIIHTGEKPYKCGHCGKLFTSKSQLHVHKRIHTGEKPYVCNKCGKAFTNRSNLITHQKTHTGEKSYICSKCGKAFTQRSDLITHQRIHTGEKPYECNTCGKAFTQKSNLNIHQKIHTGERQYECHECGKAFNQKSILIVHQKIHTGEKPYVCTECGRAFIRKSNFITHQRIHTGEKPYECSDCGKSFTSKSQLLVHQPVHTGEKPYVCAECGKAFSGRSNLSKHQKTHTGEKPYICSECGKTFRQKSELITHHRIHTGEKPYECSDCGKSFTKKSQLQVHQRIHTGEKPYVCAECGKAFSNRSNLNKHQTTHTGDKPYKCGICGKGFVQKSVFSVHQSSHA

SEQ ID NO: 242896 - protein, 714 aa, Artificial Sequence
  derived and/or modified sequence
MLETYSHLLSVGYQVPKPEVVMLEQGKEPWALQGERPRHSCPGEKLWDHNQHRKIIGYKPASSQDQKIYSGEKSYECAEFGKSFTWKSQFKVHLKVPTGEKLYVCIECGRAFVQKPEFITHQKTHMREKPYKCNECGKSFFQVSSLFRHHRIHTGEKLYECSECGKGFPYNSDLSIHEKIHTGERHHECTDCGKAFTQKSTLKIHQKIHTGERSYICIECGQAFIQKTQLIAHRRIHSGEKPYECNNCGKSFISKSQLQVHQRVHTRVKPYICTEYGKVFSNNSNLITHEKIQSREKSSICTECGKAFTYRSELIIHQRIHTGEKPYECSDCGRAFTQKSALTVHQRIHTGEKSYICMKCGLAFIRKAHLITHQIIHTGEKPYKCGHCGKLFTSKSQLHVHKRIHTGEKPYVCNKCGKAFTNRSNLITHQKTHTGEKSYICSKCGKAFTQRSDLITHQRIHTGEKPYECNTCGKAFTQKSNLNIHQKIHTGERQYECHECGKAFNQKSILIVHQKIHTGEKPYVCTECGRAFIRKSNFITHQRIHTGEKPYECSDCGKSFTSKSQLLVHQPVHTGEKPYVCAECGKAFSGRSNLSKHQKTHTGEKPYICSECGKTFRQKSELITHHRIHTGEKPYECSDCGKSFTKKSQLQVHQRIHTGEKPYVCAECGKAFSNRSNLNKHQTTHTGDKPYKCGICGKGFVQKSVFSVHQSSHA

SEQ ID NO: 242897 - protein, 769 aa, Artificial Sequence
  derived and/or modified sequence
MPASWTSPQKSSALAPEDHGSSYEGSVSFRDVAIDFSREEWRHLDLSQRNLYRDVMLETYSHLLSVGYQVPKPEVVMLEQGKEPWALQGERPRHSCPGEKLWDHNQHRKIIGYKPASSQDQKIYSGEKSYECAEFGKSFTWKSQFKVHLKVPTGEKLYVCIECGRAFVQKPEFITHQKTHMREKPYKCNECGKSFFQVSSLFRHHRIHTGEKLYECSECGKGFPYNSDLSIHEKIHTGERHHECTDCGKAFTQKSTLKIHQKIHTGERSYICIECGQAFIQKTQLIAHRRIHSGEKPYECNNCGKSFISKSQLQVHQRVHTRVKPYICTEYGKVFSNNSNLITHEKIQSREKSSICTECGKAFTYRSELIIHQRIHTGEKPYECSDCGRAFTQKSALTVHQRIHTGEKSYICMKCGLAFIRKAHLITHQIIHTGEKPYKCGHCGKLFTSKSQLHVHKRIHTGEKPYVCNKCGKAFTNRSNLITHQKTHTGEKSYICSKCGKAFTQRSDLITHQRIHTGEKPYECNTCGKAFTQKSNLNIHQKIHTGERQYECHECGKAFNQKSILIVHQKIHTGEKPYVCTECGRAFIRKSNFITHQRIHTGEKPYECSDCGKSFTSKSQLLVHQPVHTGEKPYVCAECGKAFSGRSNLSKHQKTHTGEKPYICSECGKTFRQKSELITHHRIHTGEKPYECSDCGKSFTKKSQLQVHQRIHTGEKPYVCAECGKAFSNRSNLNKHQTTHTGDKPYKCGICGKGFVQKSVFSVHQSSHA

SEQ ID NO: 242898 - DNA, 2820 bp, Artificial Sequence
  derived and/or modified sequence
gcttttacgcagtgttttgaggtgcaggactgcaatgcgcgcacttccggaccccagactcttcctacggcgactgacacctcagacacgcgttgtggggggcggcgctctggctccggggctgtgcccagcgcgagcgtggccggcacccacttgctgcagagccggcactgcactggggtccttgggggcgactcctccagacgtctctgcgggttgtcgggtgctgccgagttgggttgggggacgctacaggtagtgggtccggagcagcggctggcccctcatctcactgcccttcctcggaccccaccgtcctctggaagcttgtgcagggcacctgccactgtgaccacctggacgcagatacctgctttcccacaacagcaaggaagaaccatggcccaggggtcactgtcattcggggacgtggctgtgggcttcacccggaaagagtggcagcagctggacctggagcagaggaccctgtaccaggatgtgatgctggagaactacagccacctgctctctgtgggctgaactgtctgcttgcttggaaggcccagctggctcagcacaaatcctttaaccgtttctccccaagagggtgtcaagtcagcaaaccagctgtgatctccagtttggagcaggggaaggagccatggatggaggaggaagagataaggacgtggagcttcccagaagaagtttggcaagttgctacccagccagatagccaacagcaacacgaagaccaacatttgagccatacgtttctagacaagaaagactggaccggaaatgagcttcatgaatgtaacgaacttggaaaaaaactccatcagaacccaaacctccttccatcaaaacagcaggtccgcacacgtgacttgtgcagaaagagtttgatgtgtaacctggacttcactcctaacgcctacctggcgaggaggagatttcagtgcgacggccacggaaacttcttctctgttcgaaacttgaaactccaccttcaggagcgaatccacgcggaggtcaccagtgtggaagtgctttaagctgtgacgagggagttcctgcagctcagggagccagtagtgagaaaccccacgaatgcacgaagtgtgggaaagccttgtgctgcagatcggacctcagggtacatcacggggtccacgcgggggagaagtcctctgcgtgcagtgaacgggggagtggtttcagggagaagctttgccctgacaaacagggaacttacacaaaggagaaacccgctagagacagcagaagtggtaaaacgatcttccggaagacacgcctgtgtgtcccgggcacagttcacgccggagcgaagccttacaagtgttgggagtgtgagaaaacctcccacaagtcgcgcctcatcgagcaccttcgctcccacacgggggagaagccctgcggctgcagggaatgcggaaaggcctttttccagaagtcacacctcatcctgcgtcagaggactcacacgggggagaagccctgcgactgcgcggagcgcgtgagccactttagccaggatatacttaattataaagacaactgtggatatgaagtttttttttcttttgagatgaagttttactcttgttgcccaggctatgggaagaaatgaaatcattacgactaacagatctaaaaagcgtgagaacatcccagagggacgcaggggtgtgttccaagtgtgctacagacagataatttttatttttgtgttgcactggtgaacagaacataattgtgaatctgtagacatacataccataatatatagaagatctatggatactttctatgctaaattatacccttctgtgtttgtgatatagaactggaataagatgaatatattattaaagcagagaggcccactgcagcagcacataccatttcttctgtttgtcatcacgtattacagagcccctgaacttggaagctaacaatttcatgacatctgataactcacagtcaactagtttataagttatatttttggctgggctcggtcgctcacacctgtaaacccaacactttgggaggctgaggcgggcagatcacatgaggtcaggagttcgagaccagcctggccaacacggtgaaaccccgtcactgaaaaatataaaaattggctgagcatgctggtgattttctgtaatcccagtaatcccagctacttgggaggctcaggcacgagaattgcttgagcccggcaggcagaggttgcagtgagctgagattgtgccacttcattccagcctgggcgacagagcaagactctgtctcaaaacaagctatatttctatattaggactccattttctggcaatacggtggaccgtctaaagtgaaaatcaccggggcagtggctcgtgcctgtgatctcagcacttgggaaagtcaaggtggacaggtcacttgaccccaggagttcaagaccagcctgggcaacacgaaagctgacttcatgagaccgaggatctcgttcgttgatcgatgctacatattcagcatgttagataatgaggttggtgagattgatgaaatcccgcccaccagggccgacccacaaagagccactttatgaagaacatgctcctgaactccactccacaaccagcttttgaaaagaaaaatctgaaaaaatttgacctcagttaaactggtccaaatgcctgagcataaccaaaatctttcctcattcactcttcacgtggaccgtgtttaatttggttgctggtgatcatatttgttttagtaaaggctgtcactctatcttgggcg

SEQ ID NO: 242899 - DNA, 6210 bp, Artificial Sequence
  derived and/or modified sequence
ggtgctagaagtcggaccggaagtggaagtggtccccgaaggctatttcgccgctggcgtcaggactattttcacgttttaatgccgagaggtctctgtgacgattttggttcttgggtgtctctggggagtccctgggccagaccttcctccagactccagcccacctcttcggagcagctctgctgagttcacagatgaccactaaacttcaggcaccctagacaaaaagggttgagatccagtgtggccatgccagctagttggacctcaccccagaaatcctcagccctggctccagaggatcatggcagctcctatgagggatcagtgtccttcagggatgtggctatcgatttcagcagagaggaatggcggcacctggacctttctcagagaaacctgtaccgggatgtgatgctggagacctacagccacctgctctcagtagggtatcaagttcctaaaccagaggtggtcatgttggagcaaggaaaggaaccatgggcactgcagggtgagaggccacgtcacagctgcccaggagagaaattatgggaccataatcaacatagaaaaatcatcggttataaaccagcttcctctcaagatcaaaaaatttattctggggaaaaatcctatgagtgtgctgaatttggaaagagcttcacctggaagtcacagttcaaggtacatctgaaagttcctacaggagaaaaactctatgtatgtattgaatgtgggagggcttttgtacagaagccagaattcatcacacatcagaaaacccatatgagagagaagccctataagtgcaatgaatgtggaaaatccttttttcaagtatcgtctcttttcaggcatcacagaattcataccggagaaaaactatatgaatgtagtgaatgtgggaaaggtttcccttataactcagatctcagtatacatgagaaaattcatactggagagagacaccatgaatgcactgactgtggcaaagcgttcacacaaaagtccacactcaagattcatcagaaaatccatacaggcgagagatcctacatctgtattgaatgcgggcaggccttcatccagaaaacacaattgattgcacaccgaagaattcatagtggagaaaaaccatatgaatgcaataactgtggcaaatccttcatttccaagtcacaacttcaggtacatcaacgtgttcacacaagagtgaagccctatatatgtaccgaatatgggaaggtcttcagcaataattccaacctcattacacatgagaagattcaaagtagagagaaatcttccatatgtactgagtgtgggaaggcctttacctacaggtcagagttgattattcatcagagaattcacactggagagaaaccttatgaatgcagtgactgtgggagagccttcactcagaagtcagcactcacagtgcatcagagaattcatacaggagaaaaatcgtatatatgcatgaaatgtggactggccttcatccggaaggcacacttgattacacatcaaataattcatactggagagaaaccttataaatgtggtcactgtgggaaattgtttacttccaagtcacaactccatgttcataaacgaattcacacaggagaaaagccctatgtatgcaataaatgtgggaaggcattcaccaaccggtcaaatctcattacacatcagaaaactcatacaggagagaaatcttatatatgttccaaatgtggaaaggccttcacccagaggtcagacttgattacacatcagagaatccatactggggagaagccttatgaatgcaatacttgtggaaaagcctttactcagaagtcaaatcttaatatacatcagaaaattcacactggagagagacagtatgaatgccacgaatgtgggaaagccttcaaccagaaatcaatactcattgttcatcagaaaattcatacaggagagaaaccctatgtatgcactgagtgtggaagagctttcatccgcaagtcaaactttattactcatcaaagaattcatactggagagaagccttatgaatgcagtgactgtgggaagtcctttacctccaagtctcagctcctggtgcatcagccagttcacacaggagagaaaccctatgtgtgtgccgagtgtgggaaagcctttagtggcaggtcaaatctcagtaagcaccagaaaactcataccggagaaaagccctacatttgttctgaatgtgggaagacctttcgacagaagtcagagttgattacacatcacagaattcatactggagagaaaccttatgagtgcagtgactgtgggaagtctttcactaaaaaatcacagctccaagtgcatcagcgaattcacactggagagaagccttacgtgtgtgctgagtgtgggaaggcctttagcaacaggtccaatttgaataaacatcagacaacacacactggagacaaaccctacaagtgtggcatctgtgggaaaggcttcgttcagaaatcagtgttcagtgttcatcagagcagccacgcttgagagaaacagtgtgagaaaacccccctgagggttgggtctgattgtacactgttgcacgcatgcagcagaaaaatatgtatattattgtaaatagaaatgaccacatcagaatgtcacacatggctgttctggagagggcctctgagaaggcactgaatgaggcgagggacccttcctacattgtcaccatccccagtaaaccttgggtcattattcatactgacaaggaaccgagtcaatttggtgaataggaaaagccttctcatgaaaactacaatagaatactgttaccaaattcttcataagaaagatcatattatgggaatgataatcctgtttactgtggattaggtatagtgccaacagtttgaatggtaagacaacataatatatatgatagtgatgaatccttctgtgagttgtttgttccagaacacactgtctagtagaattgtgggtattttcttcttttgaatcgaacacagttgtgcatatccaattccccattgagtatttctatcaagcaagagatactgcaataagacaaactccctgtgtattcagacacagacctcagagcgtatgttgagtccccattgtcatagaaaaagacttacagtccccttcattatctgccaggactctctctgagccccacaggttctcagcacattgtgtttgacacccagcacagtgttttttctttttctttctttctttctctttctttctttctttctttctttctttctttctttctttctttctttctttctttctttccttctttctttctttttctttctttctctttctttctttctttctttctttctttctttctttctttctttctttctttctttctttttttgagacagagtcttgctctgtcgggcaagctagagtgcagtggcgctatcttggctcactgcaacctccgtctcccgggctcaagcaattctcctgcctcagcctcctgagtagctgggattgcgtgtgccaccacgcccagctaatttttgtatgtttagtagaaacgggggtttcaccatgctggccaggctggtctcgaactcctgacctcatgatccgcccgcctcggcctcccaaagtcctgggattacggacgtgagccactgcgcccggcccagcacagtgttttgtacactcccaccaccctcaagaaagcctttgaggttaggattttcaggtcatctgggagaacttaaattcttccttctgctattacaattcttctcactcagttgcctgcctcttttttttttttaatttacttgtgactgagttgaagcccagcattttactttccttaatgatctgactttcataagttgataagtcatgaaatcattatcttacattatatgagatatgagataaatcataaatcatatgaaattgataactcatatgaaaaccaaccccaccatatgttcactgtctacttgtgtccatcttcgtcccacgcaccccacaaggaccttccccgccatgtgcctcaaacatcagttcctgactcagggcctttgtatttgcagtgcccgttgcaaagagcacaattctttattttatctgtggcttgtccgtcatgtctttttttccatgacacctccacacaggccttccctgcctgcctggtttaaaattccagccccttacccttcctcctttattcttctccctagcaatttccaccatgctgcctggtgtattttcctcatttctctgtggcttctacactagaaaatatttcccttttgttcaccactatgagtctagacccatgactgccatacagcaggcattccataaatgcacctgtggagagttgacccatgcttgttgcgtgacttctgtctgatttttttctgtgttgcagcataagaagcgctaatagggagaaccaacttggctaaaacacaccaggctttttcacctctagtctgtacctgggctgtatcccttctcaaccctaaagctaaaaagtcattgtgaaccttttggtctgatgctaaagaagggaaaacaggtacaggaaatcccatgtggatgcttgcttccaggatttcctgccatgattccagaatcccacagctccaacatgattgcaaaagactccctgctcatttttcctcagcatgcacagcgctgtcctgtctcagttgcaactcgacagagccgcatttactccagaacccaatccacacacctgctcatcctgccccgagaggagtgcctgaagccaatagcagggaactagagcagacttgggtggatcttcattggatattaggtatcttgccctagataggcagcagtggccttacagatgctgacagatgatctgattagatgcacagttgctgggtggcgtctggggccagtctattggcagttctgggagtgggaactatttgggctctgcaaagatggtttcacctttaagaagggcagtatggggaggtgaagatggggcccaaaggatagaacatagtcaaagaagcagggccacaatgcccctttaattcccaagccctagttgggcagtgcttggtgacacatcccattacctcaccttagatcaatgtctactgagccatcattagctctgcttcctcacttcttcacagtatctgatggcccatcacatgctgctcaacatcttagaccaatgtctgctcacccattacctcccttcacctcatccagcactgtatctgaagcttcactattcttccttcagttttggatattttgtgatacaacattatccccaacttaggacaatgtcagctgactctcaggagggtgcctggagatcacctcttccttcctaacataccctagaacaaggtctggtccccttcattattcccattttaccttactcctaagtgtatcactcctcatgaattccaggaaatatggaggaaaacacatttcactgtacatgactttcaataatttctcctttatatttattgtaacgtgatattttagtgctgacatatatatgtatatgtatgcccatttatataaaagactagtttttagagaaattttaggttcacagcaaaatggggcagaaggtacagagatttcccatatatcccctaccctcacatatacacagcctcccccatcatcaacatcccccttcagagtggtacatttgttacaattgatgaaactacattgacactatcggccaaagtccatggtttaattagggttcagtcttgatgtgcattctgtgggttgagacaaatgaataatgacatgtatgcattattacagaaggataaagagccgtttcactgtcccaataatcctctgtgtttcgcctactcctctaaactcctggctattttcttttgtctccataattttgcctctgaaccataaagtatgcagccttttcagattgatttgtttcacttagtaatgtggatttaagtttcttccatgtcttttcgtagcttgctagctcttttttttttttttttctcattgaataatatgctattgtctggaagtaccatgacttatttatccattcacctactgaaggacaccttaattgcttccaagttttgttgattatgaataaagatgctataaaca

SEQ ID NO: 242900 - DNA, 1074 bp, Artificial Sequence
  derived and/or modified sequence
atgaagtgcggcctggccttcatcagaaaggcccacctgatcacccaccagatcatccacaccggcgagaagccctacaagtgcggccactgcggcaagctgttcaccagcaagagccagctgcacgtgcacaagagaatccacaccggcgagaagccctacgtgtgcaacaagtgcggcaaggccttcaccaacagaagcaacctgatcacccaccagaagacccacaccggcgagaagagctacatctgcagcaagtgcggcaaggccttcacccagagaagcgacctgatcacccaccagagaatccacaccggcgagaagccctacgagtgcaacacctgcggcaaggccttcacccagaagagcaacctgaacatccaccagaagatccacaccggcgagagacagtacgagtgccacgagtgcggcaaggccttcaaccagaagagcatcctgatcgtgcaccagaagatccacaccggcgagaagccctacgtgtgcaccgagtgcggcagagccttcatcagaaagagcaacttcatcacccaccagagaatccacaccggcgagaagccctacgagtgcagcgactgcggcaagagcttcaccagcaagagccagctgctggtgcaccagcccgtgcacaccggcgagaagccctacgtgtgcgccgagtgcggcaaggccttcagcggcagaagcaacctgagcaagcaccagaagacccacaccggcgagaagccctacatctgcagcgagtgcggcaagaccttcagacagaagagcgagctgatcacccaccacagaatccacaccggcgagaagccctacgagtgcagcgactgcggcaagagcttcaccaagaagagccagctgcaggtgcaccagagaatccacaccggcgagaagccctacgtgtgcgccgagtgcggcaaggccttcagcaacagaagcaacctgaacaagcaccagaccacccacaccggcgacaagccctacaagtgcggcatctgcggcaagggcttcgtgcagaagagcgtgttcagcgtgcaccagagcagccacgcctag

SEQ ID NO: 242901 - DNA, 2145 bp, Artificial Sequence
  derived and/or modified sequence
atgctggagacctacagccacctgctgagcgtgggctaccaggtgcccaagcccgaggtggtgatgctggagcagggcaaggagccctgggccctgcagggcgagagacccagacacagctgccccggcgagaagctgtgggaccacaaccagcacagaaagatcatcggctacaagcccgccagcagccaggaccagaagatctacagcggcgagaagagctacgagtgcgccgagttcggcaagagcttcacctggaagagccagttcaaggtgcacctgaaggtgcccaccggcgagaagctgtacgtgtgcatcgagtgcggcagagccttcgtgcagaagcccgagttcatcacccaccagaagacccacatgagagagaagccctacaagtgcaacgagtgcggcaagagcttcttccaggtgagcagcctgttcagacaccacagaatccacaccggcgagaagctgtacgagtgcagcgagtgcggcaagggcttcccctacaacagcgacctgagcatccacgagaagatccacaccggcgagagacaccacgagtgcaccgactgcggcaaggccttcacccagaagagcaccctgaagatccaccagaagatccacaccggcgagagaagctacatctgcatcgagtgcggccaggccttcatccagaagacccagctgatcgcccacagaagaatccacagcggcgagaagccctacgagtgcaacaactgcggcaagagcttcatcagcaagagccagctgcaggtgcaccagagagtgcacaccagagtgaagccctacatctgcaccgagtacggcaaggtgttcagcaacaacagcaacctgatcacccacgagaagatccagagcagagagaagagcagcatctgcaccgagtgcggcaaggccttcacctacagaagcgagctgatcatccaccagagaatccacaccggcgagaagccctacgagtgcagcgactgcggcagagccttcacccagaagagcgccctgaccgtgcaccagagaatccacaccggcgagaagagctacatctgcatgaagtgcggcctggccttcatcagaaaggcccacctgatcacccaccagatcatccacaccggcgagaagccctacaagtgcggccactgcggcaagctgttcaccagcaagagccagctgcacgtgcacaagagaatccacaccggcgagaagccctacgtgtgcaacaagtgcggcaaggccttcaccaacagaagcaacctgatcacccaccagaagacccacaccggcgagaagagctacatctgcagcaagtgcggcaaggccttcacccagagaagcgacctgatcacccaccagagaatccacaccggcgagaagccctacgagtgcaacacctgcggcaaggccttcacccagaagagcaacctgaacatccaccagaagatccacaccggcgagagacagtacgagtgccacgagtgcggcaaggccttcaaccagaagagcatcctgatcgtgcaccagaagatccacaccggcgagaagccctacgtgtgcaccgagtgcggcagagccttcatcagaaagagcaacttcatcacccaccagagaatccacaccggcgagaagccctacgagtgcagcgactgcggcaagagcttcaccagcaagagccagctgctggtgcaccagcccgtgcacaccggcgagaagccctacgtgtgcgccgagtgcggcaaggccttcagcggcagaagcaacctgagcaagcaccagaagacccacaccggcgagaagccctacatctgcagcgagtgcggcaagaccttcagacagaagagcgagctgatcacccaccacagaatccacaccggcgagaagccctacgagtgcagcgactgcggcaagagcttcaccaagaagagccagctgcaggtgcaccagagaatccacaccggcgagaagccctacgtgtgcgccgagtgcggcaaggccttcagcaacagaagcaacctgaacaagcaccagaccacccacaccggcgacaagccctacaagtgcggcatctgcggcaagggcttcgtgcagaagagcgtgttcagcgtgcaccagagcagccacgcctag

SEQ ID NO: 242902 - DNA, 2310 bp, Artificial Sequence
  derived and/or modified sequence
atgcccgccagctggaccagcccccagaagagcagcgccctggcccccgaggaccacggcagcagctacgagggcagcgtgagcttcagagacgtggccatcgacttcagcagagaggagtggagacacctggacctgagccagagaaacctgtacagagacgtgatgctggagacctacagccacctgctgagcgtgggctaccaggtgcccaagcccgaggtggtgatgctggagcagggcaaggagccctgggccctgcagggcgagagacccagacacagctgccccggcgagaagctgtgggaccacaaccagcacagaaagatcatcggctacaagcccgccagcagccaggaccagaagatctacagcggcgagaagagctacgagtgcgccgagttcggcaagagcttcacctggaagagccagttcaaggtgcacctgaaggtgcccaccggcgagaagctgtacgtgtgcatcgagtgcggcagagccttcgtgcagaagcccgagttcatcacccaccagaagacccacatgagagagaagccctacaagtgcaacgagtgcggcaagagcttcttccaggtgagcagcctgttcagacaccacagaatccacaccggcgagaagctgtacgagtgcagcgagtgcggcaagggcttcccctacaacagcgacctgagcatccacgagaagatccacaccggcgagagacaccacgagtgcaccgactgcggcaaggccttcacccagaagagcaccctgaagatccaccagaagatccacaccggcgagagaagctacatctgcatcgagtgcggccaggccttcatccagaagacccagctgatcgcccacagaagaatccacagcggcgagaagccctacgagtgcaacaactgcggcaagagcttcatcagcaagagccagctgcaggtgcaccagagagtgcacaccagagtgaagccctacatctgcaccgagtacggcaaggtgttcagcaacaacagcaacctgatcacccacgagaagatccagagcagagagaagagcagcatctgcaccgagtgcggcaaggccttcacctacagaagcgagctgatcatccaccagagaatccacaccggcgagaagccctacgagtgcagcgactgcggcagagccttcacccagaagagcgccctgaccgtgcaccagagaatccacaccggcgagaagagctacatctgcatgaagtgcggcctggccttcatcagaaaggcccacctgatcacccaccagatcatccacaccggcgagaagccctacaagtgcggccactgcggcaagctgttcaccagcaagagccagctgcacgtgcacaagagaatccacaccggcgagaagccctacgtgtgcaacaagtgcggcaaggccttcaccaacagaagcaacctgatcacccaccagaagacccacaccggcgagaagagctacatctgcagcaagtgcggcaaggccttcacccagagaagcgacctgatcacccaccagagaatccacaccggcgagaagccctacgagtgcaacacctgcggcaaggccttcacccagaagagcaacctgaacatccaccagaagatccacaccggcgagagacagtacgagtgccacgagtgcggcaaggccttcaaccagaagagcatcctgatcgtgcaccagaagatccacaccggcgagaagccctacgtgtgcaccgagtgcggcagagccttcatcagaaagagcaacttcatcacccaccagagaatccacaccggcgagaagccctacgagtgcagcgactgcggcaagagcttcaccagcaagagccagctgctggtgcaccagcccgtgcacaccggcgagaagccctacgtgtgcgccgagtgcggcaaggccttcagcggcagaagcaacctgagcaagcaccagaagacccacaccggcgagaagccctacatctgcagcgagtgcggcaagaccttcagacagaagagcgagctgatcacccaccacagaatccacaccggcgagaagccctacgagtgcagcgactgcggcaagagcttcaccaagaagagccagctgcaggtgcaccagagaatccacaccggcgagaagccctacgtgtgcgccgagtgcggcaaggccttcagcaacagaagcaacctgaacaagcaccagaccacccacaccggcgacaagccctacaagtgcggcatctgcggcaagggcttcgtgcagaagagcgtgttcagcgtgcaccagagcagccacgcctag

SEQ ID NO: 242903 - DNA, 1074 bp, Artificial Sequence
  derived and/or modified sequence
atgaagtgcggcctggcgttcattcggaaagctcatttaattacgcatcagatcatccacaccggcgagaagccctacaagtgcggtcactgcggaaaactgttcaccagcaaatctcagctgcacgtccacaagcggatccataccggggaaaaaccatatgtgtgcaacaagtgtggaaaggctttcactaacagatcgaatttgatcactcaccagaagacacacacaggagaaaagagctatatctgttccaaatgcggcaaagcatttacgcagcgctccgacctgatcacacatcagcgaattcataccggcgaaaagccttacgaatgcaatacatgtggtaaggcctttactcagaagtccaatctgaatatacaccagaagattcacaccggggaacgccaatatgagtgccacgagtgcggcaaggcctttaaccaaaagtctatattgatcgtccaccaaaagattcataccggagaaaaaccgtacgtctgtactgagtgcggtcgagcatttataagaaaaagcaatttcattacccatcaaaggatccacaccggagagaagccctatgaatgctccgactgcgggaaatcttttacttcaaaatcccagttgttagtccaccagccagtgcatactggagagaaaccttacgtctgcgcagaatgcggaaaagccttctccggaaggtcaaacctgtcaaagcaccagaagacccatactggagagaaaccttatatctgttccgaatgcggaaaaacattccgacagaaaagtgaactcattacgcaccataggattcacaccggagaaaagccttacgagtgctccgattgcggaaaaagcttcacaaagaaatcacaactgcaggtgcatcagaggattcatactggggaaaagccctacgtgtgtgcagagtgcggcaaggcgtttagtaacaggagtaacctcaacaagcatcagactacccacaccggcgacaagccctacaagtgtgggatttgcggcaaaggcttcgtccagaagagcgtgttttcagtccatcaatcgagccatgcctag

SEQ ID NO: 242904 - DNA, 2145 bp, Artificial Sequence
  derived and/or modified sequence
atgctcgagacttattcccacctcctctctgtgggctaccaggtcccaaagccagaggtggtgatgctggagcagggaaaagagccttgggctttacaaggagaaaggccgcgccactcctgtcctggtgagaaactatgggaccacaaccaacataggaagatcataggttataagcctgcctcaagccaggaccagaaaatttacagcggcgagaagtcttatgagtgtgctgaattcggtaagtccttcacctggaagagtcaattcaaagtgcaccttaaggtgcctaccggggaaaagttatatgtgtgcattgagtgtggacgcgcattcgtgcaaaagccagaatttatcacacaccagaagacccatatgagagaaaagccgtataagtgcaatgagtgtggcaaatctttctttcaggtgtcctcactgtttaggcatcacagaattcataccggggagaagctgtatgagtgcagtgagtgtggcaaggggttcccatacaacagcgacctcagtattcacgaaaagattcacaccggtgagaggcaccacgagtgcaccgattgtggaaaagcattcacccagaaaagcactctcaagattcatcagaagatccacacaggcgagcgcagctatatctgcatcgaatgtgggcaggcatttatccagaagacgcaactgattgctcatagaaggattcactccggagaaaaaccctacgagtgcaataactgcgggaaatcgttcatttctaaatcacagcttcaggttcaccagcgtgtgcatactcgggttaagccatacatctgcactgaatacggtaaggtgttctctaataatagcaatctgatcacccacgagaaaatccaatcacgggagaaatcttcaatatgtactgaatgcggaaaagcctttacttatcgttcagagctgattatccatcagcgtattcacacaggtgaaaagccatacgagtgcagtgattgcggcagggcattcacccaaaagtccgcactcacagtgcaccagagaattcacacaggcgagaaatcttacatctgcatgaagtgcggcctggcatttatacgaaaggcccacttaataacacatcagattatccacaccggagagaaaccttataaatgcggacattgtggcaagctgttcaccagcaagagccagttacatgtccataagagaatccatactggtgaaaagccgtacgtctgcaacaaatgtggcaaagcctttacaaatagatctaacctgatcacacatcaaaaaacccacactggggagaagagctacatttgttccaagtgtggaaaagcatttacacagcggtctgatctcattacacaccagcggattcacacaggcgaaaaaccttatgaatgtaacacctgcggaaaggcattcacgcagaagtccaacctaaacatccaccagaaaatccataccggcgaaaggcagtatgaatgccatgagtgtgggaaggcttttaaccagaaatctattctgatcgtgcaccagaagattcacactggagagaagccttacgtttgtactgagtgtggacgcgcgttcataaggaagtccaatttcattacgcaccagcggatccatacaggagagaaaccttatgagtgtagcgactgcgggaagagtttcacttctaagagccagctgttagtccatcagcctgtccatacaggtgaaaagccttacgtgtgtgcggaatgtggtaaagcattctccggcagaagcaacctatctaagcaccagaagacccatactggagaaaaaccttatatttgctccgaatgtgggaagacttttcggcagaagtcagaactgatcacccaccaccgcatccatacgggagagaaaccctatgaatgcagtgactgcggaaagtcgttcaccaagaagtcccagctgcaagtccaccagagaattcacacaggtgaaaaaccctacgtgtgtgcagaatgcggcaaagcatttagtaaccgatctaacctaaacaagcatcagactacacacacaggggacaaaccctataaatgcgggatctgcgggaagggcttcgtccagaaatcagtatttagtgtgcatcagtccagtcacgcctag

SEQ ID NO: 242905 - DNA, 2310 bp, Artificial Sequence
  derived and/or modified sequence
atgcctgcctcctggacaagcccacagaaaagctctgcgctggcaccagaggaccatggaagcagttacgagggatccgtctctttcagagatgtggccatagacttcagccgcgaagagtggcgtcacctcgacctgtcgcagcggaatctttatcgagatgtaatgttggagacttacagtcacctcctgagtgtgggataccaggtcccaaaacccgaggttgtcatgcttgagcaaggcaaagagccatgggccttacaaggcgagaggccccgccatagttgtcccggggaaaaactctgggatcacaaccagcatcgcaagatcatcgggtacaagcctgctagctcccaggatcagaagatttactcaggagagaaaagctatgagtgcgccgaattcggaaagtcttttacatggaagtcacagttcaaggtgcacttgaaagtgccaacaggagagaagttgtacgtttgcatcgagtgtggcagggcctttgtgcagaaaccagaatttattactcatcagaagacacacatgcgggaaaagccctacaaatgcaacgaatgtggcaaatcttttttccaggtgagctcccttttccgccaccaccggattcacactggggaaaaactttacgagtgctcagagtgcggtaaaggtttcccttacaatagcgacctaagcattcatgagaaaatccataccggtgaacggcatcacgagtgcacggactgcgggaaggccttcactcagaaatcaaccctgaagatacatcagaaaatacatactggcgagcggtcatacatctgtattgaatgtgggcaggcctttattcaaaagacgcagctgatagcacatcgaaggatacatagcggtgaaaagccctacgagtgcaataactgtggcaaatcatttatctctaagagtcagctacaagtccaccagcgagtgcacaccagagtgaaaccctatatatgcacggagtatgggaaagtttttagcaataattccaatctgattacgcacgagaaaattcagagtagagagaaatcaagcatttgcacagaatgtggcaaggccttcacctacaggagcgaattaatcatccaccagcgaatccataccggggaaaaaccctacgaatgttctgactgcggacgggccttcacacaaaaatcagccctcactgtacatcagaggatacacacaggtgaaaagtcctacatttgtatgaagtgtggcctggctttcatccggaaggctcatctcatcacacatcaaattattcatacgggtgaaaaaccgtacaaatgtggacactgtgggaaactctttacctccaagagccagctccatgtacataaacgcatccacacgggcgaaaaaccttacgtgtgcaataaatgtggaaaggcattcacaaatcggtctaatctgataactcaccagaaaacacatacaggagagaagtcctacatttgctccaaatgtggaaaggcattcactcagcgctctgatctcatcactcaccaacgcatccataccggtgaaaaaccttatgagtgtaacacatgcgggaaagcttttactcagaagtcgaatctgaatatccatcagaaaattcacaccggcgaaagacaatacgaatgccatgagtgcggtaaggccttcaatcagaaaagcatcctaatcgtccatcagaaaatccatactggagagaagccatacgtgtgcactgagtgtgggagggcgttcatccggaaaagtaatttcatcacccatcagcggatacatacaggggagaagccctatgagtgtagcgactgcgggaagtccttcacatctaaatctcaactgctggtgcatcagccagtccacacaggggagaaaccatatgtttgcgctgagtgcgggaaggcgttcagtggacgctccaacctaagtaagcaccagaagacccacactggtgaaaagccatacatttgctccgagtgcggcaaaaccttcagacagaaatcagagctgattactcaccaccggatccacaccggcgagaagccctacgagtgttctgattgcggaaaatctttcaccaagaagtcccaactccaggtccaccagcgcatccacactggcgaaaagccatatgtgtgcgccgagtgcggaaaagcctttagcaatcgttcgaatctgaacaagcaccagacaacacataccggtgacaagccatacaagtgcggaatctgtggaaaggggttcgtccaaaagtctgtgttttccgtgcaccaatcatctcacgcctag

SEQ ID NO: 242906 - DNA, 1074 bp, Artificial Sequence
  derived and/or modified sequence
atgaagtgtggcctggccttcatcaggaaggcccacctgatcacccaccagatcatccacactggagagaagccctacaagtgtggccactgcggcaagctgttcaccagcaagagccagctgcacgtgcacaagaggatccacactggagagaagccctacgtgtgcaacaagtgtgggaaggccttcaccaacagaagcaacctgatcacccaccagaagacccacactggagagaagagctacatctgcagcaaatgtgggaaggccttcacccagaggagtgacctgatcacccaccagaggatccacactggagagaagccctatgagtgcaacacctgtgggaaggccttcacccagaagagcaacctgaacatccaccagaagatccacactggagagcggcagtatgaatgtcatgaatgtgggaaggccttcaaccagaagagcatcctgattgtgcaccagaagatccacactggagagaagccctacgtgtgcacagaatgtggccgggccttcatcaggaagagcaacttcatcacccaccagaggatccacactggagagaagccctatgaatgtagtgactgtgggaagagcttcaccagcaagagccagctgctggtgcaccagcctgtgcacactggagagaagccctacgtgtgtgccgagtgtgggaaggccttcagcggccgcagcaacctgagcaagcaccagaagacccacactggagagaagccctacatctgcagtgaatgtgggaagaccttccggcagaagtctgagctgatcacccaccaccgcatccacactggagagaagccctatgaatgtagtgactgtgggaagagcttcaccaagaagagccagctgcaggtgcaccagaggatccacactggagagaagccctacgtgtgtgccgagtgtgggaaggccttcagcaacagaagcaacctgaacaagcaccagaccacccacactggagacaagccctacaagtgtggcatctgtgggaaaggatttgtgcagaagtctgtgttttctgtgcaccagagcagccacgcctag

SEQ ID NO: 242907 - DNA, 2145 bp, Artificial Sequence
  derived and/or modified sequence
atgctggagacctacagccacctgctgtctgtgggctaccaggtgcccaagccagaggtggtgatgctggagcagggcaaggagccctgggccctgcagggcgagcggcccaggcacagctgccctggagagaagctgtgggaccacaaccagcacaggaagatcatcggctacaagccagccagcagccaggaccagaagatctacagcggggagaagagctatgaatgtgccgagtttgggaagagcttcacctggaagagccagttcaaggtgcacctgaaggtgcccaccggggagaagctgtatgtgtgcattgaatgtggccgggcctttgtgcagaagccagagttcatcacccaccagaagacccacatgagggagaagccctacaagtgcaatgaatgtgggaagagcttcttccaggtgagcagcctcttccgccaccaccgcatccacactggagagaagctgtatgagtgcagtgaatgtgggaagggcttcccctacaacagcgacctgagcatccacgagaagatccacactggagagcggcaccacgagtgcacagactgtgggaaggccttcacccagaagagcaccctgaagatccaccagaagatccacactggagagaggagctacatctgcattgaatgtggccaggccttcatccagaagacccagctgattgcccaccggcgcatccacagcggggagaagccctatgagtgcaacaactgtgggaagagcttcatcagcaagagccagctgcaggtgcaccagagggtgcacaccagggtgaagccctacatctgcacagaatatggcaaggtgttcagcaacaacagcaacctgatcacccatgagaagatccagagccgggagaagagcagcatctgcacagaatgtgggaaggccttcacctacagaagtgagctgatcatccaccagaggatccacactggagagaagccctatgagtgcagcgactgtggccgggccttcacccagaagagcgccctgactgtgcaccagaggatccacactggagagaagagctacatctgcatgaagtgtggcctggccttcatcaggaaggcccacctgatcacccaccagatcatccacactggagagaagccctacaagtgtggccactgtgggaagctgttcaccagcaagagccagctgcacgtgcacaagaggatccacactggagagaagccctacgtgtgcaacaagtgtgggaaggccttcaccaacagaagcaacctgatcacccaccagaagacccacactggagagaagagctacatctgcagcaaatgtgggaaggccttcacccagaggagtgacctgatcacccaccagaggatccacactggagagaagccctatgagtgcaacacctgtgggaaggccttcacccagaagagcaacctgaacatccaccagaagatccacactggagagcggcagtatgagtgccatgaatgtgggaaggccttcaaccagaagagcatcctgattgtgcaccagaagatccacactggagagaagccctacgtgtgcacagaatgtggccgggccttcatcaggaagagcaacttcatcacccaccagaggatccacactggagagaagccctatgagtgcagcgactgtgggaagagcttcaccagcaagagccagctgctggtgcaccagcctgtgcacactggagagaagccctacgtgtgtgctgaatgtgggaaggccttcagcggccgcagcaacctgagcaagcaccagaagacccacactggagagaagccctacatctgcagtgaatgtgggaagaccttccggcagaagtctgagctgatcacccaccaccgcatccacactggagagaagccctatgagtgcagcgactgtgggaagagcttcaccaagaagagccagctgcaggtgcaccagaggatccacactggagagaagccctacgtgtgtgctgaatgtgggaaggccttcagcaacagaagcaacctgaacaagcaccagaccacccacactggagacaagccctacaagtgtggcatctgtgggaagggctttgtgcagaagagcgtcttctctgtgcaccagagcagccacgcctag

SEQ ID NO: 242908 - DNA, 2310 bp, Artificial Sequence
  derived and/or modified sequence
atgcctgcctcctggaccagcccccagaagagcagcgccctggccccagaagatcatggcagcagctatgagggctctgtgtccttcagagatgtggccatcgacttcagccgggaggagtggaggcacctggacctgagccagaggaacctgtacagagatgtgatgctggagacctacagccacctgctgtctgtgggctaccaggtgcccaagccagaggtggtgatgctggagcagggcaaggagccctgggccctgcagggcgagcggcccaggcacagctgccctggagagaagctgtgggaccacaaccagcacaggaagatcatcggctacaagccagccagcagccaggaccagaagatctacagcggggagaagagctatgaatgtgccgagtttgggaagagcttcacctggaagagccagttcaaggtgcacctgaaggtgcccactggagagaagctgtatgtgtgcattgaatgtggccgggcctttgtgcagaagccagagttcatcacccaccagaagacccacatgagggagaagccctacaagtgcaatgaatgtgggaagagcttcttccaggtgagcagcctcttccgccaccaccgcatccacactggagagaagctgtatgaatgttctgaatgtgggaagggcttcccctacaacagcgacctgagcatccacgagaagatccacactggagagcggcaccatgaatgtacagactgtgggaaggccttcacccagaagagcaccctgaagatccaccagaagatccacactggagagaggagctacatctgcattgaatgtggccaggccttcatccagaagacccagctgattgcccaccggcgcatccacagcggggagaagccctatgagtgcaacaactgtgggaagagcttcatcagcaagagccagctgcaggtgcaccagagggtgcacaccagggtgaagccctacatctgcacagaatatggcaaggtgttcagcaacaacagcaacctgatcacccatgagaagatccagagccgggagaagagcagcatctgcacagaatgtgggaaggccttcacctacagaagtgagctgatcatccaccagaggatccacactggagagaagccctatgaatgtagtgactgtggccgggccttcacccagaagagcgccctgactgtgcaccagaggatccacactggagagaagagctacatctgcatgaagtgtggcctggccttcatcaggaaggcccacctgatcacccaccagatcatccacactggagagaagccctacaagtgtggccactgcggcaagctgttcaccagcaagagccagctgcacgtgcacaagaggatccacactggagagaagccctacgtgtgcaacaagtgtgggaaggccttcaccaacagaagcaacctgatcacccaccagaagacccacactggagagaagagctacatctgcagcaaatgtgggaaggccttcacccagaggagtgacctgatcacccaccagaggatccacactggagagaagccctatgagtgcaacacctgtgggaaggccttcacccagaagagcaacctgaacatccaccagaagatccacactggagagcggcagtatgaatgtcatgaatgtgggaaggccttcaaccagaagagcatcctgattgtgcaccagaagatccacactggagagaagccctacgtgtgcacagaatgtggccgggccttcatcaggaagagcaacttcatcacccaccagaggatccacactggagagaagccctatgaatgtagtgactgtgggaagagcttcaccagcaagagccagctgctggtgcaccagcctgtgcacactggagagaagccctacgtgtgtgccgagtgtgggaaggccttcagcggccgcagcaacctgagcaagcaccagaagacccacactggagagaagccctacatctgcagtgaatgtgggaagaccttccggcagaagtctgagctgatcacccaccaccgcatccacactggagagaagccctatgaatgtagtgactgtgggaagagcttcaccaagaagagccagctgcaggtgcaccagaggatccacactggagagaagccctacgtgtgtgccgagtgtgggaaggccttcagcaacagaagcaacctgaacaagcaccagaccacccacactggagacaagccctacaagtgtggcatctgtgggaaaggatttgtgcagaagtctgtgttttctgtgcaccagagcagccacgcctag

SEQ ID NO: 242909 - DNA, 1074 bp, Artificial Sequence
  derived and/or modified sequence
atgaagtgcggcctggccttcatccggaaggcccacctgatcacccaccagatcattcacacaggagaaaaaccttataagtgcggtcactgcgggaagctgtttaccagcaaaagtcaattacatgtacataaaagaattcacactggcgagaaaccctacgtgtgtaataaatgcggtaaggcttttactaatcgaagcaatctgatcactcaccagaaaacccacacaggcgaaaagagctacatttgttccaagtgcgggaaggctttcacccagcggtctgacttaatcactcaccaacggatccatactggtgagaagccatacgagtgtaatacctgtggaaaggctttcacgcagaagtccaatctgaatatccatcagaaaattcacactggtgagcgccagtacgaatgccacgagtgtgggaaagcctttaatcagaaatccattttgatagtgcatcagaagatccacactggtgaaaaaccgtacgtgtgcactgagtgtggcagagcattcatcaggaagtcaaactttatcactcatcagcgcatccatacaggcgagaagccatatgagtgctcggattgtgggaaatcatttacctccaagtcacagctgctggtccaccagcctgttcacaccggcgagaagccttacgtgtgcgctgaatgtggtaaagcctttagcggtagaagcaacctttcaaagcaccagaagactcatacaggagaaaagccctatatctgttcagagtgcggaaagacttttcggcagaaaagcgagctaataactcaccatagaatccatacgggtgagaagccctatgaatgctcagactgtgggaaaagttttaccaagaagtcccaactccaagtgcaccagcgaatacacactggcgagaagccctacgtgtgcgccgaatgtggcaaagcattctcgaacaggtctaacttaaacaaacaccagaccacacacaccggcgataaaccttataaatgtggaatctgtggtaaaggctttgttcaaaaaagcgtgttctcagtgcaccaaagtagtcatgcatag

SEQ ID NO: 242910 - DNA, 2145 bp, Artificial Sequence
  derived and/or modified sequence
atgctggagacctacagccacctgctgagcgtgggctaccaggtgcccaagcccgaggttgtgatgctggaacagggcaaagagccatgggccttgcagggagagaggccccgccattcctgtcccggtgaaaagctgtgggaccataatcagcacagaaaaataatcgggtacaaacctgcatcatctcaggatcagaaaatctattccggggagaaaagctacgagtgtgctgaatttggtaaatcttttacttggaagtcacaatttaaggtacatctaaaagtgcccacgggcgagaagctgtatgtttgcatcgagtgcggtcgcgcttttgttcaaaaaccggaatttatcacccaccagaagactcatatgagagagaagccttataagtgcaatgaatgcggaaagtcattttttcaggtctccagcctgttccggcatcacaggattcacacaggcgagaagctctatgaatgttctgagtgcggaaaaggattcccttataattccgatctgagtattcacgagaagatccatacgggggagcggcatcacgaatgtactgactgcgggaaggcctttacacagaaatcaactctgaaaatacaccagaagatccatacgggtgaaagatcttacatttgtatcgaatgcgggcaggcctttattcaaaaaacccagttaatagctcatcggcgtattcactccggcgagaaaccatacgaatgtaacaactgcgggaaaagctttataagtaaatcccaactgcaagtgcatcagcgcgttcacaccagggtcaagccgtacatctgcactgaatacggcaaagtcttcagcaacaacagcaatctcataacacacgagaagattcagagcagggagaagtcttctatatgtactgagtgtgggaaggcgttcacctatcgaagtgagttgatcatccatcagcgcatacatacaggcgagaaaccttatgaatgctctgattgcggtcgcgccttcacacaaaagtcggctctcactgttcaccagcgcatccacacaggagaaaagagctatatttgtatgaaatgcgggttggcctttattcgaaaggcccatctcatcacacatcagattatccatacaggcgaaaagccctataaatgtggtcactgcggcaaactatttacgagtaagagtcaactccacgtgcacaaacgcatacacaccggcgaaaagccttatgtgtgcaacaaatgcggaaaggcctttaccaataggtccaatttaattactcaccaaaagacccatactggcgagaagtcatatatttgttctaaatgtgggaaagctttcacacagcggagcgatttgataacacaccagcgaatccacactggtgaaaaaccatatgagtgcaacacatgcggcaaggcgtttacgcagaagagcaaccttaacatccaccagaagatccacactggagagcgacagtacgagtgccatgagtgcggaaaggccttcaatcaaaagtcaatcctcatcgtgcatcagaagatccataccggagaaaagccttacgtatgtacagaatgcggcagagctttcatccgtaagagtaacttcatcacccatcagcgcatacatacaggcgagaagccttacgagtgctctgattgcgggaagtcctttacatcgaagtcccaattgcttgtgcatcaacctgtgcacacaggggaaaagccttatgtttgcgctgaatgtggcaaggcctttagcggtcggagtaacctgagcaagcaccaaaaaacccataccggagagaagccctatatctgctctgaatgcggtaagaccttccggcagaagtcggagctcataacccatcatcggatccataccggggaaaagccgtatgaatgtagcgactgtggaaagagctttacaaagaaaagccagcttcaggtccaccagcgcatccatacaggtgagaaaccgtatgtgtgtgcggaatgtgggaaggcattctccaacaggtctaacctgaacaaacatcaaacgacacatactggggacaaaccatacaagtgcggcatatgtggcaaaggcttcgtccagaaatccgtgttctctgtgcaccagtccagtcatgcatag

SEQ ID NO: 242911 - DNA, 2310 bp, Artificial Sequence
  derived and/or modified sequence
atgcccgccagctggaccagcccccagaagagcagcgccctggccccagaggatcatggcagtagctacgaaggatcagtatcatttcgagacgtggccattgactttagtcgtgaggagtggcgccacctggacctgagtcaaaggaatttatatcgcgacgtaatgctggagacctactcccatctgctgtccgtgggataccaggtgccaaagccggaggttgtgatgcttgaacagggcaaggagccctgggcactgcaaggcgaaagaccacggcacagttgccccggtgagaagttgtgggatcacaatcagcatcggaagatcataggttacaaacccgcgtcaagtcaggaccagaaaatctactcaggtgagaaatcatacgagtgtgccgagttcggcaagagcttcacttggaaatctcaatttaaagtccacttgaaggtccctacaggtgaaaagctgtacgtgtgcattgaatgcgggagagctttcgtccagaagcccgagttcattacccaccagaaaactcatatgcgggaaaaaccatacaagtgtaacgagtgcggcaaatcctttttccaggtaagcagcttgtttcggcatcatcgcatacatacgggggaaaagctttacgaatgttctgagtgcggtaaggggttcccatacaactcagacttgagtattcatgaaaaaatacacacaggggagaggcatcacgaatgtaccgactgtggaaaagcctttactcaaaagagtaccctgaagatacatcaaaagatacataccggcgaaaggagctacatctgcatagagtgcggacaggctttcattcagaaaacgcagctcattgcccatagaagaatccactctggtgaaaaaccgtacgaatgtaacaattgcggcaagagcttcatcagtaaaagccaactccaggtccatcagagggtacacacacgcgtaaaaccatacatctgcacagagtatgggaaggttttttctaacaactccaacctgattacacacgaaaagattcagtcacgggagaagtcatcaatttgcacagagtgcggaaaagcttttacataccgctccgagcttataatccatcagagaatccacaccggcgagaaaccatatgagtgcagtgactgcgggcgggcgtttacccagaagagcgcattgaccgtgcaccagcggatacacaccggggagaaaagctatatctgcatgaaatgcggtctggcattcatcagaaaggcacatctgatcactcaccaaatcatccatacaggagaaaagccatacaaatgtggacactgtggaaagttgttcacttctaaatcgcagctgcacgtacataagcgaatccataccggggagaaaccatatgtgtgcaataaatgcgggaaagcatttaccaacaggtctaatctgatcacccatcagaaaacacacaccggagagaagtcttatatttgtagtaaatgtgggaaagcctttactcaacgttcagatcttatcacccaccagcgcatccacaccggcgagaagccctatgaatgtaacacctgtggaaaggccttcacacagaaaagcaatctaaatatacatcagaaaatacacacaggagagagacagtacgagtgccacgaatgcggcaaggcctttaaccagaagagtatactgatagttcaccagaaaattcacacaggagagaagccatatgtctgtaccgagtgcggaagggctttcattaggaagagtaactttatcactcatcagcggatccacacaggcgaaaagccgtacgaatgcagcgattgcggcaaaagttttaccagtaaatcccaacttctggtgcaccaacctgtgcacaccggcgagaaaccctacgtgtgcgcggagtgcggaaaagcctttagcggccgctccaacctgagcaaacaccaaaaaactcatacaggggaaaaaccttacatctgctccgagtgcggcaagaccttcaggcaaaaatccgagctcatcacacaccaccgaatccacactggagagaaaccctacgagtgtagtgactgcggtaaatcattcaccaagaaatcacagctgcaggtacaccagcgcatccacacaggggagaagccctacgtgtgcgctgagtgcggcaaggccttcagcaaccgctcaaacctgaacaagcaccagactacccacacgggagataaaccttataagtgtggtatctgcgggaaggggttcgttcagaagtctgtgttcagcgtgcatcaaagcagtcatgcttag

SEQ ID NO: 242912 - DNA, 1074 bp, Artificial Sequence
  derived and/or modified sequence
atgaagtgcggactggctttcataagaaaagcccacctgatcacgcaccagatcatccatacaggagagaagccatataagtgtgggcactgcggaaaactgtttacatctaaatcgcagctgcatgtgcataaaaggattcataccggcgagaagccgtacgtctgcaacaagtgtggtaaagccttcacaaaccgttccaatctcattactcaccagaagacacatacaggcgagaaatcttacatctgttccaagtgtggtaaggctttcacacagcgttcagatctgattacgcaccagcggattcatactggcgaaaagccgtacgaatgtaacacatgtgggaaggcttttactcagaaatccaatcttaatattcaccagaagatacatacaggagaacgccagtacgagtgccacgagtgtggcaaggccttcaaccagaagtccatcttgatcgtccaccaaaaaatccacaccggcgagaagccctatgtctgcaccgagtgcggtagggctttcatccgtaagtccaacttcataacacatcagcgcattcataccggcgagaagccttatgagtgttccgattgtggtaaaagctttacatccaagagtcagctcttggtgcaccagcctgtccacacgggagagaaaccatatgtttgtgcagagtgtggcaaggccttttccgggaggtctaacctgagtaagcatcagaaaacccatacgggggagaagccgtacatctgttcagagtgtggtaaaacttttagacagaagtcagagctaataacccaccaccgaatccacactggtgaaaaaccttacgagtgctcggattgcggtaaaagtttcacgaaaaagtctcagctccaggtacaccagaggattcacactggtgaaaaaccttatgtctgcgcagagtgcgggaaagcctttagtaaccggagtaacctgaataagcaccaaactacccacactggggataaaccctacaaatgtggcatatgcggcaaaggattcgtacagaaatccgtgttctctgttcatcagagtagtcacgcctag

SEQ ID NO: 242913 - DNA, 2145 bp, Artificial Sequence
  derived and/or modified sequence
atgcttgagacatatagtcatctgctgtctgttgggtatcaagtccctaaaccagaagtcgtgatgctcgagcaaggaaaggagccgtgggcacttcagggggaaaggcctaggcacagttgtcccggtgagaaactgtgggatcataatcaacacagaaagattattggatacaagcccgcttcaagccaggaccagaaaatctatagcggagaaaagtcttacgaatgcgcggaattcggcaagagtttcacctggaagtctcaatttaaagttcatctcaaagtcccgacgggcgagaagctgtacgtgtgcatcgaatgcggacgagcttttgtacagaagcctgaattcatcacacaccaaaaaactcatatgcgcgagaaaccgtataagtgcaatgaatgcggcaagagttttttccaggtgtcctctcttttccgacaccaccggattcacacaggagagaagttgtacgaatgctccgagtgtggcaaggggttcccatataatagcgacctgtccattcacgaaaaaatccacacaggtgaacggcatcacgaatgtacggactgcggaaaagcctttactcagaaaagtacgctgaagatccaccagaaaatccatactggagaacggtcctatatatgcatcgagtgcggtcaggccttcatccagaagactcagttgatcgcgcatcgccgaattcactctggcgagaagccatatgaatgcaacaattgtgggaagagcttcatttccaaatcccagctccaagtgcaccagcgcgtgcacaccagggtgaaaccatacatttgtacagagtacggcaaggtgttttctaataattctaatctgattacacacgaaaagatacagtctcgggagaaatccagcatctgcaccgaatgcggcaaagcattcacctaccgcagcgagctgattatccaccagcgtattcatactggggaaaagccctacgaatgttctgactgtggccgagcattcacacaaaagtccgccttgacagtccatcagaggatccacacaggggaaaagtcttacatttgtatgaagtgcggtctggccttcatcaggaaggcacatctgatcacgcaccagatcatccataccggggagaagccttataagtgcgggcactgtgggaagcttttcactagtaagagtcagttacacgtgcacaaaagaatccacaccggcgagaagccttacgtttgcaataagtgcggtaaagcatttaccaatcggtccaaccttataacccatcagaagacacacactggcgagaaatcctacatctgttcgaagtgcggtaaggcattcacccagcggtccgacttgattacccaccaaaggatccataccggagagaagccctatgaatgcaatacctgcgggaaggcattcacccagaaatccaacctaaatattcaccagaagatccacaccggagaacgacagtatgagtgtcacgagtgcgggaaggcgttcaatcagaaaagtattctaatcgtccatcagaagattcacactggagagaaaccctacgtgtgtaccgaatgtggcagggctttcattcggaagtcaaacttcattacacatcagagaatccatactggggaaaaaccttacgaatgttcagactgcgggaaatcattcacatccaaatcacagctgctcgtgcatcagcccgtgcacacaggagaaaaaccttatgtgtgtgccgaatgtggtaaggctttttccggcaggtccaacttaagcaagcatcagaagacccataccggcgagaagccatacatttgtagcgaatgcggaaagaccttcaggcaaaagagcgaactcattactcatcatcgcattcacaccggggaaaagccctatgagtgcagtgattgtggaaaaagttttacaaaaaaaagccagttgcaggttcatcagcgcattcataccggcgaaaagccatatgtttgcgcagaatgcgggaaggcattcagtaatcgatccaatctgaacaaacaccagaccacacacacaggggataagccatataagtgcggtatttgcggtaaaggtttcgtccagaaatctgtgtttagcgtgcatcaaagttctcacgcctag

SEQ ID NO: 242914 - DNA, 2310 bp, Artificial Sequence
  derived and/or modified sequence
atgcctgcttcctggacctcaccccagaagagctccgcattagccccagaggatcacggaagctcatacgaaggctcagtcagctttcgggacgtggccatcgacttcagccgggaggagtggcgccacctagacctgtcacaacgtaacctgtaccgagacgtgatgttggagacatactcccatttgctgtctgttggttaccaagtccctaaaccagaggtagtgatgctcgagcagggtaaagagccatgggcacttcagggcgagcgaccacgccactcatgtcctggcgaaaagctgtgggaccataatcaacacaggaagatcatcggatacaaacctgcatcctctcaggaccagaaaatctactctggagagaaatcttacgagtgtgcagaatttggcaaatcctttacttggaaatcacagtttaaagtgcacctaaaagtccctaccggagaaaaactatatgtgtgcatcgaatgtggtcgcgctttcgttcaaaagcccgaatttatcacccaccaaaagactcacatgcgcgagaagccatataagtgcaacgagtgtggcaagtctttcttccaggtgagctctcttttccggcatcatcgtatacacaccggagagaagctttatgagtgttcggaatgcggcaagggcttcccctacaactccgatctcagcattcacgagaaaatccacaccggggagaggcaccacgagtgcaccgactgcggtaaagctttcacccagaagagcacactgaaaatccaccaaaagatccacactggagagcggtcttatatatgcatagagtgcggccaagcatttatccaaaagacacagctgattgcgcatcggaggatccattccggtgaaaagccttatgaatgtaataactgcggtaagtcctttatcagcaagagccagctgcaggttcaccagcgcgtgcatacccgcgtgaagccttatatctgtaccgagtacggcaaagtattctccaacaacagcaacctcatcacccatgagaagatccagtcccgcgaaaaatcctcgatctgtaccgagtgtggaaaggcgttcacttatcgctctgaactgattatacaccagaggattcatacaggggagaaaccttacgaatgtagcgattgcgggagggctttcacgcagaaatcagctctgactgttcaccaacgaatccacaccggagagaaaagctacatctgcatgaaatgcggtctcgcctttatcagaaaggctcacctgattactcatcaaatcattcatacaggcgagaaaccctacaaatgcgggcattgtggcaagctattcactagtaagagccagttgcatgttcacaaaagaatccacaccggggaaaagccttacgtctgcaacaaatgcggcaaagccttcactaatagatcaaacctcatcacacaccagaaaacgcacacgggggaaaaatcctacatttgttctaagtgcgggaaagctttcacgcagcgtagcgacctgataacccatcagcggatacatactggcgagaaaccctacgaatgcaatacgtgcggaaaagcatttacacagaagagcaatctgaacattcaccagaagatccatactggagagcggcagtacgaatgtcatgaatgcgggaaggccttcaatcagaaaagcattctaatcgtgcatcagaagatacacaccggtgagaagccctacgtgtgtaccgagtgtggacgcgctttcatacgaaagtccaacttcattacacaccagaggatccacaccggggagaaaccatacgaatgttcagattgtgggaaatcattcacctccaaaagccagttgctagtacatcagccagtgcacaccggggagaagccttacgtttgtgcggaatgtggaaaggctttctccggaagaagtaatttgagcaagcatcagaaaacccacacgggcgagaaaccgtatatctgctccgaatgcggtaaaactttccgccagaagagcgagctgattacacatcaccgcattcacacgggcgagaagccttacgagtgcagtgactgtgggaaatcttttacaaaaaaatctcaactgcaggttcaccagagaattcatactggggagaaaccctatgtttgcgcagagtgcggtaaggccttctctaaccggagcaacctaaacaaacaccagactacgcatacgggggacaagccatacaagtgtggcatttgtgggaaaggttttgtgcagaagagtgtattttctgtgcatcaaagttcccacgcctag

SEQ ID NO: 242915 - DNA, 2141 bp, Artificial Sequence
  derived and/or modified sequence
tggaaagagcttcacctggaagtcacagttcaaggcatcacagaattcataccggagaaaaactatatgaatgtagtgaatgtgggaaaggtttcccttataactcagatctcagtatacatgagaaaattcatactggagagagacaccatgaatgcactgactgtggcaaagcgttcacacaaaagtccacactcaagattcatcagaaaatccatacaggcgagagatcctacatctgtattgaatgcgggcaggccttcatccagaaaacacaattgattgcacaccgaagaattcatagtggagaaaaaccatatgaatgcaataactgtggcaaatccttcatttccaagtcacaacttcaggtacatcaacgtgttcacacaagagtgaagccctatatatgtaccgaatatgggaaggtcttcagcaataattccaacctcattacacatgagaagattcaaagtagagagaaatcttccatatgtactgagtgtgggaaggcctttacctacaggtcagagttgattattcatcagagaattcacactggagagaaaccttatgaatgcagtgactgtgggagagccttcactcagaagtcagcactcacagtgcatcagagaattcatacaggagaaaaatcgtatatatgcatgaaatgtggactggccttcatccggaaggcacacttgattacacatcaaataattcatactggagagaaaccttataaatgtggtcactgtgggaaattgtttacttccaagtcacaactccatgttcataaacgaattcacacaggagaaaagccctatgtatgcaataaatgtgggaaggcattcaccaaccggtcaaatctcattacacatcagaaaactcatacaggagagaaatcttatatatgttccaaatgtggaaaggccttcacccagaggtcagacttgattacacatcagagaatccatactggggagaagccttatgaatgcaatacttgtggaaaagcctttactcagaagtcaaatcttaatatacatcagaaaattcacactggagagagacagtatgaatgccacgaatgtgggaaagccttcaaccagaaatcaatactcattgttcatcagaaaattcatacaggagagaaaccctatgtatgcactgagtgtggaagagctttcatccgcaagtcaaactttattactcatcaaagaattcatactggagagaagccttatgaatgcagtgactgtgggaagtcctttacctccaagtctcagctcctggtgcatcagccagttcacacaggagagaaaccctatgtgtgtgccgagtgtgggaaagcctttagtggcaggtcaaatctcagtaagcaccagaaaactcataccggagaaaagccctacatttgttctgaatgtgggaagacctttcgacagaagtcagagttgattacacatcacagaattcatactggagagaaaccttatgagtgcagtgactgtgggaagtctttcactaaaaaatcacagctccaagtgcatcagcgaattcacactggagagaagccttacgtgtgtgctgagtgtgggaaggcctttagcaacaggtccaatttgaataaacatcagacaacacacactggagacaaaccctacaagtgtggcatctgtgggaaaggcttcgttcagaaatcagtgttcagtgttcatcagagcagccacgcttgagagaaacagtgtgagaaaacccccctgagggttgggtctgattgtacactgttgcacgcatgcagcagaaaaatatgtatattattgtaaatagaaatgaccacatcagaatgtcacacatggctgttctggagagggcctctgagaaggcactgaatgaggcgagggacccttcctacattgtcaccatccccagtaaaccttgggtcattattcatactgacaaggaaccgagtcaatttggtgaataggaaaagccttctcatgaaaactacaatagaatactgttaccaaattcttcataagaaagatcatattatgggaatgataatcctgtttactgtggattaggtatagtgccaacagtttgaatggtaagacaacataatatatatgatagtgatg

SEQ ID NO: 242916 - DNA, 2971 bp, Artificial Sequence
  derived and/or modified sequence
gtcaggagattgagaccatcctggccaacatggtgaaaccccgtctctactaaaaatacaaaaattagctgggtgtggtggcacgtgcctgtaatcccagctactcaggaggctgaggcaggagaatcacttgaacccgggaggtggaggttgcagtaagccaagatcgcgccactgcactccagcctggggaacagagcaagactgtctcaaaaaaaaaatgaagtaaattaaaaacaacaaaacccatgttccgtaatcccatatatagtcactccaccgtgcaaagctgactatgcacattgaacaggaatgtgcccttacagggatcagtgtccttcagggatgtggctatcgatttcagcagagaggaatggcggcacctggacctttctcagagaaacctgtaccgggatgtgatgctggagacctacagccacctgctctcagtagggtatcaagttcctaaaccagaggtggtcatgttggagcaaggaaaggaaccatgggcactgcagggtgagaggccacgtcacagctgcccaggagagaaattatgggaccataatcaacatagaaaaatcatcggttataaaccagcttcctctcaagatcaaaaaatttattctggggaaaaatcctatgagtgtgctgaatttggaaagagcttcacctggaagtcacagttcaaggtacatctgaaagttcctacaggagaaaaactctatgtatgtattgaatgtgggagggcttttgtacagaagccagaattcatcacacatcagaaaacccatatgagagagaagccctataagtgcaatgaatgtggaaaatccttttttcaagtatcgtctcttttcaggcatcacagaattcataccggagaaaaactatatgaatgtagtgaatgtgggaaaggtttcccttataactcagatctcagtatacatgagaaaattcatactggagagagacaccatgaatgcactgactgtggcaaagcgttcacacaaaagtccacactcaagattcatcagaaaatccatacaggcgagagatcctacatctgtattgaatgcgggcaggccttcatccagaaaacacaattgattgcacaccgaagaattcatagtggagaaaaaccatatgaatgcaataactgtggcaaatccttcatttccaagtcacaacttcaggtacatcaacgtgttcacacaagagtgaagccctatatatgtaccgaatatgggaaggtcttcagcaataattccaacctcattacacatgagaagattcaaagtagagagaaatcttccatatgtactgagtgtgggaaggcctttacctacaggtcagagttgattattcatcagagaattcacactggagagaaaccttatgaatgcagtgactgtgggagagccttcactcagaagtcagcactcacagtgcatcagagaattcatacaggagaaaaatcgtatatatgcatgaaatgtggactggccttcatccggaaggcacacttgattacacatcaaataattcatactggagagaaaccttataaatgtggtcactgtgggaaattgtttacttccaagtcacaactccatgttcataaacgaattcacacaggagaaaagccctatgtatgcaataaatgtgggaaggcattcaccaaccggtcaaatctcattacacatcagaaaactcatacaggagagaaatcttatatatgttccaaatgtggaaaggccttcacccagaggtcagacttgattacacatcagagaatccatactggggagaagccttatgaatgcaatacttgtggaaaagcctttactcagaagtcaaatcttaatatacatcagaaaattcacactggagagagacagtatgaatgccacgaatgtgggaaagccttcaaccagaaatcaatactcattgttcatcagaaaattcatacaggagagaaaccctatgtatgcactgagtgtggaagagctttcatccgcaagtcaaactttattactcatcaaagaattcatactggagagaagccttatgaatgcagtgactgtgggaagtcctttacctccaagtctcagctcctggtgcatcagccagttcacacaggagagaaaccctatgtgtgtgccgagtgtgggaaagcctttagtggcaggtcaaatctcagtaagcaccagaaaactcataccggagaaaagccctacatttgttctgaatgtgggaagacctttcgacagaagtcagagttgattacacatcacagaattcatactggagagaaaccttatgagtgcagtgactgtgggaagtctttcactaaaaaatcacagctccaagtgcatcagcgaattcacactggagagaagccttacgtgtgtgctgagtgtgggaaggcctttagcaacaggtccaatttgaataaacatcagacaacacacactggagacaaaccctacaagtgtggcatctgtgggaaaggcttcgttcagaaatcagtgttcagtgttcatcagagcagccacgcttgagagaaacagtgtgagaaaacccccctgagggttgggtctgattgtacactgttgcacgcatgcagcagaaaaatatgtatattattgtaaatagaaatgaccacatcagaatgtcacacatggctgttctggagagggcctctgagaaggcactgaatgaggcgagggacccttcctacattgtcaccatccccagtaaaccttgggtcattattcatactgacaaggaaccgagtcaatttggtgaataggaaaagccttctcatgaaaactacaatagaatactgttaccaaattcttcataagaaagatcatattatgggaatgataatcctgtttactgtggattaggtatagtgccaacagtttgaatggtaagacaacataatatatatgatagtgatgaa

SEQ ID NO: 242917 - DNA, 2969 bp, Artificial Sequence
  derived and/or modified sequence
ggtgctagaagtcggaccggaagtggaagtggtccccgaaggctatttcgccgctggcgtcaggactattttcacgttttaatgccgagaggtctctgtgacgattttggttcttgggtgtctctggggagtccctgggccagaccttcctccagactccagcccacctcttcggagcagctctgctgagttcacagatgaccactaaacttcaggcaccctagacaaaaagggttgagatccagtgtggccatgccagctagttggacctcaccccagaaatcctcagccctggctccagaggatcatggcagctcctatgagggatcagtgtccttcagggatgtggctatcgatttcagcagagaggaatggcggcacctggacctttctcagagaaacctgtaccgggatgtgatgctggagacctacagccacctgctctcagtagggtatcaagttcctaaaccagaggtggtcatgttggagcaaggaaaggaaccatgggcactgcagggtgagaggccacgtcacagctgcccaggagagaaattatgggaccataatcaacatagaaaaatcatcggttataaaccagcttcctctcaagatcaaaaaatttattctggggaaaaatcctatgagtgtgctgaatttggaaagagcttcacctggaagtcacagttcaaggtacatctgaaagttcctacaggagaaaaactctatgtatgtattgaatgtgggagggcttttgtacagaagccagaattcatcacacatcagaaaacccatatgagagagaagccctataagtgcaatgaatgtggaaaatccttttttcaagtatcgtctcttttcaggcatcacagaattcataccggagaaaaactatatgaatgtagtgaatgtgggaaaggtttcccttataactcagatctcagtatacatgagaaaattcatactggagagagacaccatgaatgcactgactgtggcaaagcgttcacacaaaagtccacactcaagattcatcagaaaatccatacaggcgagagatcctacatctgtattgaatgcgggcaggccttcatccagaaaacacaattgattgcacaccgaagaattcatagtggagaaaaaccatatgaatgcaataactgtggcaaatccttcatttccaagtcacaacttcaggtacatcaacgtgttcacacaagagtgaagccctatatatgtaccgaatatgggaaggtcttcagcaataattccaacctcattacacatgagaagattcaaagtagagagaaatcttccatatgtactgagtgtgggaaggcctttacctacaggtcagagttgattattcatcagagaattcacactggagagaaaccttatgaatgcagtgactgtgggagagccttcactcagaagtcagcactcacagtgcatcagagaattcatacaggagaaaaatcgtatatatgcatgaaatgtggactggccttcatccggaaggcacacttgattacacatcaaataattcatactggagagaaaccttataaatgtggtcactgtgggaaattgtttacttccaagtcacaactccatgttcataaacgaattcacacaggagaaaagccctatgtatgcaataaatgtgggaaggcattcaccaaccggtcaaatctcattacacatcagaaaactcatacaggagagaaatcttatatatgttccaaatgtggaaaggccttcacccagaggtcagacttgattacacatcagagaatccatactggggagaagccttatgaatgcaatacttgtggaaaagcctttactcagaagtcaaatcttaatatacatcagaaaattcacactggagagagacagtatgaatgccacgaatgtgggaaagccttcaaccagaaatcaatactcattgttcatcagaaaattcatacaggagagaaaccctatgtatgcactgagtgtggaagagctttcatccgcaagtcaaactttattactcatcaaagaattcatactggagagaagccttatgaatgcagtgactgtgggaagtcctttacctccaagtctcagctcctggtgcatcagccagttcacacaggagagaaaccctatgtgtgtgccgagtgtgggaaagcctttagtggcaggtcaaatctcagtaagcaccagaaaactcataccggagaaaagccctacatttgttctgaatgtgggaagacctttcgacagaagtcagagttgattacacatcacagaattcatactggagagaaaccttatgagtgcagtgactgtgggaagtctttcactaaaaaatcacagctccaagtgcatcagcgaattcacactggagagaagccttacgtgtgtgctgagtgtgggaaggcctttagcaacaggtccaatttgaataaacatcagacaacacacactggagacaaaccctacaagtgtggcatctgtgggaaaggcttcgttcagaaatcagtgttcagtgttcatcagagcagccacgcttgagagaaacagtgtgagaaaacccccctgagggttgggtctgattgtacactgttgcacgcatgcagcagaaaaatatgtatattattgtaaatagaaatgaccacatcagaatgtcacacatggctgttctggagagggcctctgagaaggcactgaatgaggcgagggacccttcctacattgtcaccatccccagtaaaccttgggtcattattcatactgacaaggaaccgagtcaatttggtgaataggaaaagccttctcatgaaaactacaatagaatactgttaccaaattcttcataagaaagatcatattatgggaatgataatcctgtttactgtggattaggtatagtgccaacagtttgaatggtaagacaacataatatatatgatagtgatgaa

SEQ ID NO: 242918 - protein, 431 aa, Artificial Sequence
  derived and/or modified sequence
MAEITNIRPSFDVSPVVAGLIGASVLVVCVSVTVFVWSCCHQQAEKKQKNPPYKFIHMLKGISIYPETLSNKKKIIKVRRDKDGPGREGGRRNLLVDAAEAGLLSRDKDPRGPSSGSCIDQLPIKMDYGEELRSPITSLTPGESKTTSPSSPEEDVMLGSLTFSVDYNFPKKALVVTIQEAHGLPVMDDQTQGSDPYIKMTILPDKRHRVKTRVLRKTLDPVFDETFTFYGIPYSQLQDLVLHFLVLSFDRFSRDDVIGEVMVPLAGVDPSTGKVQLTRDIIKRNIQKCISRGELQVSLSYQPVAQRMTVVVLKARHLPKMDITGLSGNPYVKVNVYYGRKRIAKKKTHVKKCTLNPIFNESFIYDIPTDLLPDISIEFLVIDFDRTTKNEVVGRLILGAHSVTASGAEHWREVCESPRKPVAKWHSLSEY

SEQ ID NO: 242919 - protein, 124 aa, Artificial Sequence
  derived and/or modified sequence
MTVVVLKARHLPKMDITGLSGNPYVKVNVYYGRKRIAKKKTHVKKCTLNPIFNESFIYDIPTDLLPDISIEFLVIDFDRTTKNEVVGRLILGAHSVTASGAEHWREVCESPRKPVAKWHSLSEY

SEQ ID NO: 242920 - DNA, 1296 bp, Artificial Sequence
  derived and/or modified sequence
atggccgagatcaccaacatcagacccagcttcgacgtgagccccgtggtggccggcctgatcggcgccagcgtgctggtggtgtgcgtgagcgtgaccgtgttcgtgtggagctgctgccaccagcaggccgagaagaagcagaagaaccccccctacaagttcatccacatgctgaagggcatcagcatctaccccgagaccctgagcaacaagaagaagatcatcaaggtgagaagagacaaggacggccccggcagagagggcggcagaagaaacctgctggtggacgccgccgaggccggcctgctgagcagagacaaggaccccagaggccccagcagcggcagctgcatcgaccagctgcccatcaagatggactacggcgaggagctgagaagccccatcaccagcctgacccccggcgagagcaagaccaccagccccagcagccccgaggaggacgtgatgctgggcagcctgaccttcagcgtggactacaacttccccaagaaggccctggtggtgaccatccaggaggcccacggcctgcccgtgatggacgaccagacccagggcagcgacccctacatcaagatgaccatcctgcccgacaagagacacagagtgaagaccagagtgctgagaaagaccctggaccccgtgttcgacgagaccttcaccttctacggcatcccctacagccagctgcaggacctggtgctgcacttcctggtgctgagcttcgacagattcagcagagacgacgtgatcggcgaggtgatggtgcccctggccggcgtggaccccagcaccggcaaggtgcagctgaccagagacatcatcaagagaaacatccagaagtgcatcagcagaggcgagctgcaggtgagcctgagctaccagcccgtggcccagagaatgaccgtggtggtgctgaaggccagacacctgcccaagatggacatcaccggcctgagcggcaacccctacgtgaaggtgaacgtgtactacggcagaaagagaatcgccaagaagaagacccacgtgaagaagtgcaccctgaaccccatcttcaacgagagcttcatctacgacatccccaccgacctgctgcccgacatcagcatcgagttcctggtgatcgacttcgacagaaccaccaagaacgaggtggtgggcagactgatcctgggcgcccacagcgtgaccgccagcggcgccgagcactggagagaggtgtgcgagagccccagaaagcccgtggccaagtggcacagcctgagcgagtactag

SEQ ID NO: 242921 - DNA, 375 bp, Artificial Sequence
  derived and/or modified sequence
atgaccgtggtggtgctgaaggccagacacctgcccaagatggacatcaccggcctgagcggcaacccctacgtgaaggtgaacgtgtactacggcagaaagagaatcgccaagaagaagacccacgtgaagaagtgcaccctgaaccccatcttcaacgagagcttcatctacgacatccccaccgacctgctgcccgacatcagcatcgagttcctggtgatcgacttcgacagaaccaccaagaacgaggtggtgggcagactgatcctgggcgcccacagcgtgaccgccagcggcgccgagcactggagagaggtgtgcgagagccccagaaagcccgtggccaagtggcacagcctgagcgagtactag

SEQ ID NO: 242922 - DNA, 1296 bp, Artificial Sequence
  derived and/or modified sequence
atggccgaaataactaatattcgaccatcctttgatgtcagtcctgtggtggctgggctgataggcgccagcgtgctcgtggtttgtgtatcagttacagtattcgtctggtcctgttgccatcagcaagccgagaagaaacagaagaatcccccttacaaattcatccatatgctcaaggggatttctatctatcctgagactctttcgaataagaaaaagataatcaaggtgcggagggataaagacggaccaggaagggaaggagggcgaaggaatctgttggtcgacgcagctgaggccgggctcttgagcagggacaaagatcccaggggtccctctagtggttcctgtatagaccagttgcctattaaaatggattatggagaagagctgcgtagtccaattacctctctgacccctggcgagagtaaaacaacatctccctcgagcccggaagaagatgtgatgctaggatcactcaccttctctgtggactacaatttccctaagaaagctctcgtagtcaccatccaggaggctcacggactgcctgtcatggacgaccagacccagggcagtgacccgtatattaagatgacgattttaccagacaagcgacatagagtcaagacgagagttctgaggaaaactctcgatcctgtatttgacgagacctttacgttttacgggatcccctacagtcagctgcaggatctggtactgcacttccttgttttatcgttcgacaggttctctcgcgacgacgtcattggagaggtgatggtgcctctggctggggtggacccctctaccggaaaggtgcagttgacaagggatattattaagcgcaatatacagaaatgcattagtcggggggagctgcaggtctctctgtcctatcagccggtagcccaaaggatgaccgtcgtggttcttaaggcccggcacctccccaaaatggacatcacgggcttgagtgggaatccctacgtcaaagtgaatgtatactacgggagaaagcgcatcgccaagaaaaaaactcatgtaaagaagtgcacactgaatccaatatttaacgaaagttttatctatgatatccccaccgaccttctccctgacattagcatcgagtttcttgtgatcgatttcgataggaccactaaaaacgaggtcgttggtcggctgatcctgggggcacactcggttacagcttcaggagccgaacactggcgggaggtctgcgagagcccccgaaagcccgtggcaaaatggcatagcttatcagagtactag

SEQ ID NO: 242923 - DNA, 375 bp, Artificial Sequence
  derived and/or modified sequence
atgaccgtagtcgtgttaaaggccagacacttacccaagatggacatcactggactgtccggtaacccatacgtcaaggtcaacgtgtattacggacgcaaacgaatagctaagaaaaagacccacgtgaaaaagtgcacgctgaaccccattttcaatgagtctttcatttacgacattcccacagacttgttgccagacatttcaattgaattcctggttattgacttcgaccgaaccaccaaaaacgaggtcgttggtcgactcatcttaggagctcattccgttaccgcctcaggggcagagcactggagagaggtgtgtgagagtccccggaagcccgtggcaaagtggcattcccttagcgaatactag

SEQ ID NO: 242924 - DNA, 1296 bp, Artificial Sequence
  derived and/or modified sequence
atggccgagatcaccaacatccggcccagctttgatgtgtcccctgtggtggccggcctgattggagcctctgtgctggtggtgtgtgtgtctgtgacagtgtttgtgtggagctgctgccaccagcaggccgagaagaagcagaagaaccccccctacaagttcatccacatgctgaagggcatcagcatctacccagagaccctgagcaacaagaagaagatcatcaaggtgagaagagacaaggatggccctggccgggagggcggcagaagaaacctgctggtggatgctgctgaggccggcctgctgagccgggacaaggacccccggggccccagcagcggcagctgcatcgaccagctgcccatcaagatggactatggagaggagctgcggagccccatcaccagcctgaccccaggagagagcaagaccaccagccccagcagccctgaggaggatgtgatgctgggcagcctgaccttctctgtggactacaacttccccaagaaggccctggtggtgaccatccaggaggcccacggcctgcctgtgatggatgaccagacccagggcagtgacccctacatcaagatgaccatcctgcctgacaagaggcaccgggtgaagaccagggtgctgaggaagaccctggaccctgtgtttgatgagaccttcaccttctacggcatcccctacagccagctgcaggacctggtgctgcacttcctggtgctgagctttgaccgcttcagcagagatgatgtgattggagaggtgatggtgcccctggccggcgtggaccccagcacaggcaaggtgcagctgacccgggacatcatcaagaggaacatccagaagtgcatcagcagaggagagctgcaggtgtccctgagctaccagcctgtggcccagaggatgacagtggtggtgctgaaggcccggcacctgcccaagatggacatcaccggcctgagcggcaacccctacgtgaaggtgaatgtgtactacggcaggaagagaattgccaagaagaagacccacgtgaagaagtgcaccctgaaccccatcttcaatgaaagcttcatctatgacatccccacagacctgctgcctgacatcagcattgagttcctggtgattgactttgacaggaccaccaagaatgaggtggtgggccgcctcatcctgggcgcccacagcgtgacagccagcggggctgagcactggagggaggtgtgtgagagccccaggaagcctgtggccaagtggcacagcctgtctgagtactag

SEQ ID NO: 242925 - DNA, 375 bp, Artificial Sequence
  derived and/or modified sequence
atgacagtggtggtgctgaaggcccggcacctgcccaagatggacatcaccggcctgagcggcaacccctacgtgaaggtgaatgtgtactacggcaggaagagaattgccaagaagaagacccacgtgaagaagtgcaccctgaaccccatcttcaatgaaagcttcatctatgacatccccacagacctgctgcctgacatcagcattgagttcctggtgattgactttgacaggaccaccaagaatgaggtggtgggccgcctcatcctgggcgcccacagcgtgacagccagcggggctgagcactggagggaggtgtgtgagagccccaggaagcctgtggccaagtggcacagcctgtctgagtactag

SEQ ID NO: 242926 - DNA, 1296 bp, Artificial Sequence
  derived and/or modified sequence
atggccgagatcaccaacatccggcccagcttcgacgtgagccccgtcgttgccggactgatcggtgcctcagtccttgtggtgtgcgtatccgtgaccgtgtttgtgtggtcatgttgtcaccaacaggcagaaaagaagcagaagaaccccccctacaagttcatacacatgctgaagggtatctcgatctacccggagaccttgtctaacaagaaaaaaattatcaaagtcaggagagacaaggacggacccgggcgagagggcgggcgcagaaacctcctggttgatgccgcagaagccggactgctatcacgtgacaaagatccgagagggccctcctcagggtcctgcattgatcagttgccaattaagatggactatggcgaggagctgagatctccgattacctctttgactccaggtgagtcaaagacgacctcaccgagctcccctgaagaggacgtcatgctcggctctttaactttttcagtggactataattttcccaaaaaagccctggttgtgacaatccaggaggcccacggcctgcctgtgatggacgaccagacacaggggtctgatccttatataaagatgaccattctgcccgacaaacggcacagagtgaagactagggtgcttcgcaagactctggacccagtatttgacgaaacattcaccttttacggcattccatactctcagttacaggacctcgtgctgcattttctggtgttatcttttgacaggttctctcgcgacgacgttattggggaggtaatggtgcccctggctggtgtggacccttcgactggaaaggtacaactaacgagagacatcattaaacgaaatatacagaagtgcatctcgcgaggggagctccaagtgtctctgagctaccaacctgtggcccaacgtatgaccgtcgttgtgctgaaggctcgacacctgcccaaaatggacatcacagggctaagtggcaatccttatgtaaaggttaacgtttattatgggaggaagcggatcgccaagaagaaaacccatgtcaaaaagtgtactctgaatccaatctttaatgagtcctttatctatgacatccctactgatcttttgcctgacatatcaatcgaattcctggtgattgacttcgaccgaactactaaaaatgaggtggttggtcggctgattttaggggcccatagcgtgactgcttccggcgcagagcactggagagaggtatgtgaatctccccggaagccggtagccaagtggcacagcctgtctgagtactag

SEQ ID NO: 242927 - DNA, 375 bp, Artificial Sequence
  derived and/or modified sequence
atgaccgtggtggtgctgaaggcccggcacctgcccaagatggacattactgggctgagtggcaacccttatgttaaagttaatgtctattatgggcgaaagcggatcgcaaaaaagaagacccatgtgaaaaagtgtactctgaaccccattttcaacgaaagttttatctatgatatcccaacagatctgctccccgatatttctatcgaatttctcgtgatcgattttgaccggaccaccaagaatgaggttgtgggccgcctcattcttggcgctcactctgtaactgcatctggcgcggaacactggcgagaagtgtgcgagtcacctagaaagcccgtggcaaaatggcattctttgtccgagtactag

SEQ ID NO: 242928 - DNA, 1296 bp, Artificial Sequence
  derived and/or modified sequence
atggccgaaattacaaatatccggccatctttcgacgttagcccagtggtggctggtcttatcggcgcttccgtattagtggtgtgcgtctccgttacggtgtttgtgtggagctgttgccatcaacaagccgaaaagaaacagaaaaaccccccttataagtttattcacatgttaaagggcatcagcatttaccctgagacactgtccaacaagaagaagattatcaaagtgcgccgagataaagacggtccaggccgagaaggcggtcggaggaatttactggtagatgctgccgaggccggattattgtcacgagataaagaccccagagggccttcttcaggctcttgcatcgatcagctacccattaagatggactacggtgaagagctccgcagccctatcaccagcctgacccccggagaatctaagaccacctccccttctagccccgaggaagacgtgatgttaggaagcctgacattttcagtcgattacaacttccctaagaaagcgttagtggtaacaatccaagaggcacacggcctccctgtgatggatgatcagacacaaggatccgacccctatattaagatgacgatcctgcctgacaaacggcacagggttaaaacacgagttctgcgaaaaaccctggatccagtctttgacgaaaccttcacattttatgggataccctacagccaattacaagacctggtgttgcacttccttgtcctgagctttgaccgtttcagccgcgatgacgtgataggcgaagtgatggtgcccctggctggggtcgatccctcaacgggcaaggttcaactgacgcgggatattattaagcggaacattcagaaatgtatttccaggggcgaacttcaggtcagtctttcctatcagcccgtggcacagaggatgacagtcgtggtgctgaaggccaggcatctgcccaagatggatattacaggtctgagcgggaatccctatgtcaaagtgaatgtgtactatgggagaaagcggatagctaagaagaaaacccacgtgaaaaaatgcacccttaatcccatctttaacgagagtttcatttacgatatccctactgatcttctgccagatataagcattgagttcctggtcattgattttgaccggaccacgaagaatgaggtggtcgggcgattgattcttggagctcactcagtgacagcctccggggcagagcactggagggaggtctgcgagtcccctcggaaaccagtagccaagtggcactccctgagtgagtactag

SEQ ID NO: 242929 - DNA, 375 bp, Artificial Sequence
  derived and/or modified sequence
atgactgtagtagtgctgaaggccagacatctgcctaaaatggatatcacaggtcttagcggcaatccgtacgttaaggtgaatgtctactatgggagaaagcgcattgcgaaaaagaagactcatgtgaaaaaatgcacattgaaccccatcttcaatgaatcattcatatatgatataccaactgacctcctcccagacatcagtatcgaattcctcgtgattgacttcgaccgaacaacaaagaacgaggtggtaggacgactgatcctcggcgcacactcagtgaccgccagtggtgctgagcactggagagaagtttgtgagtccccgaggaagcccgtcgccaaatggcactcactttctgagtattag

SEQ ID NO: 242930 - DNA, 5240 bp, Artificial Sequence
  derived and/or modified sequence
agaaggcggagcctacctctcatcaggaccagtctgactgcacctgcatccttagctcagcgcatccccggagcatcttaagagctgagcgcagctgacaactaggggccggaccgtcgcaggaggcgtccgctggataccttcccccttccctgacctagagctctacagctgctgcctcggtactgaccgagggttcccagagctgtctcaccattgcaaaaacgttatagcaacagcctctgattacgacatggctgagatcaccaatatccgacctagctttgatgtgtcaccggtggtggccggcctcatcggggcctctgtgctggtggtgtgtgtctcggtgaccgtctttgtctggtcatgctgccaccagcaggcagagaagaagcagaagaacccaccatacaagtttattcacatgctcaaaggcatcagcatatacccagagaccctcagcaacaagaagaaaatcatcaaagtgcggagagacaaagatggtcctgggagggaaggtggacgtaggaacctgttggtggacgcagcagaggctggcctgctaagccgagacaaagatcccagggggcctagctctggatcttgtatagaccaattacccatcaaaatggactatggggaagaactaaggagccctattacaagcctgacccctggggagagcaaaaccacctctccatcatctccagaggaggatgtcatgctaggatccctcaccttctcagtggactataacttcccgaaaaaagccctggtggtgacaatccaggaggcccatgggctgccagtgatggatgaccagacccagggatctgacccctacatcaaaatgaccatccttcctgacaaacggcatcgggtgaagaccagagtgctgcggaagaccctggaccctgtgtttgacgagaccttcaccttctatggcatcccctacagccagctgcaggacctggtgctgcacttccttgtcctcagctttgaccgcttctctcgggatgatgtcattggcgaggtcatggtgccactggcaggggtggaccccagcacaggcaaggtacaactgaccagggacatcatcaaaaggaatatccagaagtgcatcagcagaggggagctccaggtgtctctgtcatatcagcctgtggcacagagaatgacagtggtggtcctcaaagccagacacttgccgaagatggatatcaccggtctctcaggtaatccttatgtcaaggtgaacgtctactacggcagaaagcgcattgccaagaagaaaacccatgtgaagaagtgcactttgaaccccatcttcaatgaatctttcatctacgacatccccactgacctcctgcctgatatcagcatcgagttcctcgttatcgacttcgatcgcaccaccaagaatgaggtggtggggaggctgatcctgggggcacacagtgtcacagccagtggtgctgaacactggagagaggtctgcgagagcccccgcaagcctgtggccaagtggcacagtctgagcgagtactaatcctgttcttctctcctctaatccccgggggccaagctggggagggatgtggaggggaaaaagatgacagagaagtggactccaaacctcattttagttgtagaagaaaatttcttacaaaacaaattccacaaagaacaccctatatgaccacagctgcagatcagttcttagcaatgatgtttttttttctgctttgcaaggcgctagaatcttttattttactttattttttttgaggtggagtttcgctcttgttgcccgggctggagtgcaatggtgagatctcaactcactgcaacctctgccctccaggttcaagtgattctcctccctcagcctcccaagtagctgggattacaggcacccacgagcatgcccggctaattttttgtattttcagtagagatgggtttcaccatgttggccaggctggtctcgaattccagacctcaggtgatccacccgcctcggcctcccaaagtgctgggattacaggtgcgagccaccgtgcccggcctctggttttgttttgttttttttttttaatgggggacaaaagagagggaaagacccctataaatctatatataacaatgtaaccatatacttgcatgtctaatacaaactgaagaaattagcctaactgccaatatcaagttgcagattttaatccatggaaattgtgttttgtgctgaattgtatttgctgattacctgaaattggcttctttttattgggcttctctggagaatttctcccactccccacctctgcagaagaaaattttgctcttataaaacctcatgttttcatcattcccatcttttctttttattgcctcttatatctctgctctttgacctcaaggtctagaggtctgcagtaagccaagaaacaaaggtggggtggatgaggcaaggtttgcaggagaaagaggaattgagaaatggggtatttttgctatcagctcttctgctatgaagtagtaaaaggcagtctataattaactgacagacctaactgaagcacagagaatacatcagacttatgcatccaagacatcagaacttggattttatcaaacttgatgacttctctaaaaggagctttggaaacttcaaattcagctataggatagtaccaatgaacacatccagctgatcccaaaagctgttttcaggtataaggacaaggagaggagacaagtgacgacagccattcccctttgcagctatctactgtagtgacagccatttcttggttgatgggttggaagtcatcagaggtttgaagaattacactggcctttgtttttctggaaatgccgaccatggagatgctttagagtcttctcaaatagcttagatgttgtaatgaggttagctttgcttcataaaacaggggccctcagaagttctccttaaatttttcaataaaaatttagctcttaaaaaaataacagtgtgactgagtgaatgaagataagttggattctttcagagcattcttttcctcaaaacgagctgcataattcttggaatttatgtcttaccacatggtggagggatggaggaactacaggatgcaattcttcttctaccaatgggcaatagaggttgagagagattcagcatctttctgggattagaattcaagtctctttactcctacagcagctgtgtctccaacgttgagactttgcagatggcacagactccatggataataggtaaacttggggccgggcgcagtggctcacgcctgtaatcccagtattttgggaggccgaggtggaaagatcgcttgagcccaggagttcaagaccagcctgggctacatgacgaaactccatctctatcaaaaatacaaaaaattaactaggtgtggtgctgcacgcctgtggtcccagctattcaggaggctgaggtgggaggatcatttgagcccagaggtagaggctgcagtgagccatgatcatgccactgcactctgggctgggtaacagagtgagatcctgtctcaaaaattaattaattaattaattaaaataaactaggtaaacttggataggcagtagatatttttgcccacctgaggaggaactcagtcaagctgttgcttaacagcttgatccagggcgtgaaaggttagttgagactgaagtgttcacttccatagaagaacatcacttttaaccttgctttggcgaagggagtcggaaagctgagtctctatggacgggggggtgatcttgctttcagtgttccctcagcttttgtggatttaaaaccattctgctccccctaaaccttttgtttgatttcagcccatgttcttgacaatgcagagcaattctgagcagtcacaaagcctactctctgttcttgtccctgccaacccccaccccccataatctgactcacaacttcaccatcagttggggtcataccactagtctctgtcctataccccatgaaatgtaaatactgtatcataagtagaagaaaataatttttgttttctaaaaatgcattttgagatagtttaatgtaaatctgacaggagcattctgaagccccattaggaaaaaatttaaatggttcctcttcatcgccttaatgtctaaagatcagaaatcgctgagcaaacccgcttttgtttccttcccagaaacaatgcaaaacaacaggtggagatagtctggtctttgccctgctgtgtgtgcctctgtagctcctcctgacaaacgtctgggaaaacagcctcaccccactctcctctctcttccccatttccttgtagctttattccttgcatctttgggtctactgagcagtgggtgctgaggtgacaggggaggaaccagttgttctgtagcctaggaactgcctcagtgtctttgccagaaaaaggcaaagaggcggacagtgcagggctcctccctcctacctcaggcctgatccatcgtgcccttgactttgccgtctcaaagtttcttagctgactttggctttcacatttgttctttccagagctaactgataagagtggaggaggaatgccttctcctaagagtcagttgaaagaaagacaagagagtcacatcttagcttttgcacaaggcattcgtggtcaggaataggttagggaatggtcacttctgattttccaacagttgctccttctctgaagagatcttgattcctttgggaagacaagaatttttcttaataacaaaggtccctttatgagttattccttctttcagttcatctcactggagcacagccaagatggacatgtttatggacagtgctctagatgtgaaaacagatagaactggtttgtgggacaggggcagcttgctcaggagagggaataacgcaggtcccttttcttggaaggcttgtactatggccatgacagtgacattgccctcaccatgatccctctccaaagtggttgtctttctttaccttgtgtcttctcttgtaaaaatgaaactcaaaaataaaataaatgtgtcaaattttgaaaaaaaaagaaaactgaaaaagctaacatgaattgtgtgaaattgcataatgctgtaatgctaatctacaatatgtaatgctatcttgtatgttgaatttgttaatgcaccacacaagtgcaaaataaagactgattcacattacataggca

SEQ ID NO: 242931 - DNA, 1322 bp, Artificial Sequence
  derived and/or modified sequence
atccttagctcagcgcatccccggagcatcttaagagctgagcgcagctgacaactaggggccggaccgtcgcaggaggcgtccgctggataccttcccccttccctgacctagagctctacagctgctgcctcggtactgaccgagggttcccagagctgtctcaccattgcaaaaacgttatagcaacagcctctgattacgacatggctgagatcaccaatatccgacctagctttgaagtgcatcagcagaggggagctccaggtgtctctgtcatatcagcctgtggcacagagaatgacagtggtggtcctcaaagccagacacttgccgaagatggatatcaccggtctctcaggtaatccttatgtcaaggtgaacgtctactacggcagaaagcgcattgccaagaagaaaacccatgtgaagaagtgcactttgaaccccatcttcaatgaatctttcatctacgacatccccactgacctcctgcctgatatcagcatcgagttcctcgttatcgacttcgatcgcaccaccaagaatgaggtggtggggaggctgatcctgggggcacacagtgtcacagccagtggtgctgaacactggagagaggtctgcgagagcccccgcaagcctgtggccaagtggcacagtctgagcgagtactaatcctgttcttctctcctctaatccccgggggccaagctggggagggatgtggaggggaaaaagatgacagagaagtggactccaaacctcattttagttgtagaagaaaatttcttacaaaacaaattccacaaagaacaccctatatgaccacagctgcagatcagttcttagcaatgatgtttttttttctgctttgcaaggcgctagaatcttttattttactttattttttttgaggtggagtttcgctcttgttgcccgggctggagtgcaatggtgagatctcaactcactgcaacctctgccctccaggttcaagtgattctcctccctcagcctcccaagtagctgggattacaggcacccacgagcatgcccggctaattttttgtattttcagtagagatgggtttcaccatgttggccaggctggtctcgaattccagacctcaggtgatccacccgcctcggcctcccaaagtgctgggattacaggtgcgagccaccgtgcccggcctctggttttgttttgttttttttttttaatgggggacaaaagagagggaaagacccctataaatctatatataacaatgtaaccatatacttgcatgtctaatacaaactgaagaaattagcctaac

SEQ ID NO: 242932 - protein, 246 aa, Artificial Sequence
  derived and/or modified sequence
MSWAAVLAVAAARFGHFWGCRWPGPMAQGWAGFSEEELRRLKQTKDPFEPQRRLPAKKSRQQLQREKALVEQSQKLGLQDGSTSLLPEQLLSAPKQRVNVQKPPFSSPTLPSHFTLTSPVGDGQPQGIESQPKELGLENSHDGHNNVEILPPKPDCKLEKKKVELQEKSRWEVLQQEQRLMEEKNKRKKALLAKAIAERSKRTQAETMKLKRIQKELQALDDMVSADIGILRNRIDQASLDYSYAR

SEQ ID NO: 242933 - protein, 394 aa, Artificial Sequence
  derived and/or modified sequence
MSWAAVLAVAAARFGHFWGCRWPGPMAQGWAGFSEEELRRLKQTKDPFEPQRRLPAKKSRQQLQREKALVEQSQKLGLQDGSTSLLPEQLLSAPKQRVNVQKPPFSSPTLPSHFTLTSPVGDGQPQGIESQPKELGLENSHDGHNNVEILPPKPDCKLEKKKVELQEKSRWEVLQQEQRLMEEKNKRKKALLAKAIAERSKRTQAETMKLKRIQKELQALDDMVSADIGILRNRIDQASLDYSYARKRFDRAEAEYIAAKLDIQRKTEIKEQLTEHLCTIIQQNELRKAKKLEELMQQLDVEADEETLELEVEVERLLHEQEVESRRPVVRLERPFQPAEESVTLEFAKENRKCQEQAVSPKVDDQCGNSSSIPFLSPNCPNQEGNDISAALAT

SEQ ID NO: 242934 - DNA, 1185 bp, Artificial Sequence
  derived and/or modified sequence
atgtcctgggccgcagtgctggcagtggcagccgctaggtttggccacttttggggttgtcggtggcctggacctatggctcagggctgggctgggttttctgaggaagagctccgacggctcaaacagactaaggacccatttgagccacaacgacgattgccagcaaaaaaatcacggcagcaactgcagagagaaaaggcactggttgagcaatcacaaaagctcggcctgcaagatgggagcacgtctctgctgcccgagcagctgctgagcgctccgaagcagcgcgtgaatgtgcagaagcccccattctcttccccgacgctaccatcacacttcactctaaccagcccagtgggagacggacagcctcagggtatagagtcccagcccaaggagctcggtctcgagaacagccatgacggacataacaacgtcgaaatcttacccccaaaacccgactgcaagcttgagaagaaaaaggtggaattgcaggaaaaaagtcggtgggaagtgctccagcaagaacagcgtctgatggaggagaaaaataagagaaagaaagcactactagctaaggccattgccgagcggagcaagagaacccaggctgaaacaatgaagttgaagcggatacaaaaagagctccaggccctggatgacatggtcagcgccgacatcggaatcctccggaatcgtatagatcaagcttcgctggattattcatatgcacgcaaacgattcgaccgagccgaagcagagtacattgcagcgaaactggacatccagaggaagacagaaatcaaggaacagcttaccgaacatctgtgtaccattattcaacagaacgaattgaggaaagctaagaaactggaagagctcatgcaacagttagatgttgaggcggatgaggagactctcgagctggaggtcgaggtggaacgtttactgcatgagcaagaggtggaaagtagacggcctgttgttagactggagcggccttttcaacccgctgaggaatctgtgactctggaattcgcgaaggaaaatcgcaaatgtcaggagcaagccgtgtctcctaaggttgatgaccagtgcggcaattcgtcctccattccttttttgagtcccaattgtcccaaccaggagggaaatgacatatctgcagccttggccacatag

SEQ ID NO: 242935 - DNA, 2189 bp, Artificial Sequence
  derived and/or modified sequence
gcggccggggaaaaacccggatgagctgggcagcagtgttggcagtcgcggctgcgagatttgggcacttttgggggtgccggtggcccgggccgatggcgcaaggttgggcaggattctctgaggaggaactgaggagactaaagcagactaaagatccatttgaaccacagcgacgtctccccgcgaagaaaagtcgacaacaacttcagcgagaaaaagcccttgtagagcaaagccaaaaacttgggcttcaagatggatcaacctcattacttccagagcagctgctttcagcaccaaaacagagagttaacgttcaaaaaccacctttttcttcccctactcttccgagtcatttcactctcacctcccccgttggtgatggacaaccacagggcattgaaagtcagccaaaggaactgggacttgagaattcccatgatggtcacaacaatgttgagattctacctccaaagccagattgcaaattggagaaaaagaaagtggaattgcaagaaaaatctcgttgggaagtcctccaacaagaacaacggctaatggaagagaaaaataaacgtaaaaaagctcttttggctaaagctattgcagaaagatccaaaagaactcaggcagagaccatgaaactaaagcggatccagaaggagttgcaggctttagatgacatggtgtcagctgacattggaattctcaggaaccggattgatcaggccagcttagactattcatacgctcggaagcggtttgacagggctgaagcagagtacattgcagcaaagctagatatacagcgcaagactgagataaaagagcaactcactgaacacctttgtacgatcatacagcaaaatgagctccgaaaggccaagaagttggaggagttgatgcaacaactagatgtagaagccgatgaagagactttggagcttgaggtggaggtcgagagattgctacacgaacaagaagtagaatcaaggagaccagtggttcgtttagagaggccatttcagcctgcggaggagagtgtgacattagaatttgctaaagagaacagaaagtgtcaagaacaagctgtttccccaaaggtagatgaccagtgtggaaattccagtagcatcccctttcttagtccaaactgcccaaatcaagaaggtaatgacatttcagctgctttggccacatgaagttctggtattcttttgagctaatatggtattgagtaaagtatactttttgcagtagatcatgccctgacctccaataaaaacctctttaaaacaatgctgatttttgaattcatgattagttttagtaaattaataggtttggccattctaaaatccaaaattatgataactgtatttctaggggtatgtttcaccttgattttggcccggttctttcagtgttccgtttaccctttttactgaaagtaagtgacttaaaaggatggaagaaaaactacatggttggagtgtttttagatcagataaatatagaaaagtaaaatggaaaatgatactcaatacctagttaaactcatttcacttctcctgggagacgtattaagactggaagtcctattttatttaatcagtatcagtaaaaagacaaaaattacagtgtgaacaagagaaaaacaggaatagaagaaaaaagttgcaggttgaattatctatctggatattactagagttgtaaaacacaacttggaaactggaatttatgtgaagaaccaaacaacttaaaccagcatcacttttgtcttcaatttgccttccagtgattttagtttacaacctgcgttttgttatttgaaacacacacacttatatataaacacatgtaattttactattttattgtctttcctttaatcgatgaattgattaaatttagacaattaaaacatttctaaagtgagactgaaaataatatagaaaatctcattgctacttgtgattatcaaaaaaagtatgtattttctttctaaagttatctataaatatgtttttgatatgttggacatgaattaccctgtcatgaagcgtttaaattgttaaaatgctgattttcttattagtttgttaattgcctgttactagtacttgaccaatacattgtgctatatgtaaatgtgtaaataaatattgtaattttctcacaaa

SEQ ID NO: 242936 - DNA, 1185 bp, Artificial Sequence
  derived and/or modified sequence
atgtcctgggccgctgtgctggccgtggccgccgcccgcttcggccacttctggggctgccgctggccaggccccatggcccagggctgggccggcttcagcgaggaggagctgcggcggctgaagcagaccaaggacccctttgagccccagaggcggctgcctgccaagaagagccggcagcagctgcagcgggagaaggccctggtggagcagagccagaagctgggcctgcaggacggcagcaccagcctgctgcctgagcagctgctgagcgcccccaagcagagggtgaatgtgcagaagccacccttcagcagccccaccctgcccagccacttcaccctgaccagccctgtgggagatggccagccccagggcatcgagagccagcccaaggagctgggcctggagaacagccatgatggccacaacaacgtggagatcctgccccccaagccagactgcaagctggagaagaagaaggtggagctgcaggagaagagccgctgggaggtgctgcagcaggagcagaggctgatggaggagaagaacaagaggaagaaggccctgctggccaaggccatcgccgagaggagcaagaggacccaggccgagaccatgaagctgaagaggatccagaaggagctgcaggccctggatgacatggtgtctgctgacatcggcatcctgaggaacagaattgaccaggccagcctggactacagctatgccaggaagagatttgacagagctgaggccgagtacatcgccgccaagctggacatccagaggaagacagagatcaaggagcagctgacagagcacctgtgcaccatcatccagcagaatgagctgaggaaggccaagaagctggaggagctgatgcagcagctggatgtggaggctgatgaggagaccctggagctggaggtggaggtggagcggctgctgcacgagcaggaggtggagagccggcggcctgtggtgcggctggagcggcccttccagcctgctgaggagagcgtgaccctggagtttgccaaggagaacaggaagtgccaggagcaggccgtgagccccaaggtggatgaccagtgtggcaacagcagcagcatccccttcctgagccccaactgccccaaccaggagggcaatgacatctctgctgccctggccacctag

SEQ ID NO: 242937 - DNA, 1185 bp, Artificial Sequence
  derived and/or modified sequence
atgagctgggccgccgtgctggccgtggccgccgcccggttcggccacttctggggatgtcggtggccaggccctatggctcaggggtgggctggatttagcgaagaagagctgcggcggttgaaacaaactaaggaccctttcgagccacagagacggctcccggctaagaaatctcggcaacaattgcagcgggaaaaggccttggtagagcaatcccaaaagcttggtctgcaggacggcagcacttccctgctgccagaacaactactgtctgcccctaagcagagggtcaacgttcaaaagccccctttttcctctcctacactcccatcgcatttcactctgacaagtccagttggcgacggtcagccacagggcatcgagagccagccaaaggagctgggactggagaactcacatgacggccacaataatgtagagatccttccacccaaaccggattgcaagctggaaaaaaaaaaggtagaactgcaggagaaatcccgctgggaggtgttgcagcaggaacagaggctaatggaggagaagaacaagcgcaagaaggccctcctagctaaagcaatcgccgagaggtcaaaacgaacgcaagccgagaccatgaaactgaagcggatacagaaagaacttcaggctctggacgatatggtcagcgcggatatcggtattctgcgcaatcggattgatcaggcttcactggactactcatatgccaggaagagattcgacagagccgaggcagagtatattgccgccaagctggatattcagagaaagaccgaaattaaggagcagcttactgagcatctgtgtacaattatccagcaaaatgagctgcgcaaggctaagaaactagaagaactgatgcagcaattagatgtggaggccgacgaggagactctcgagcttgaggttgaggtagaacgtctgctgcatgagcaggaggtggaatcaagacggcccgtggtgagactcgagcggccctttcagcccgccgaggagtccgtcaccctggagtttgctaaggaaaatagaaagtgccaagaacaggctgtgagccccaaggttgatgaccagtgcggaaatagtagttccataccgttcttaagtccaaactgtcccaatcaggaaggcaatgatatctctgccgcactggcaacctag

SEQ ID NO: 242938 - DNA, 1185 bp, Artificial Sequence
  derived and/or modified sequence
atgtcttgggctgccgtacttgcagttgctgctgctagattcggacatttctggggctgtcgctggcccggacccatggctcaaggttgggctggcttttcagaggaagaactccggcgacttaagcagaccaaggaccctttcgaaccccagagacgtcttcccgcaaaaaaatcccgccagcaacttcaaagggagaaggccctggttgaacagagccagaagttagggttgcaggacggaagcacaagcttgttgccagagcaactcctctccgcacccaagcaaagagtgaacgtgcagaagcctccgttttcgtctccgactctgccttcccactttaccctcacatcccctgtgggcgacgggcaaccacagggcattgagtctcagcccaaagagctgggactggaaaattctcatgacggccataataatgtcgagatcctacccccaaagccggattgtaagctggaaaagaagaaagtggagctacaagagaagagcagatgggaagtgctccagcaagaacagcgactgatggaggagaagaacaagagaaaaaaggctctgctggcgaaagcaatcgccgagcggtccaagagaacccaggccgaaacaatgaaactgaagcgcatccaaaaagagttgcaggccctagatgacatggtgtcagcagatataggtattctgcggaatcgaatagaccaggcgtcactcgactactcatacgcccgaaagagattcgacagagccgaggctgagtacatcgcagcaaagctggacattcagcgtaagactgaaatcaaagagcagctgacggaacacttatgtactattattcagcagaatgaactgcggaaagccaaaaaactcgaagaactgatgcagcagctcgatgtcgaggccgacgaagagacactggaactggaagtggaagtggagagactcctacacgagcaggaagtcgagtctcgcaggcccgtggtgcgtctcgagagaccctttcaacccgcagaagaatcagttactctcgagttcgctaaagagaatagaaagtgtcaggaacaggctgtcagtccaaaagtggacgaccagtgcgggaactctagtagtatcccgttcctgtcaccaaattgtcccaatcaggaagggaacgatatttccgcggcactggccacgtag

SEQ ID NO: 242939 - DNA, 1185 bp, Artificial Sequence
  derived and/or modified sequence
atgagctgggccgccgtgctggccgtggccgccgccagattcggccacttctggggctgcagatggcccggccccatggcccagggctgggccggcttcagcgaggaggagctgagaagactgaagcagaccaaggaccccttcgagccccagagaagactgcccgccaagaagagcagacagcagctgcagagagagaaggccctggtggagcagagccagaagctgggcctgcaggacggcagcaccagcctgctgcccgagcagctgctgagcgcccccaagcagagagtgaacgtgcagaagccccccttcagcagccccaccctgcccagccacttcaccctgaccagccccgtgggcgacggccagccccagggcatcgagagccagcccaaggagctgggcctggagaacagccacgacggccacaacaacgtggagatcctgccccccaagcccgactgcaagctggagaagaagaaggtggagctgcaggagaagagcagatgggaggtgctgcagcaggagcagagactgatggaggagaagaacaagagaaagaaggccctgctggccaaggccatcgccgagagaagcaagagaacccaggccgagaccatgaagctgaagagaatccagaaggagctgcaggccctggacgacatggtgagcgccgacatcggcatcctgagaaacagaatcgaccaggccagcctggactacagctacgccagaaagagattcgacagagccgaggccgagtacatcgccgccaagctggacatccagagaaagaccgagatcaaggagcagctgaccgagcacctgtgcaccatcatccagcagaacgagctgagaaaggccaagaagctggaggagctgatgcagcagctggacgtggaggccgacgaggagaccctggagctggaggtggaggtggagagactgctgcacgagcaggaggtggagagcagaagacccgtggtgagactggagagacccttccagcccgccgaggagagcgtgaccctggagttcgccaaggagaacagaaagtgccaggagcaggccgtgagccccaaggtggacgaccagtgcggcaacagcagcagcatccccttcctgagccccaactgccccaaccaggagggcaacgacatcagcgccgccctggccacctag

SEQ ID NO: 242940 - protein, 233 aa, Artificial Sequence
  derived and/or modified sequence
MSKLGKFFKGGGSSKSRAAPSPQEALVRLRETEEMLGKKQEYLENRIQREIALAKKHGTQNKRAALQALKRKKRFEKQLTQIDGTLSTIEFQREALENSHTNTEVLRNMGFAAKAMKSVHENMDLNKIDDLMQEITEQQDIAQEISEAFSQRVGFGDDFDEDELMAELEELEQEELNKKMTNIRLPNVPSSSLPAQPNRKPGMSSTARRSRAASSQRAEEEDDDIKQLAAWAT

SEQ ID NO: 242941 - DNA, 702 bp, Artificial Sequence
  derived and/or modified sequence
atgagcaagctgggcaagttcttcaagggcggcggcagcagcaagagcagagccgcccccagcccccaggaggccctggtgagactgagagagaccgaggagatgctgggcaagaagcaggagtacctggagaacagaatccagagagagatcgccctggccaagaagcacggcacccagaacaagagagccgccctgcaggccctgaagagaaagaagagattcgagaagcagctgacccagatcgacggcaccctgagcaccatcgagttccagagagaggccctggagaacagccacaccaacaccgaggtgctgagaaacatgggcttcgccgccaaggccatgaagagcgtgcacgagaacatggacctgaacaagatcgacgacctgatgcaggagatcaccgagcagcaggacatcgcccaggagatcagcgaggccttcagccagagagtgggcttcggcgacgacttcgacgaggacgagctgatggccgagctggaggagctggagcaggaggagctgaacaagaagatgaccaacatcagactgcccaacgtgcccagcagcagcctgcccgcccagcccaacagaaagcccggcatgagcagcaccgccagaagaagcagagccgccagcagccagagagccgaggaggaggacgacgacatcaagcagctggccgcctgggccacctag

SEQ ID NO: 242942 - DNA, 702 bp, Artificial Sequence
  derived and/or modified sequence
atgtccaagttggggaaatttttcaaaggcggtggctcgtccaaaagcagagcagccccatccccccaagaggccctcgtgcgtctcagagagacagaggagatgctcggaaaaaagcaggaatatttagaaaaccgcatccagcgcgaaattgccttggccaagaaacacggaactcagaacaagcgcgccgccctccaggccctgaaacgcaagaaaagattcgagaagcagctgactcaaattgatggcacgctgagcaccatcgagtttcaacgtgaagctctggaaaattcacacacaaatacagaagtgctcaggaacatggggtttgctgccaaagcaatgaagtcggtgcacgaaaatatggacctaaataaaattgatgatctgatgcaagagatcacggaacagcaagacatagctcaggagatctctgaggctttttctcaacgcgtgggctttggagacgattttgacgaagatgagctaatggccgaattggaggaactggagcaagaggagctcaacaaaaagatgactaatattcggttacccaacgtcccctcatcaagcctgcccgcacagcccaaccgtaagcctggaatgtcctccaccgcccggagaagtagggcagcttcaagtcaaagggccgaagaagaagacgatgacataaagcagctggcagcctgggctacctag

SEQ ID NO: 242943 - DNA, 702 bp, Artificial Sequence
  derived and/or modified sequence
atgagcaagctgggcaagttcttcaagggcggcggcagcagcaagagccgggccgcccccagcccccaggaggccctggtgcggctgcgggagacagaggagatgctgggcaagaagcaggagtacctggagaaccgcatccagcgggagatcgccctggccaagaagcacggcacccagaacaagagagctgccctgcaggccctgaagaggaagaagagatttgagaagcagctgacccagattgatggcaccctgagcaccatcgagttccagcgggaggccctggagaacagccacaccaacacagaggtgctgaggaacatgggctttgctgccaaggccatgaagtctgtgcatgagaacatggacctgaacaagattgatgacctgatgcaggagatcacagagcagcaggacatcgcccaggagatcagcgaggccttcagccagagggtgggctttggagatgactttgatgaagatgagctgatggccgagctggaggagctggagcaggaggagctgaacaagaagatgaccaacatccggctgcccaacgtgcccagcagcagcctgcctgcccagcccaacaggaagccaggcatgagcagcacagcccggcgcagccgggccgccagcagccagagagctgaggaggaggatgatgacatcaagcagctggccgcctgggccacctag

SEQ ID NO: 242944 - DNA, 702 bp, Artificial Sequence
  derived and/or modified sequence
atgagcaagctgggcaagttcttcaagggcggcggcagcagcaagtcccgggctgctccctccccccaggaggccctggtgcgcctgcgggagacggaggagatgttgggaaaaaaacaggagtatctggaaaatcgaatacaacgcgagatagctctggccaagaaacacggcactcagaacaaacgggcagctctccaagcactgaaacgaaaaaagcgctttgaaaagcaacttacgcagatagatggcacattgtctacaatagagtttcagagggaagcattagagaacagtcacaccaacacagaagtattgaggaacatgggctttgccgcaaaggctatgaagagcgtgcacgagaacatggacctcaataagatcgatgatctcatgcaggagataacggaacaacaggacatcgcccaggaaattagtgaggcattttcacagagagttggttttggggatgactttgatgaagacgaactgatggctgaattagaagagctggaacaggaggagctgaacaagaaaatgaccaacatacgattgcccaatgtgccctcctcatctctccccgcccaacccaaccggaaacctggaatgtctagcacagctaggcgcagcagggcggcttccagccagcgagcagaagaggaggacgatgatatcaagcaattagcagcctgggcaacatag

SEQ ID NO: 242945 - DNA, 702 bp, Artificial Sequence
  derived and/or modified sequence
atgtccaagctgggcaaattcttcaaaggtgggggaagctccaagtccagggctgctccgagcccccaggaagccctcgttcggcttcgcgagaccgaggaaatgttggggaagaaacaggagtacctggagaatcggatccagcgcgagattgccctggctaagaagcacggtacacagaacaagagagcagccctccaggcactgaagcgcaagaaaaggttcgagaaacagcttactcagattgatgggaccctgagcactattgagtttcagcgggaagccttggaaaattcccataccaacaccgaggtcctccgtaacatgggttttgcagctaaggcaatgaagtcagtgcatgaaaacatggacctgaacaagatcgacgatttaatgcaggaaattaccgaacagcaggacattgcgcaggagatctccgaagccttctctcagagagtcggttttggggacgactttgatgaagatgagttaatggcagagttggaggagctagagcaggaagaactcaacaagaagatgactaatatccggctgcccaatgtgcccagtagctctcttccagcccaaccgaataggaaacccggaatgtccagcacagcacgaaggagcagggccgcaagttcccagcgggctgaggaggaagacgacgacattaagcagttggctgcttgggcaacatag

SEQ ID NO: 242946 - DNA, 1866 bp, Artificial Sequence
  derived and/or modified sequence
ggggccgaactggcagccaggaaatgccctggagtgtgtgtcacctgtccaggacgacttgttgattcccaggagggccgcctttccggtctgggtccccgagaggactgccttgctcacctgtcccctcggcgcggccccggggagctcccgagaggcccccgggatcgctggccctccgaactccacagcaatgagcaagttgggcaagttctttaaagggggcggctcttctaagagccgagccgctcccagtccccaggaggccctggtccgacttcgggagactgaggagatgctgggcaagaaacaagagtacctggaaaatcgaatccagagagaaatcgccctggccaagaagcacggcacgcagaataagcgagctgcattacaggcactaaagagaaagaagaggttcgagaaacagctcactcagattgatggcacactttctaccattgagttccagagagaagccctggagaactcacacaccaacactgaggtgttgaggaacatgggctttgcagcaaaagcgatgaaatctgttcatgaaaacatggatctgaacaaaatagatgatttgatgcaagagatcacagagcaacaggatatcgcccaagaaatctcagaagcattttctcaacgggttggctttggtgatgactttgatgaggatgagttgatggcagaacttgaagaattggaacaggaggaattaaataagaagatgacaaatatccgccttccaaatgtgccttcctcttctctcccagcacagccaaatagaaaaccaggcatgtcgtccactgcacgtcgatcccgagcagcatcttcccagagggcagaagaagaggatgatgatatcaaacaattggcagcttgggctacctaaactaaaacacatttttgatacctaaattaatgagctatagataaaatataaaaaatgtttttaccaagttcagaagttaacaaagactctgctttataattatattgaatgaataattgtgttttaagcctcctaagtaaaagtaaaaaaggagtcatgtgcatacatagaatcagtgatggaggccaggcacggtatctcatgcctataatcccagcactttgggaggctgaggcagttgagaccaggagttcgagtccagcctgaccaacatgaagaaaccctgtctgtactaaaaatacaaaaattagccggacatggtggcaggcacctgtaatcccagctacttgggaggctgagtcaggagaatcgcttgagcccaggagatggaggttgcagtgagccaagatcatgccactgcactccagactgggcaacagagggagactccgtctcaaaaactaaaaaaaaaaaatacatttagtatagcggggggtgggggggagaaataatgttatttcctatgcgaatgacgtgtatccctgtacccatggtaaatgtaaatatactgtgtctcttttgggagagccttttagtagaggagtcttatatgagtctctacataagtagtttcacttgagttttgcagtttgaaatcttaaaggagctttaattgacatttattataccaattaagcttggaatggggcaatggatgcatttcccaaaacgtgtgaaagcactaacagcttatattgctgaatgagaatctcctgggtgtaatttagccacttagggaactgcgtgaacactcccaggccattatgatgctgttacagcttcagtgtataaatgcatgagtattctttctgttctgttttgtgctctcttgtacatttatttaccctttacagaatatttcttgtaaatacataaaaatattggcaattaaaagtacatcttgaataaaa

SEQ ID NO: 242947 - protein, 295 aa, Artificial Sequence [sequence omitted]

SEQ ID NO: 242948 - protein, 273 aa, Artificial Sequence
  derived and/or modified sequence
MKGGEGDAGEQAPLNPEGESPAGSATYREFVHRGYLDLMGASQHSLRALSWRRLYLSRAKLKASSRTSALLSGFAMVAMVEVQLESDHEYPPGLLVAFSACTTVLVAVHLFALMVSTCLLPHIEAVSNIHNLNSVHQSPHQRLHRYVELAWGFSTALGTFLFLAEVVLVGWVKFVPIGAPLDTPTPMVPTSRVPGTLAPVATSLSPASNLPRSSASAAPSQAEPACPPRQACGGGGAHGPGWQAAMASTFPGIFPISLSLGFCKLLCTWAGLS

SEQ ID NO: 242949 - DNA, 888 bp, Artificial Sequence
  derived and/or modified sequence
atgaagggtggcgaaggcgatgcaggagagcaggcacccctgaatcctgagggcgagtcaccagcaggtagcgccacttatagggaattcgtccatagagggtacctggacctgatgggcgcaagtcagcatagtctgagggctctctcctggaggcgcctctacctgtcacgcgccaagttaaaggcatcgtcacgcacctcagctctgctctccggtttcgcgatggttgctatggtggaagtgcagttagaatcagatcacgaatatccgcccggactgctcgtagctttcagtgcctgcactaccgttctagtggctgtccatctcttcgctcttatggtgtccacttgcttgctaccacatatcgaagctgttagtaacatccacaatctgaattctgtgcatcagtctcctcaccaacggctacatagatatgtcgagcttgcatggggcttcagtacagcacttggcacctttttgtttctggccgaggtcgtcctagttggttgggtaaaattcgtgccaataggcgcacccttggacactcctacacccatggtgcctactagtagggtgccgggtactcttgcccctgtcgccacctccttgtcccctgcctcaaatcttccccgtagctccgcttccgctgcaccttcacaggccgagccggcttgtccacccaggcaggcctgcggggggggaggagctcacggaccaggatggcaggccgcgatggcttcgacagcaataatggttcccgtcggactggttttcgtggcgtttgcgttgcacttttatcggagccttgttgctcacaaaaccgacagatataaacaggagctggaagaactgaaccgccttcaaggagagctccaagccgtgtag

SEQ ID NO: 242950 - DNA, 822 bp, Artificial Sequence
  derived and/or modified sequence
atgaaaggcggtgagggcgatgccggagaacaagctcctctgaacccggagggtgagtctcctgctggttcggccacttacagagagttcgttcacaggggctatctcgatctgatgggagctagccagcattccctgcgggctctctcatggcgaagactttacttgagccgggccaagctcaaggcatctagcagaacaagtgcacttttatcaggattcgcaatggtcgcgatggtcgaagtgcagctggaatctgaccacgagtacccaccagggctgctggtggctttttctgcctgtaccaccgtccttgttgccgtgcacctctttgccctcatggtgagcacatgcttactgccccacatcgaagcagtgtcgaatatccacaatttgaatagcgtgcatcagtcgcctcatcagagactccacaggtacgtggagcttgcctgggggttttcaaccgccttgggcactttcctatttctcgctgaggtagtcctcgtcggctgggtgaaatttgttccaatcggtgcacctctggatacacccacacctatggtgcccacgtccagggttcctgggaccctcgccccagtcgccactagccttagtccagcctctaatctccctcgtagctcagcatccgcagctccaagccaggcagagccagcctgcccccccaggcaggcttgtggaggtggcggggcccacgggcctggatggcaagccgcaatggcttctacattccccggcattttcccaatcagcctttcgttagggttctgtaaattgttatgcacttgggctggcctgtcctag

SEQ ID NO: 242951 - DNA, 888 bp, Artificial Sequence
  derived and/or modified sequence
atgaagggcggggagggagatgctggggagcaggcccccctgaaccctgagggggagagccctgctggcagcgccacctaccgggagtttgtgcaccggggctacctggacctgatgggcgccagccagcacagcctgcgggccctgtcctggaggcggctgtacctgagccgggccaagctgaaggccagcagcaggaccagcgccctgctgagcggctttgccatggtggccatggtggaggtgcagctggagagtgaccacgagtacccacctggcctgctggtggccttcagcgcctgcaccaccgtgctggtggccgtgcacctgtttgccctgatggtgtccacctgcctgctgccccacattgaagctgtgagcaacatccacaacctgaacagcgtgcaccagagcccccaccagaggctgcaccgctacgtggagctggcctggggcttcagcacagccctgggcaccttcctgttcctggccgaggtggtgctggtgggctgggtgaagtttgtgcccatcggggcccccctggacacccccacccccatggtgcccaccagccgggtgcccggcaccctggcccctgtggccaccagcctgagccctgccagcaacctgcccaggagcagcgccagcgctgcccccagccaggccgagcccgcctgccccccccggcaggcctgtggcggcggcggggcccacggccctggctggcaggccgccatggccagcacagccatcatggtgcctgtgggcctggtgtttgtggcctttgccctgcacttctaccgcagcctggtggcccacaagacagaccgctacaagcaggagctggaggagctgaaccggctgcagggcgagctgcaggccgtgtag

SEQ ID NO: 242952 - DNA, 822 bp, Artificial Sequence
  derived and/or modified sequence
atgaagggcggggagggagatgctggggagcaggcccccctgaaccctgagggggagagccctgctggcagcgccacctaccgggagtttgtgcaccggggctacctggacctgatgggcgccagccagcacagcctgcgggccctgtcctggaggcggctgtacctgagccgggccaagctgaaggccagcagcaggaccagcgccctgctgagcggctttgccatggtggccatggtggaggtgcagctggagagtgaccacgagtacccacctggcctgctggtggccttcagcgcctgcaccaccgtgctggtggccgtgcacctgtttgccctgatggtgtccacctgcctgctgccccacattgaagctgtgagcaacatccacaacctgaacagcgtgcaccagagcccccaccagaggctgcaccgctacgtggagctggcctggggcttcagcacagccctgggcaccttcctgttcctggccgaggtggtgctggtgggctgggtgaagtttgtgcccatcggggcccccctggacacccccacccccatggtgcccaccagccgggtgcccggcaccctggcccctgtggccaccagcctgagccctgccagcaacctgcccaggagcagcgccagcgctgcccccagccaggccgagcccgcctgccccccccggcaggcctgtggcggcggcggggcccacggccctggctggcaggccgccatggccagcaccttccctggcatcttccccatcagcctgagcctgggcttctgcaagctgctgtgcacctgggccggcctgtcctag

SEQ ID NO: 242953 - DNA, 888 bp, Artificial Sequence
  derived and/or modified sequence
atgaagggcggcgagggcgacgccggcgagcaggcccccctgaaccctgagggcgaatcccctgccggcagtgccacatatagagagtttgtgcatcgggggtacctggatctcatgggagccagccagcacagcttaagagcactgtcatggaggcgtctctacctgtctcgggctaagctgaaagcgtcttcacggacctccgctttattgagcggctttgcaatggttgctatggtggaggttcaacttgagtcggatcatgaataccctccaggcctactggttgctttcagcgcctgcaccaccgtgctggtggctgtccatctctttgccttgatggtctccacctgcctgctgccgcacatcgaggccgtgagcaacattcataatctcaactcagtccaccagtctccgcaccaaagactgcaccgttacgtggagctggcatggggtttcagcaccgcattgggcaccttccttttcctggctgaggtggtgctggttggttgggtgaaatttgtgccaatcggggccccgctggatacccctacaccaatggtgcctacttcccgtgttcccggcaccctggcccctgtggcgactagcttgagtccagctagcaacctgccacgcagctcggcctccgccgcgccctcgcaggccgagcccgcatgccccccaagacaggcctgtgggggaggaggggctcacggtcccggatggcaggcagcaatggccagcaccgctattatggtccccgtgggattggtattcgtcgcctttgctcttcatttctatagatctctggtcgcccataagactgatcgctacaaacaggagctagaagagctgaaccgcctgcagggcgagttgcaagcagtttag

SEQ ID NO: 242954 - DNA, 822 bp, Artificial Sequence
  derived and/or modified sequence
atgaagggcggcgagggcgacgccggcgagcaggcccccctgaaccccgaaggggagagtcccgccggcagcgccacttatcgagagtttgtgcacaggggttacctggacctgatgggcgccagccagcactccctcagggcactcagttggcggagactatacctctctagagccaaactcaaggccagtagccgcacttctgccctcttatcagggtttgccatggtcgccatggtggaggtgcagcttgaatctgaccatgagtaccctcctggattactggtggccttttccgcatgcaccacagtgttggtcgcagtccacctgttcgctctgatggtgagcacatgtctacttccacacatcgaagctgtatccaatattcataacctgaattcagtgcaccagtcgccacaccagcgcctgcatcggtacgtggaactggcctggggatttagcaccgcactggggaccttcttgttcctcgccgaggtagtgcttgtcggatgggtgaagtttgtacctataggcgctccactggacactcccacaccgatggtcccgacctctagagttcccggcactctggcacccgtggcaaccagcctgtccccagcttctaacttgcctaggtcgtccgccagcgctgctcccagccaggcggagccggcttgcccacctcgtcaagcctgtggcgggggtggcgcccatgggcctggctggcaggctgctatggcctcaacattcccaggtatttttccaatctccctcagcctaggcttctgtaagctgctctgcacgtgggccgggctgtcctag

SEQ ID NO: 242955 - DNA, 2206 bp, Artificial Sequence
  derived and/or modified sequence
ccagttcctgttttggcctccgctgtcccgctccggctcctggggctccccgcagacgctgcttttcttgctccactgggggtgcctcttcctgggcgcccgccgcctgcatcctgctcgtcctgtctgggaatggggccgcccccgggcttgggccggcccggctggggcccccgaggcgcttccgccccgtagtgaccgcctggtgccgccccccccccaggatgaagggcggcgagggggacgcgggcgagcaggccccgctgaaccctgagggcgagagccctgcaggctcggccacgtaccgggagttcgtgcaccgcggctacctggacctcatgggggccagtcagcactcgctgcgggcgctcagctggcgccgcctctacctcagccgggccaagctcaaagcttccagccgcacgtctgccttgctctcgggcttcgccatggtggccatggtggaggtgcagctggagagtgaccacgagtacccaccaggcctgctggtggccttcagtgcctgcaccaccgtgctggtggctgtgcacctctttgcactcatggtctccacgtgtctgctgccccacattgaagctgtgagcaacatccacaacctcaactctgtccaccagtcgccacaccagagactgcaccgctacgtggagctggcctggggcttctccactgccctgggcacctttctcttccttgctgaagttgtcctggttggttgggtcaagtttgtgcccattggggctcccttggacacaccgacccccatggtgcccacatcccgggtgcccgggactctggcaccagtggctacctcccttagtccagcttccaatctcccacggtcctctgcgtctgcagcaccgtcccaagctgagccagcctgcccaccccggcaagcctgtggtggtggtggggcccatgggccaggctggcaagcagccatggcctccacagccatcatggtacccgtggggctcgtgtttgtggcctttgccctgcatttctaccgctccttggtggcacacaagacagaccgctacaagcaggaactagaggaactgaatcgcctgcagggggagctgcaggctgtgtgagactggtgttagccaccgctcactgcaagcactgcctccctccggggtctgtaagaggccgcaggggcctacagacctcatccccccatcccctggctggagccacttccagtggccactctcaggcagagttcagattcctgcccgcagggtcctctgggctgggccttggggcagctcccacattcccagggattttccccatcagtctgtcccttgggttttgcaagctactctgcacctgggctggcctcagttgaaggatcatgcagtagatagaggggaggcagggagagcttgtgggaccttcagtgctgactttagccaccatttccattcctatacaggatgtgaaggtcagaaggcagccaattgttggtttaatttttttttttttttgagacagtctgtttcccaggctggagtgtagtgatacagtcacagctcactgtagcctcgaccttccaggctcaaaagatgctcccaccacagcctcccaggtagtgagtagctggtactacaggtgtgtgctgccacacccgactaatttttttgtagagacggggtttcgctgttcccaggctggtctcaaactcctgggctcaagtgaacctcccgcctcggcctcccaaagtgctgggattcctttctttatttctgtagaatctattttatggttggcattttgggggaagatttcgatgggttccacattcttgctttagttgttgtagagggatttgggtgtttctacccaaggcattggtctagcttttcctacaatgaacctatctttggaggttcaagctccccaccttcccccactgtggtgacctgtggccacttgcagaagggatggtgcctgacccactgccctagccccacgctatgcaccaaacttgttctccccgtcctggtccagggctggggtctttagagactgacagcctctgccccaggcctgagtccttagcaagggttgggtaaggaggttttaagggagaaggtccagtccttagcccttgaaatacaaagctcttctgacactgaatttggatgcaccttgttttatataataaatcgtgtttcacaga

SEQ ID NO: 242956 - DNA, 1028 bp, Artificial Sequence
  derived and/or modified sequence
tccgctgtcccgctccggctcctggggctccccgcagacgctgcttttcttgctccactgggggtgcctcttcctgggcgcccgccgcctgcatcctgctcgtcctgtctgggaatggggccgcccccgggcttgggccggcccggctggggcccccgaggcgcttccgccccgtagtgaccgcctggtgccgccccccccccaggatgaagggcggcgagggggacgcgggcgagcaggccccgctgaaccctgagggcgagagccctgcaggctcggccacgtaccgggagttcgtgcaccgcggctacctggacctcatgggggccagtcagcactcgctgcgggcgctcagctggcgccgcctctacctcagccgggccaagctcaaagcttccagccgcacgtctgccttgctctcgggcttcgccatggtggccatggtggaggtgcagctggagagtgaccacgagtacccaccaggcctgctggtggccttcagtgcctgcaccaccgtgctggtggctgtgcacctctttgcactcatggtctccacgtgtctgctgccccacattgaagctgtgagcaacatccacaacctcaactctgtccaccagtcgccacaccagagactgcaccgctacgtggagctggcctggggcttctccactgccctgggcacctttctcttccttgctgaagttgtcctggttggttgggtcaagtttgtgcccattggggctcccttggacacaccgacccccatggtgcccacatcccgggtgcccgggactctggcaccagtggctacctcccttagtccagcttccaatctcccacggtcctctgcgtctgcagcaccgtcccaagctgagccagcctgcccaccccggcaagcctgtggtggtggtggggcccatgggccaggctggcaagcagccatggcctccacattcccagggattttccccatcagtctgtcccttgggttttgcaagctactctgcacctgggctggcctcagttga

SEQ ID NO: 242957 - DNA, 888 bp, Artificial Sequence
  derived and/or modified sequence
atgaaaggcggagaaggggatgctggggaacaagctccattgaaccccgaaggcgaatcaccagcaggttccgctacttaccgggagttcgtgcataggggatacttggatcttatgggcgcatctcaacatagtctgagggcactctcttggcgaagactctacctgagcagagcgaagctgaaggcttcatctagaacttccgccctgttgagcggctttgccatggtcgccatggtcgaggttcagctcgaatccgatcatgagtatccgcctggccttctcgtggcattctccgcctgcactacagtgctcgtagccgtacacttgtttgcactaatggtaagtacatgcctgctgcctcatattgaagcggtgtcaaatatacataacctgaattccgttcaccagtcacctcatcagcgcctgcaccgatacgtcgaactagcttggggtttctcaactgccttagggacttttctgttcttggcagaggtagtcctagtcggatgggtgaaatttgtgcccatcggggcaccgctagacaccccgacccctatggtgcccaccagccgcgtgcctggcaccctggccccagtggctacatccctctcccctgcgagcaatttgcctaggtcgtcggcctccgcagccccatcacaggcagaaccggcttgcccccctaggcaggcgtgcggtgggggaggagcccacggtcccggttggcaggctgccatggcctccaccgccattatggtcccggtcgggctggtcttcgtggcttttgccctgcacttttataggagtttggtggcgcacaagactgacaggtacaagcaggaactggaggagctgaatcgcctgcaaggtgaactgcaggcggtttag

SEQ ID NO: 242958 - DNA, 822 bp, Artificial Sequence
  derived and/or modified sequence
atgaaaggtggcgagggtgatgcgggagagcaggcccctttgaatcccgagggagaatcgcccgcaggttccgcgacctaccgcgagttcgtgcaccgcggatatttagacttgatgggagcaagtcagcactcactgcgtgccttgagttggcgtagattgtacctgagccgggcaaaactcaaggccagtagtcggactagcgcactcctgtccggcttcgcaatggtggctatggtcgaggtgcagctcgaaagcgaccatgagtatcctcctggtttactggtggcgttctccgcttgcacaacagttcttgttgccgtgcacctgttcgccctgatggtcagtacttgtctgcttccacatatcgaggccgtgagcaacatacacaacttaaattctgtccaccagtcaccgcatcagagactccaccgctatgttgagctggcctggggcttctcaactgcactcgggacattcctgtttctggccgaagtggtcttggttggttgggtaaaattcgttcccatcggcgcaccacttgatacccccacacctatggttcctacttcaagggtgcccggaactctggccccagtggccacctctctgagtccggcttccaatctcccaaggtcgtcggcgtccgctgctccttcgcaggcagaacccgcatgcccccctaggcaggcttgtggcggagggggtgcacatggacccggttggcaggctgccatggccagcacatttccaggaattttccccattagccttagtctgggcttctgcaaattattgtgcacctgggcaggcttgtcgtag

SEQ ID NO: 242959 - DNA, 888 bp, Artificial Sequence
  derived and/or modified sequence
atgaagggcggcgagggcgacgccggcgagcaggcccccctgaaccccgagggcgagagccccgccggcagcgccacctacagagagttcgtgcacagaggctacctggacctgatgggcgccagccagcacagcctgagagccctgagctggagaagactgtacctgagcagagccaagctgaaggccagcagcagaaccagcgccctgctgagcggcttcgccatggtggccatggtggaggtgcagctggagagcgaccacgagtacccccccggcctgctggtggccttcagcgcctgcaccaccgtgctggtggccgtgcacctgttcgccctgatggtgagcacctgcctgctgccccacatcgaggccgtgagcaacatccacaacctgaacagcgtgcaccagagcccccaccagagactgcacagatacgtggagctggcctggggcttcagcaccgccctgggcaccttcctgttcctggccgaggtggtgctggtgggctgggtgaagttcgtgcccatcggcgcccccctggacacccccacccccatggtgcccaccagcagagtgcccggcaccctggcccccgtggccaccagcctgagccccgccagcaacctgcccagaagcagcgccagcgccgcccccagccaggccgagcccgcctgcccccccagacaggcctgcggcggcggcggcgcccacggccccggctggcaggccgccatggccagcaccgccatcatggtgcccgtgggcctggtgttcgtggccttcgccctgcacttctacagaagcctggtggcccacaagaccgacagatacaagcaggagctggaggagctgaacagactgcagggcgagctgcaggccgtgtag

SEQ ID NO: 242960 - DNA, 822 bp, Artificial Sequence
  derived and/or modified sequence
atgaagggcggcgagggcgacgccggcgagcaggcccccctgaaccccgagggcgagagccccgccggcagcgccacctacagagagttcgtgcacagaggctacctggacctgatgggcgccagccagcacagcctgagagccctgagctggagaagactgtacctgagcagagccaagctgaaggccagcagcagaaccagcgccctgctgagcggcttcgccatggtggccatggtggaggtgcagctggagagcgaccacgagtacccccccggcctgctggtggccttcagcgcctgcaccaccgtgctggtggccgtgcacctgttcgccctgatggtgagcacctgcctgctgccccacatcgaggccgtgagcaacatccacaacctgaacagcgtgcaccagagcccccaccagagactgcacagatacgtggagctggcctggggcttcagcaccgccctgggcaccttcctgttcctggccgaggtggtgctggtgggctgggtgaagttcgtgcccatcggcgcccccctggacacccccacccccatggtgcccaccagcagagtgcccggcaccctggcccccgtggccaccagcctgagccccgccagcaacctgcccagaagcagcgccagcgccgcccccagccaggccgagcccgcctgcccccccagacaggcctgcggcggcggcggcgcccacggccccggctggcaggccgccatggccagcaccttccccggcatcttccccatcagcctgagcctgggcttctgcaagctgctgtgcacctgggccggcctgagctag

SEQ ID NO: 242961 - protein, 1013 aa, Artificial Sequence
  derived and/or modified sequence
MGDKKDDKDSPKKNKGKERRDLDDLKKEVAMTEHKMSVEEVCRKYNTDCVQGLTHSKAQEILARDGPNALTPPPTTPEWVKFCRQLFGGFSILLWIGAILCFLAYGIQAGTEDDPSGDNLYLGIVLAAVVIITGCFSYYQEAKSSKIMESFKNMVPQQALVIREGEKMQVNAEEVVVGDLVEIKGGDRVPADLRIISAHGCKVDNSSLTGESEPQTRSPDCTHDNPLETRNITFFSTNCVEGTARGVVVATGDRTVMGRIATLASGLEVGKTPIAIEIEHFIQLITGVAVFLGVSFFILSLILGYTWLEAVIFLIGIIVANVPEGLLATVTVCLTLTAKRMARKNCLVKNLEAVETLGSTSTICSDKTGTLTQNRMTVAHMWFDNQIHEADTTEDQSGTSFDKSSHTWVALSHIAGLCNRAVFKGGQDNIPVLKRDVAGDASESALLKCIELSSGSVKLMRERNKKVAEIPFNSTNKYQLSIHETEDPNDNRYLLVMKGAPERILDRCSTILLQGKEQPLDEEMKEAFQNAYLELGGLGERVLGFCHYYLPEEQFPKGFAFDCDDVNFTTDNLCFVGLMSMIDPPRAAVPDAVGKCRSAGIKVIMVTGDHPITAKAIAKGVGIISEGNETVEDIAARLNIPVSQVNPRDAKACVIHGTDLKDFTSEQIDEILQNHTEIVFARTSPQQKLIIVEGCQRQGAIVAVTGDGVNDSPALKKADIGVAMGIAGSDVSKQAADMILLDDNFASIVTGVEEGRLIFDNLKKSIAYTLTSNIPEITPFLLFIMANIPLPLGTITILCIDLGTDMVPAISLAYEAAESDIMKRQPRNPRTDKLVNERLISMAYGQIGMIQALGGFFSYFVILAENGFLPGNLVGIRLNWDDRTVNDLEDSYGQQWTYEQRKVVEFTCHTAFFVSIVVVQWADLIICKTRRNSVFQQGMKNKILIFGLFEETALAAFLSYCPGMDVALRMYPLKPSWWFCAFPYSFLIFVYDEIRKLILRRNPGGWVEKETYY

SEQ ID NO: 242962 - protein, 1226 aa, Artificial Sequence
  derived and/or modified sequence
MGDKKDDKDSPKKNKGKERRDLDDLKKEVAMTEHKMSVEEVCRKYNTDCVQGLTHSKAQEILARDGPNALTPPPTTPEWVKFCRQLFGGFSILLWIGAILCFLAYGIQAGTEDDPSGDNLYLGIVLAAVVIITGCFSYYQEAKSSKIMESFKNMVPQQALVIREGEKMQVNAEEVVVGDLVEIKGGDRVPADLRIISAHGCKVDNSSLTGESEPQTRSPDCTHDNPLETRNITFFSTNCVEGTARGVVVATGDRTVMGRIATLASGLEVGKTPIAIEIEHFIQLITGVAVFLGVSFFILSLILGYTWLEAVIFLIGIIVANVPEGLLATVTVCLTLTAKRMARKNCLVKNLEAVETLGSTSTICSDKTGTLTQNRMTVAHMWFDNQIHEADTTEDQSGTSFDKSSHTWVALSHIAGLCNRAVFKGGQDNIPVLKRDVAGDASESALLKCIELSSGSVKLMRERNKKVAEIPFNSTNKYQLSIHETEDPNDNRYLLVMKGAPERILDRCSTILLQGKEQPLDEEMKEAFQNAYLELGGLGERVLGFCHYYLPEEQFPKGFAFDCDDVNFTTDNLCFVGLMSMIDPPRAAVPDAVGKCRSAGIKVIMVTGDHPITAKAIAKGVGIISEGNETVEDIAARLNIPVSQVNPRDAKACVIHGTDLKDFTSEQIDEILQNHTEIVFARTSPQQKLIIVEGCQRQGAIVAVTGDGVNDSPALKKADIGVAMGIAGSDVSKQAADMILLDDNFASIVTGVEEGRLIFDNLKKSIAYTLTSNIPEITPFLLFIMANIPLPLGTITILCIDLGTDMVPAISLAYEAAESDIMKRQPRNPRTDKLVNERLISMAYGQIGMIQALGGFFSYFVILAENGFLPGNLVGIRLNWDDRTVNDLEDSYGQQWTYEQRKVVEFTCHTAFFVSIVVVQWADLIICKTRRNSVFQQGMKNKILIFGLFEETALAAFLSYCPGMDVALRMYPLKPSWWFCAFPYSFLIFVYDEIRKLILRRNPGGEGARQGSRGGRGAAGSQAAGPRLPSPCWMALPPGSHSSLSSHLSGHPLCLLTGLCLCGFLVSLPLCPSLCWAARLACLSPSLTLSLSFLLCLSRLGGEGNLLLTSAPPHRPSLPRPPGPGPPLSVPPILYSGGRSPLFLWPHLGPHPLHYLLPPPLWLASLPCPKPLSSLFSVSVSLPLLTPLSIPPAPATSLGSFLLPFSPPADAISGSGQLSNISVGRE

SEQ ID NO: 242963 - protein, 392 aa, Artificial Sequence
  derived and/or modified sequence
MEWWASSPLRLWLLLFLLPSAQGRQKESGSKWKVFIDQINRSLENYEPCSSQNCSCYHGVIEEDLTPFRGGISRKMMAEVVRRKLGTHYQITKNRLYRENDCMFPSRCSGVEHFILEVIGRLPDMEMVINVRDYPQVPKWMEPAIPVFSFSKTSEYHDIMYPAWTFWEGGPAVWPIYPTGLGRWDLFREDLVRSAAQWPWKKKNSTAYFRGSRTSPERDPLILLSRKNPKLVDAEYTKNQAWKSMKDTLGKPAAKDVHLVDHCKYKYLFNFRGVAASFRFKHLFLCGSLVFHVGDEWLEFFYPQLKPWVHYIPVKTDLSNVQELLQFVKANDDVAQEIAERGSQFIRNHLQMDDITCYWENLLSEYSKFLSYNVTRRKGYDQIIPKMLKTEL

SEQ ID NO: 242964 - DNA, 1179 bp, Artificial Sequence
  derived and/or modified sequence
atggagtggtgggccagcagccccctgagactgtggctgctgctgttcctgctgcccagcgcccagggcagacagaaggagagcggcagcaagtggaaggtgttcatcgaccagatcaacagaagcctggagaactacgagccctgcagcagccagaactgcagctgctaccacggcgtgatcgaggaggacctgacccccttcagaggcggcatcagcagaaagatgatggccgaggtggtgagaagaaagctgggcacccactaccagatcaccaagaacagactgtacagagagaacgactgcatgttccccagcagatgcagcggcgtggagcacttcatcctggaggtgatcggcagactgcccgacatggagatggtgatcaacgtgagagactacccccaggtgcccaagtggatggagcccgccatccccgtgttcagcttcagcaagaccagcgagtaccacgacatcatgtaccccgcctggaccttctgggagggcggccccgccgtgtggcccatctaccccaccggcctgggcagatgggacctgttcagagaggacctggtgagaagcgccgcccagtggccctggaagaagaagaacagcaccgcctacttcagaggcagcagaaccagccccgagagagaccccctgatcctgctgagcagaaagaaccccaagctggtggacgccgagtacaccaagaaccaggcctggaagagcatgaaggacaccctgggcaagcccgccgccaaggacgtgcacctggtggaccactgcaagtacaagtacctgttcaacttcagaggcgtggccgccagcttcagattcaagcacctgttcctgtgcggcagcctggtgttccacgtgggcgacgagtggctggagttcttctacccccagctgaagccctgggtgcactacatccccgtgaagaccgacctgagcaacgtgcaggagctgctgcagttcgtgaaggccaacgacgacgtggcccaggagatcgccgagagaggcagccagttcatcagaaaccacctgcagatggacgacatcacctgctactgggagaacctgctgagcgagtacagcaagttcctgagctacaacgtgaccagaagaaagggctacgaccagatcatccccaagatgctgaagaccgagctgtag

SEQ ID NO: 242965 - DNA, 1179 bp, Artificial Sequence
  derived and/or modified sequence
atggaatggtgggcctcttcccccctccgactctggctcctcttatttttgctgccttctgcacaagggagacagaaggaaagtgggagcaaatggaaagtgtttattgaccagattaatcggtcgctggagaattatgaaccatgcagctcccagaattgctcctgttaccatggagtgatcgaggaagacctgactccttttcgaggagggattagcagaaaaatgatggctgaagtcgtgcgccggaagttgggcacgcattaccagattaccaagaaccgactttacagggagaacgattgcatgttcccctcgagatgtagcggcgtagaacacttcattctggaggttatcgggaggttgcccgatatggaaatggtcatcaacgtccgcgactatccccaggtgccgaaatggatggagcccgctatccctgtgtttagttttagtaaaactagcgagtatcacgatattatgtatccggcctggaccttctgggaagggggccctgctgtatggccaatttatccaaccggcctgggcagatgggatttattcagagaggacctggtgcggtcggccgcccaatggccttggaaaaaaaaaaatagcaccgcatacttccgcggttcccgtacttcacccgagcgggaccctttaatcttgctcagccgcaagaatccaaaactggttgacgccgagtacaccaagaatcaggcttggaaatccatgaaggatacactgggtaaacccgccgccaaagacgtacatttagtggatcactgtaaatataagtacctatttaatttcaggggagtggcggcaagcttccggtttaaacacttatttctttgtggatctctcgtgttccacgttggggatgagtggctggagtttttctacccccagctcaaaccctgggttcactacattccagtgaagactgatctctctaacgttcaagaattactgcagttcgttaaggcaaatgatgatgttgcccaggaaatagccgagcgcggcagccagtttatcaggaatcatctccagatggatgatatcacttgctattgggagaacctccttagtgaatactctaaatttttatcctacaatgtgactcgtaggaaggggtacgatcagattatacctaagatgttaaagaccgaattgtag

SEQ ID NO: 242966 - DNA, 1179 bp, Artificial Sequence
  derived and/or modified sequence
atggagtggtgggccagcagccccctgcggctgtggctgctgctcttcctgctgcccagcgcccagggccggcagaaggagagcggcagcaagtggaaggtgttcatcgaccagatcaacagaagcctggagaactatgagccctgcagcagccagaactgcagctgctaccacggcgtgattgaggaggacctgacccccttccggggcggcatcagcaggaagatgatggccgaggtggtgcggaggaagctgggcacccactaccagatcaccaagaaccggctgtacagagaaaatgactgcatgttccccagccgctgcagcggcgtggagcacttcatcctggaggtgattggccgcctgcctgacatggagatggtgatcaacgtgcgggactacccccaggtgcccaagtggatggagcccgccatccctgtgttctccttcagcaagaccagcgagtaccatgacatcatgtacccagcctggaccttctgggagggcggccctgctgtgtggcccatctaccccaccggcctgggccgctgggacctcttccgggaggacctggtgcgctctgctgcccagtggccctggaagaagaagaacagcacagcctacttccggggcagcaggaccagccctgagcgggaccccctcatcctgctgagcaggaagaaccccaagctggtggatgctgagtacaccaagaaccaggcctggaagtccatgaaggacaccctgggcaagccagctgccaaggatgtgcacctggtggaccactgcaagtacaagtacctgttcaacttccggggcgtggccgccagcttccgcttcaagcacctgttcctgtgtggcagcctggtgttccacgtgggagatgagtggctggagttcttctacccccagctgaagccctgggtgcactacatccctgtgaagacagacctgagcaatgtgcaggagctgctgcagtttgtgaaggccaatgatgatgtggcccaggagattgctgagcggggcagccagttcatccggaaccacctgcagatggatgacatcacctgctactgggagaacctgctgtctgagtacagcaagttcctgagctacaacgtgaccaggaggaagggctatgaccagatcatccccaagatgctgaagacagagctgtag

SEQ ID NO: 242967 - DNA, 1179 bp, Artificial Sequence
  derived and/or modified sequence
atggagtggtgggccagcagccccctgcggctgtggctgctgctgtttctcctgccaagtgcccaaggtaggcagaaagagagcggctcaaagtggaaggtgttcatcgatcagatcaacagaagcctggagaattatgagccatgtagctctcagaactgctcatgctaccatggggtcattgaggaagatctaaccccttttcgcggcggcatttctcgtaaaatgatggccgaagtggttagacggaagcttggaacacattaccaaatcactaagaacagactctacagagagaacgattgcatgtttccttccaggtgctcaggcgtagagcatttcattctggaggttatcggaagactgcccgatatggagatggtgatcaacgtccgcgactacccacaggttccgaaatggatggagccagcgatcccagtgttcagcttcagtaagacttcagagtaccatgacataatgtaccctgcctggactttttgggagggaggccctgccgtgtggcccatttacccgactggcttgggccgatgggacctcttccgcgaggatctagtgcgttccgcagctcagtggccatggaagaaaaagaactcaacagcatactttagggggtctaggacctcaccggagcgtgatccattgattctgctctcccgcaagaaccccaaactcgtggacgccgagtacacaaaaaaccaggcctggaagagcatgaaggataccctgggaaagccggccgctaaggatgttcacctggttgaccattgcaagtataaatatctgttcaactttcgaggcgtagccgccagcttcagattcaaacatctattcctttgtggcagtttggtgttccatgtgggcgatgagtggcttgaattcttttacccacagttgaaaccatgggtgcattacatccctgtgaaaaccgatttgagcaatgttcaagaactgctgcagtttgtcaaagctaacgatgacgtggcccaggaaattgccgagcggggctcccaatttatccgaaatcatctgcagatggacgacattacctgctactgggagaacttgctgtctgagtactctaaattcctgtcctacaatgtgacaagaagaaaggggtacgatcaaatcatccctaaaatgctaaaaactgagctgtag

SEQ ID NO: 242968 - DNA, 3533 bp, Artificial Sequence
  derived and/or modified sequence
gtgctgcggctcccgggccatctttgtgcggggccgcgcttccgccagcgccgcagcggggaatctgcagtaggtctgccggcgatggagtggtgggctagctcgccgcttcggctctggctgctgttgttcctcctgccctcagcgcagggccgccagaaggagtcaggttcaaaatggaaagtatttattgaccaaattaacaggtctttggagaattacgaaccatgttcaagtcaaaactgcagctgctaccatggtgtcatagaagaggatctaactcctttccgaggaggcatctccaggaagatgatggcagaggtagtcagacggaagctagggacccactatcagatcactaagaacagactgtaccgggaaaatgactgcatgttcccctcaaggtgtagtggtgttgagcactttattttggaagtgatcgggcgtctccctgacatggagatggtgatcaatgtacgagattatcctcaggttcctaaatggatggagcctgccatcccagtcttctccttcagtaagacatcagagtaccatgatatcatgtatcctgcttggacattttgggaagggggacctgctgtttggccaatttatcctacaggtcttggacggtgggacctcttcagagaagatctggtaaggtcagcagcacagtggccatggaaaaagaaaaactctacagcatatttccgaggatcaaggacaagtccagaacgagatcctctcattcttctgtctcggaaaaacccaaaacttgttgatgcagaatacaccaaaaaccaggcctggaaatctatgaaagataccttaggaaagccagctgctaaggatgtccatcttgtggatcactgcaaatacaagtatctgtttaattttcgaggcgtagctgcaagtttccggtttaaacacctcttcctgtgtggctcacttgttttccatgttggtgatgagtggctagaattcttctatccacagctgaagccatgggttcactatatcccagtcaaaacagatctctccaatgtccaagagctgttacaatttgtaaaagcaaatgatgatgtagctcaagagattgctgaaaggggaagccagtttattaggaaccatttgcagatggatgacatcacctgttactgggagaacctcttgagtgaatactctaaattcctgtcttataatgtaacgagaaggaaaggttatgatcaaattattcccaaaatgttgaaaactgaactatagtagtcatcataggaccatagtcctctttgtggcaacagatctcagatatcctacggtgagaagcttaccataagcttggcacctataccttgaatatctgctatcaagccaaatacctggttttccttatcatgctgcacccagagcaactcttgagaaagatttaaaatgtgtctaatacactgatatgaagcagttcaactttttggatgaataaggaccagaaatcgtgagatgtggattttgaacccaactctacctttcattttcttaagaccaatcacagcttgtgcctcagatcatccacctgtgtgagtccatcactgtgaaattgactgtgtccatgtgatgatgccctttgtcccattatttggagcagaaaattcgtcatttggaagtagtacaactcattgctggaattgtgaaattattcaaggcgtgatctctgtcactttattttaatgtaggaaaccctatggggtttatgaaaaatacttggggatcattctctgaatggtctaaggaagcggtagccatgccatgcaatgatgtaggagttctcttttgtaaaaccataaactgtgttactcaggaggtttctataatgccacatagaaagaggccaattgcatgagtaattattgcaattggatttcaggttccctttttgtgccttcatgccctacttcttaatgcctctctaaagccaaaaaaaaaaaaaaagacaaagcctcttaataaatttaatggaactatacatagaacagcagctcttcctcaccctttgcatacctttaatatttttccttcttaaattggccacagcaggggtcattcacactctcactgtcttgcaggaatcacaagaagtcttcatatgtgaacgtgccattcagttggtagttaagagcattcaacttcaaatatatagaagatatttgttttagtgcaaatccatgatggagtgcctcccttttccttttttcactttttgaaaaagatgttttgggtagtagtttaatatctcagggtgctctttctaacatagtaaaaaatgaagaaaaatgtttagattaaaactctgtagtctgatgacttagaaccatccttgacccttaggcccaacctttccacagagaaatcacctctcttcctttgtcttttaagaactatttggtattaactagtttcagaattagtaaatgtgagattcagtcacataattatcagacattccatttgtcagaaatgtatttggctttttaaactcctttccacaaaagtttaagtctaatgaccttcttagagaagttgagcatgcctggcaagatcatttcatggaataagcagatgtttaaagttggatttttttttttttttttttttgagtactagcaatgcacagggaccgtgttcttaggttcttagtctgtgaatctagcaataggcagtccagatttctgagtcgtactatggttttgccttgtcactgtgaggccctactaggtgtaagcattctctctgaattttaatttcctctcattaaaataggaacaaaatttgctatcctttagattaggagctgaagattcatttccctgggaatgtttcccatttagcttcaagtttcagctcaaacatcaccttctttctgactcctttcattcattcctccaggcagtaaggggctaccatagtactttgtttatgcctgtattatatgacatcactgtagttgcttgactgtttctcctactgttctgtaaacttattaatgggtgagaatctaattttactcatcttgatggcttcatgatccagcacagtgcctcacacaaagaactattgggtgggtggatggatggatggaggaatggagacagttggcttaaccagatcctatatacagattattactggctccaaaggatgagtagataagaccataagaattggatcaatgtaaatcctcacctgccctttgaagagccaataagggcatctttgtctttaaatacagcaaatgttattcagattttgtacttgtctatctgtttacctcagtgtagatgatatgaggatggtataactatgtaaattgtttttgaaaataatttgtttccccacaacttttgaaggttttatttgttgttgttattactagttcagtcccaaacttaccctttccttttcagagagctaatggccatgcttttcttcaaggaaagaataatttatttgaatgaagtgggatacttgcataacacaaa

SEQ ID NO: 242969 - DNA, 1179 bp, Artificial Sequence
  derived and/or modified sequence
atggaatggtgggcgagctctccccttcgcctgtggctcctgttgttcctgctgccttcagcccaaggacggcaaaaagagtccggctctaaatggaaggtgtttattgatcagataaaccgcagtttagagaactacgaaccatgctcttctcagaattgtagctgttaccacggcgtgattgaagaagatctaacccctttccgcggaggcatctcgcggaagatgatggcagaagtggtgcgccgaaagctcgggacccactatcaaatcacgaaaaatcgcctgtacagagagaacgactgcatgttcccctctcgatgttccggggtagagcacttcattctggaggttataggacgtctaccagacatggaaatggtcatcaacgttcgcgattatccacaggtcccaaaatggatggagccagccattcctgtcttctcattctccaagaccagcgagtatcacgacatcatgtatcccgcatggacattttgggagggtggcccagcagtgtggccaatctatccgacagggttggggagatgggatctgttccgggaagatttggttagaagcgctgcccagtggccgtggaaaaaaaagaatagcaccgcctatttcagagggagtcgcacaagccccgagagagatccactgatcctcctgtccaggaaaaatcccaagttggtcgatgcagagtatacaaagaatcaagcctggaagagcatgaaggacaccctcggcaagcctgccgcaaaggacgtgcatttggtcgaccactgcaaatacaagtatctgtttaacttcaggggggtggcggcttcatttcgtttcaaacacctgttcctgtgcgggagcctggtttttcacgtgggagacgaatggctggagtttttttacccacagttgaagccttgggtgcactacattccagtcaagacggacctcagtaacgtgcaggagctgctgcagttcgttaaggctaacgacgatgtggcccaggaaattgcagagcggggttcccagttcatacgaaatcaccttcagatggatgatatcacttgttactgggagaacctcctgagtgagtattcaaagttcctgagttataacgtgacccgacggaaaggctatgatcaaataattcccaagatgctgaagactgagctctag

SEQ ID NO: 242970 - protein, 147 aa, Artificial Sequence
  derived and/or modified sequence
MAAAADSFSGGPAGVRLPRSPPLKVLAEQLRRDAEGGPGAWRLSRAAAGRGPLDLAAVWMQGRVVMADRGEARLRDPSGDFSVRGLERVPRGRPCLVPGKYVMVMGVVQACSPEPCLQAVKMTDLSDNPIHESMWELEVEDLHRNIP

SEQ ID NO: 242971 - protein, 84 aa, Artificial Sequence
  derived and/or modified sequence
MKQTQVGSLFSLGIRNPEPGPVSGTAVPRQLAWKSGKYVMVMGVVQACSPEPCLQAVKMTDLSDNPIHESMWELEVEDLHRNIP

SEQ ID NO: 242972 - DNA, 444 bp, Artificial Sequence
  derived and/or modified sequence
atggctgcggccgccgactcgttctctgggggcccagcgggggtacggctgccccgctcccctcctctgaaggtgctggccgaacagctcagaagggatgcagagggcggccccggagcgtggcgactgtcacgggcggcggcaggtcgtggacccttggatttggcagctgtgtggatgcaagggcgagttgtgatggcagacaggggagaggcccgactcagggatccatctggcgatttttctgtgcgagggttggagagagtgcctcgaggaaggccttgtctagtgcctggtaagtacgttatggtgatgggcgtggtccaggcctgcagcccagaaccctgtctccaagccgtgaagatgaccgacctcagtgacaatcctatccatgaaagtatgtgggagctggaggtggaagacctccatcggaatattccctag

SEQ ID NO: 242973 - DNA, 255 bp, Artificial Sequence
  derived and/or modified sequence
atgaagcagacccaggtaggaagcctcttttcattgggcattagaaacccagagccgggacctgtgtccggcactgcagtccctaggcagctagcttggaaaagcggcaagtatgttatggtgatgggggtcgtccaagcttgttctccagagccttgtctccaagcagtgaaaatgacagatctttccgataatcctattcacgagtcaatgtgggagctcgaggtggaggatctacaccgtaacattccatag

SEQ ID NO: 242974 - DNA, 444 bp, Artificial Sequence
  derived and/or modified sequence
atggctgctgctgctgacagcttcagcggcggccctgctggggtgcggctgcccaggagcccccccctgaaggtgctggccgagcagctgcggagagatgctgagggcggccctggggcctggaggctgagcagagctgctgctggccggggccccctggacctggccgctgtgtggatgcagggccgggtggtgatggctgacagaggagaggcccggctgcgggaccccagcggggacttctctgtgcggggcctggagcgggtgccccggggccggccctgcctggtgcctgggaagtatgtgatggtgatgggcgtggtgcaggcctgcagccctgagccctgcctgcaggccgtgaagatgacagacctgagtgacaaccccatccacgagagcatgtgggagctggaggtggaggacctgcacaggaacatcccctag

SEQ ID NO: 242975 - DNA, 255 bp, Artificial Sequence
  derived and/or modified sequence
atgaagcagacccaggtgggcagcctcttcagcctgggcatcagaaatcctgagcccggccctgtgtctggaacagctgtgccccggcagctggcctggaagagcggcaagtatgtgatggtgatgggcgtggtgcaggcctgcagccctgagccctgcctgcaggccgtgaagatgacagacctgagtgacaaccccatccacgagagcatgtgggagctggaggtggaggacctgcacaggaacatcccctag

SEQ ID NO: 242976 - DNA, 444 bp, Artificial Sequence
  derived and/or modified sequence
atggccgccgccgccgacagcttcagcggcggccccgccggcgtgaggctacctcgctctccgccactgaaagttcttgccgaacagctcaggagggacgcagagggcggcccaggagcttggcggctatctcgcgcagccgccgggcgaggccccctggacctggccgctgtgtggatgcaagggagagtggtcatggccgacaggggagaggcgcgtctccgagatccaagcggcgacttttcagtgagaggccttgaaagagttccccgcggcaggccatgtcttgtcccggggaagtacgtgatggtgatgggtgttgtacaggcctgttctccagagccttgcttgcaagccgtcaagatgaccgacctcagcgacaatcccatccacgaatccatgtgggaattggaggtggaggatttgcacaggaacatcccatag

SEQ ID NO: 242977 - DNA, 255 bp, Artificial Sequence
  derived and/or modified sequence
atgaagcagacccaggtgggcagcctgttcagcctgggcatccggaatcccgaacctggacccgttagcggcacagccgtgcctcggcagctcgcatggaaatctggaaaatacgtcatggtgatgggggtggtacaggcttgttcccctgagccctgccttcaggcagttaagatgactgacttgagcgataatccgatccatgaatccatgtgggagctggaagtggaggatcttcatagaaatatcccttag

SEQ ID NO: 242978 - DNA, 444 bp, Artificial Sequence
  derived and/or modified sequence
atggccgcagcagcagactcctttagtgggggaccagccggagtgcgtctccctaggtccccacccctcaaagttttggccgagcagctgcgccgtgacgcggaaggcggtccaggcgcttggcgtctgagcagggcagcggcaggacgcggacccttggatctggcagcagtctggatgcagggcagggtggtgatggctgatagaggggaagccaggctgagagatccctcaggcgattttagtgtccggggattggagcgtgtgccacgcggacgcccatgcctcgtgcccggaaagtacgtcatggtgatgggcgtggtacaagcatgcagccccgagccgtgtttgcaggcagtgaaaatgaccgatctctccgataatcccattcacgagtccatgtgggaactcgaggtggaggatttacataggaacattccgtag

SEQ ID NO: 242979 - DNA, 255 bp, Artificial Sequence
  derived and/or modified sequence
atgaagcaaactcaagtgggctcattgttcagtctcggaattcggaatcctgagcccggacccgtatctgggaccgcagtgccaagacagctggcatggaaaagcggcaaatatgttatggtcatgggggtcgttcaggcttgcagccctgagccatgcctgcaggctgttaaaatgacggacctgtccgataaccctatccatgagagcatgtgggaattagaggtcgaagatctgcataggaatatcccgtag

SEQ ID NO: 242980 - DNA, 1457 bp, Artificial Sequence
  derived and/or modified sequence
cgggaaagcggaggcggggcggaagggtgcggcgaggcggaatggcggcggctgcggactcgttctcaggcggccccgcgggggtgcggcttccgaggtcgccgccactcaaggtgctggcggagcagctgcggcgcgacgcggagggcggcccgggcgcgtggcggctgtcacgggcggcggcgggccgcgggccgctggacctggcggccgtgtggatgcagggcagggtagtgatggcggaccgcggcgaggctcggctgagggacccgagcggggacttctcggtccgcggcctggagcgggtgccgcgcgggcggccctgtctagtcccaggaaagtatgtgatggtgatgggagtggttcaggcctgcagccctgagccctgcctgcaggctgtgaagatgacagacctttctgataatcccatccatgaaagtatgtgggaactggaggtagaagatttacacaggaatattccttagagtatgttggaactgtcgttaaaaacaaccaaaatcccgaaactatttagaagcttataatgatgtggatttcatggacacttttcaatgcgtatttttcaaatgcttctcagagagccttgctttggttgaccaaggagtccggatgtaggaatgtttaaatcctcggatacttcagtgacacagcctctgctgccccttgctttgcctgtgtttgctgatgaaaagcagatgcttgtgtttcattttccttcctggtttgtgtgtgttaattctctctctctctctcagacacagaagtctcatgttgcattttccaaattttatgagtgatgatactttttccattactgctgcgtccctgttttacaatgcaaaatttaagtacggtcgttgcccatggtgattaaagtgtggttatgggcaggaagacagactgtgtaaaaaaggaatgacatcctggctcctcatcttcttcatcagcaactaccataaccagtttgcgagtcaaatggcatttcctaacggcaggcatggcggcccctgaaagacaacagctccctttctgcttcggacaccactcaaacatttagacgcagctctatcccttttcctagctagagaaggtgatgccttcttccattactcagagatgttgagacgttttcagaatttcttgttgaaatgaaaaacatcaagataaaggacgcctttcaggcattagctaaacttccacttcataactttcggcgagacatggtgagcctcctggtgtagagttcttttgtctttgtatggaatgactttttgctgtgatggttttgaatgttgggtttctgctgtctgcttagtacccatgcctgaattttttgagattgtaaatatcaaaggagttagattgtgttctgacatggttgtagactttcacctggattattgatattctacctctaataaatttttaataggctg

SEQ ID NO: 242981 - DNA, 1193 bp, Artificial Sequence
  derived and/or modified sequence
atgaaacagacccaagtgggctcgctcttcagtctcggcataaggaatccggaacctgggcccgtgtccggaactgctgtgcccaggcagcttgcctggaaatcaggaaagtatgtgatggtgatgggagtggttcaggcctgcagccctgagccctgcctgcaggctgtgaagatgacagacctttctgataatcccatccatgaaagtatgtgggaactggaggtagaagatttacacaggaatattccttagagtatgttggaactgtcgttaaaaacaaccaaaatcccgaaactatttagaagcttataatgatgtggatttcatggacacttttcaatgcgtatttttcaaatgcttctcagagagccttgctttggttgaccaaggagtccggatgtaggaatgtttaaatcctcggatacttcagtgacacagcctctgctgccccttgctttgcctgtgtttgctgatgaaaagcagatgcttgtgtttcattttccttcctggtttgtgtgtgttaattctctctctctctctcagacacagaagtctcatgttgcattttccaaattttatgagtgatgatactttttccattactgctgcgtccctgttttacaatgcaaaatttaagtacggtcgttgcccatggtgattaaagtgtggttatgggcaggaagacagactgtgtaaaaaaggaatgacatcctggctcctcatcttcttcatcagcaactaccataaccagtttgcgagtcaaatggcatttcctaacggcaggcatggcggcccctgaaagacaacagctccctttctgcttcggacaccactcaaacatttagacgcagctctatcccttttcctagctagagaaggtgatgccttcttccattactcagagatgttgagacgttttcagaatttcttgttgaaatgaaaaacatcaagataaaggacgcctttcaggcattagctaaacttccacttcataactttcggcgagacatggtgagcctcctggtgtagagttcttttgtctttgtatggaatgactttttgctgtgatggttttgaatgttgggtttctgctgtctgcttagtacccatgcctgaattttttgagattgtaaatatcaaaggagttagattgtgttctgacatggttgtagactttcacctggattatt

SEQ ID NO: 242982 - DNA, 444 bp, Artificial Sequence
  derived and/or modified sequence
atggccgccgccgccgacagcttcagcggcggccccgccggcgtgagactgcccagaagcccccccctgaaggtgctggccgagcagctgagaagagacgccgagggcggccccggcgcctggagactgagcagagccgccgccggcagaggccccctggacctggccgccgtgtggatgcagggcagagtggtgatggccgacagaggcgaggccagactgagagaccccagcggcgacttcagcgtgagaggcctggagagagtgcccagaggcagaccctgcctggtgcccggcaagtacgtgatggtgatgggcgtggtgcaggcctgcagccccgagccctgcctgcaggccgtgaagatgaccgacctgagcgacaaccccatccacgagagcatgtgggagctggaggtggaggacctgcacagaaacatcccctag

SEQ ID NO: 242983 - DNA, 255 bp, Artificial Sequence
  derived and/or modified sequence
atgaagcagacccaggtgggcagcctgttcagcctgggcatcagaaaccccgagcccggccccgtgagcggcaccgccgtgcccagacagctggcctggaagagcggcaagtacgtgatggtgatgggcgtggtgcaggcctgcagccccgagccctgcctgcaggccgtgaagatgaccgacctgagcgacaaccccatccacgagagcatgtgggagctggaggtggaggacctgcacagaaacatcccctag

SEQ ID NO: 242984 - protein, 805 aa, Artificial Sequence
  derived and/or modified sequence
MAASGVPRGCDILIVYSPDAEEWCQYLQTLFLSSRQVRSQKILTHRLGPEASFSAEDLSLFLSTRCVVVLLSAELVQHFHKPALLPLLQRAFHPPHRVVRLLCGVRDSEEFLDFFPDWAHWQELTCDDEPETYVAAVKKAISEDSGCDSVTDTEPEDEKVVSYSKQQNLPTVTSPGNLMVVQPDRIRCGAETTVYVIVRCKLDDRVATEAEFSPEDSPSVRMEAKVENEYTISVKAPNLSSGNVSLKIYSGDLVVCETVISYYTDMEEIGNLLSNAANPVEFMCQAFKIVPYNTETLDKLLTESLKNNIPASGLHLFGINQLEEEDMMTNQRDEELPTLLHFAAKYGLKNLTALLLTCPGALQAYSVANKHGHYPNTIAEKHGFRDLRQFIDEYVETVDMLKSHIKEELMHGEEADAVYESMAHLSTDLLMKCSLNPGCDEDLYESMAAFVPAATEDLYVEMLQASTSNPIPGDGFSRATKDSMIRKFLEGNSMGMTNLERDQCHLGQEEDVYHTVDDDEAFSVDLASRPPVPVPRPETTAPGAHQLPDNEPYIFKVFAEKSQERPGNFYVSSESIRKGPPVRPWRDRPQSSIYDPFAGMKTPGQRQLITLQEQVKLGIVNVDEAVLHFKEWQLNQKKRSESFRFQQENLKRLRDSITRRQREKQKSGKQTDLEITVPIRHSQHLPAKVEFGVYESGPRKSVIPPRTELRRGDWKTDSTSSTASSTSNRSSTRSLLSVSSGMEGDNEDNEVPEVTRSRSPGPPQVDGTPTMSLERPPRVPPRAASQRPPTRETFHPPPPVPPRGR

SEQ ID NO: 242985 - DNA, 2418 bp, Artificial Sequence
  derived and/or modified sequence
atggccgccagcggcgtgcccagaggctgcgacatcctgatcgtgtacagccccgacgccgaggagtggtgccagtacctgcagaccctgttcctgagcagcagacaggtgagaagccagaagatcctgacccacagactgggccccgaggccagcttcagcgccgaggacctgagcctgttcctgagcaccagatgcgtggtggtgctgctgagcgccgagctggtgcagcacttccacaagcccgccctgctgcccctgctgcagagagccttccaccccccccacagagtggtgagactgctgtgcggcgtgagagacagcgaggagttcctggacttcttccccgactgggcccactggcaggagctgacctgcgacgacgagcccgagacctacgtggccgccgtgaagaaggccatcagcgaggacagcggctgcgacagcgtgaccgacaccgagcccgaggacgagaaggtggtgagctacagcaagcagcagaacctgcccaccgtgaccagccccggcaacctgatggtggtgcagcccgacagaatcagatgcggcgccgagaccaccgtgtacgtgatcgtgagatgcaagctggacgacagagtggccaccgaggccgagttcagccccgaggacagccccagcgtgagaatggaggccaaggtggagaacgagtacaccatcagcgtgaaggcccccaacctgagcagcggcaacgtgagcctgaagatctacagcggcgacctggtggtgtgcgagaccgtgatcagctactacaccgacatggaggagatcggcaacctgctgagcaacgccgccaaccccgtggagttcatgtgccaggccttcaagatcgtgccctacaacaccgagaccctggacaagctgctgaccgagagcctgaagaacaacatccccgccagcggcctgcacctgttcggcatcaaccagctggaggaggaggacatgatgaccaaccagagagacgaggagctgcccaccctgctgcacttcgccgccaagtacggcctgaagaacctgaccgccctgctgctgacctgccccggcgccctgcaggcctacagcgtggccaacaagcacggccactaccccaacaccatcgccgagaagcacggcttcagagacctgagacagttcatcgacgagtacgtggagaccgtggacatgctgaagagccacatcaaggaggagctgatgcacggcgaggaggccgacgccgtgtacgagagcatggcccacctgagcaccgacctgctgatgaagtgcagcctgaaccccggctgcgacgaggacctgtacgagagcatggccgccttcgtgcccgccgccaccgaggacctgtacgtggagatgctgcaggccagcaccagcaaccccatccccggcgacggcttcagcagagccaccaaggacagcatgatcagaaagttcctggagggcaacagcatgggcatgaccaacctggagagagaccagtgccacctgggccaggaggaggacgtgtaccacaccgtggacgacgacgaggccttcagcgtggacctggccagcagaccccccgtgcccgtgcccagacccgagaccaccgcccccggcgcccaccagctgcccgacaacgagccctacatcttcaaggtgttcgccgagaagagccaggagagacccggcaacttctacgtgagcagcgagagcatcagaaagggcccccccgtgagaccctggagagacagaccccagagcagcatctacgaccccttcgccggcatgaagacccccggccagagacagctgatcaccctgcaggagcaggtgaagctgggcatcgtgaacgtggacgaggccgtgctgcacttcaaggagtggcagctgaaccagaagaagagaagcgagagcttcagattccagcaggagaacctgaagagactgagagacagcatcaccagaagacagagagagaagcagaagagcggcaagcagaccgacctggagatcaccgtgcccatcagacacagccagcacctgcccgccaaggtggagttcggcgtgtacgagagcggccccagaaagagcgtgatcccccccagaaccgagctgagaagaggcgactggaagaccgacagcaccagcagcaccgccagcagcaccagcaacagaagcagcaccagaagcctgctgagcgtgagcagcggcatggagggcgacaacgaggacaacgaggtgcccgaggtgaccagaagcagaagccccggccccccccaggtggacggcacccccaccatgagcctggagagaccccccagagtgccccccagagccgccagccagagaccccccaccagagagaccttccacccccccccccccgtgccccccagaggcagatag

SEQ ID NO: 242986 - DNA, 2418 bp, Artificial Sequence
  derived and/or modified sequence
atggctgctagcggcgtccctagaggctgcgacattttaatcgtctactcacccgatgctgaagaatggtgccaatacttgcaaactctttttctgagttctagacaagttcgctcacaaaagatcctgacccaccgcctaggacccgaggcaagcttttccgccgaagatctctcactgtttttgtcgacaaggtgcgttgtggtgcttttgagtgccgagctggtccaacattttcacaagccggctctgctccccttactgcagagagcctttcacccccctcacagggtcgtgcgcctgttgtgcggggtacgtgacagtgaagagttcttggatttctttcccgattgggcacactggcaagaactgacctgtgacgatgagccggagacatacgtcgctgccgttaaaaaagcaattagtgaagacagtggatgcgattcagttacagatactgaacctgaggacgaaaaggttgttagttattccaaacaacagaatctgccgaccgtgacaagtcccggtaacctcatggtagtgcagcctgacagaatacggtgcggagccgaaaccaccgtctatgtgatcgtccggtgcaagctagacgacagggtggccaccgaggccgagttttcacctgaagatagccctagtgtccgaatggaagcaaaagttgagaatgagtacaccatctcggtgaaagcccccaacctcagttctgggaacgtgtcccttaaaatttattctggagacctcgtcgtgtgtgaaacggtcatttcctactacaccgatatggaggagattggtaacttactgtcaaacgccgccaatcctgtggaattcatgtgccaagcattcaagattgtgccttacaacaccgagaccttggataaactgctcacagagtcactgaagaataatattcccgcttctgggctgcatcttttcgggatcaatcagctcgaggaagaggacatgatgaccaaccaaagggacgaggagttaccgactttgctgcacttcgccgccaagtacggcctgaagaacctcaccgctttgctgctgacctgtcctggggccttgcaggcttattctgtcgcaaataagcacgggcactacccaaatacaatcgctgaaaagcatggcttccgggacttgagacagttcatcgatgaatatgtagaaacggtggacatgctcaagtcacacatcaaggaggagctcatgcatggcgaagaagccgatgcggtgtacgaatccatggcccatttaagtacagatctcctgatgaaatgttctctgaatccaggctgtgacgaggatctttatgagtcaatggcggcgtttgtccccgccgccaccgaggacctgtacgttgagatgttacaggctagcacatctaatccaatccctggggatgggttctccagggccaccaaggacagtatgatccgaaaattcttagagggaaacagcatgggtatgacgaatcttgagcgtgatcagtgccacctaggacaggaagaagatgtataccatacagtcgatgatgacgaggcattcagcgtcgacttagccagccgtccccctgtacctgtgccacgacccgaaacaactgctcctggagcccatcagcttccagacaatgaaccatatatctttaaggtgtttgctgagaaatcgcaggagagaccaggcaacttctatgtctcatcggagagcatccgaaagggccctcctgtgcgaccttggcgcgatcgcccgcagtcaagcatttacgacccgtttgcggggatgaagactccgggtcagaggcagctcataacgctgcaagaacaggtaaagctcggcattgtcaatgtggacgaggctgttctccacttcaaagaatggcagttgaaccagaagaaacgcagcgaatcatttcggtttcagcaggagaacctgaagaggttgagagatagcataacccgtaggcagcgagagaaacaaaaaagtggcaagcaaaccgatcttgaaataactgtcccaattagacatagtcagcatctgccagcaaaggtggaatttggagtgtatgagagtggaccgagaaagagtgtgatcccacctagaaccgagttgcgacggggtgactggaaaaccgatagcacatcttcaacggcaagctctaccagtaaccgatccagcacccggagtctgctatcggtgtcctccgggatggaaggcgataacgaagataacgaagtccctgaggttactaggtctcgttccccaggaccaccacaggtcgacggtactcccacaatgtcgctcgaacgtcccccacgcgtgccaccccgagctgcttctcagcgacctcctacaagggagaccttccacccacctcctcctgtgccccctcgaggcagatag

SEQ ID NO: 242987 - DNA, 2418 bp, Artificial Sequence
  derived and/or modified sequence
atggccgccagcggcgtgccccggggctgtgacatcctgattgtgtacagcccagatgctgaggagtggtgccagtacctgcagaccctcttcctgagcagccggcaggtgcgcagccagaagatcctgacccaccggctgggccctgaggccagcttctctgctgaggacctgagcctcttcctgagcacccgctgtgtggtggtgctgctgtctgctgagctggtgcagcacttccacaagccagccctgctgcccctgctgcagagggccttccaccccccccaccgggtggtgcggctgctgtgtggggtgcgggacagcgaggagttcctggacttcttcccagactgggcccactggcaggagctgacctgtgatgatgagcctgagacctacgtggccgctgtgaagaaggccatcagtgaagattctggctgtgacagcgtgacagacacagagccagaagatgagaaggtggtgtcctacagcaagcagcagaacctgcccaccgtgaccagccctggcaacctgatggtggtgcagcctgaccgcatccgctgtggggctgagaccaccgtgtatgtgattgtgcgctgcaagctggatgacagagtggccacagaggccgagttctccccagaggacagccccagcgtgaggatggaggccaaggtggagaatgagtacaccatctctgtgaaggcccccaacctgagcagtggaaatgtgtccctgaagatctacagcggggacctggtggtgtgtgagaccgtcatctcctactacacagacatggaggagatcggcaacctgctgagcaatgctgccaaccctgtggagttcatgtgccaggccttcaagatcgtgccctacaacacagagaccctggacaagctgctgacagagagcctgaagaacaacatcccagccagcggcctgcacctgtttggcatcaaccagctggaggaggaggacatgatgaccaaccagagagatgaggagctgcccaccctgctgcactttgctgccaagtatggcctgaagaacctgacagccctgctgctgacctgccctggggccctgcaggcctacagcgtggccaacaagcacggccactaccccaacaccatcgccgagaagcacggcttccgggacctgcggcagttcattgatgaatatgtggagaccgtggacatgctgaagagccacatcaaggaggagctgatgcatggagaggaggctgatgctgtgtatgaatccatggcccacctgagcacagacctgctgatgaagtgcagcctgaaccctggctgtgatgaggacctgtatgagagcatggccgcctttgtgcctgctgccacagaggacctgtatgtggagatgctgcaggccagcaccagcaaccccatccctggagatggcttcagccgggccaccaaggacagcatgatcaggaagttcctggagggcaacagcatgggcatgaccaacctggagcgggaccagtgccacctgggccaggaggaggatgtgtaccacacagtggatgatgatgaggccttctctgtggacctggccagccggccccctgtgcctgtgcccaggcctgagaccacagcccctggggcccaccagctgcctgacaatgagccctacatcttcaaggtgtttgctgagaagagccaggagcggcccggcaacttctacgtgtcctctgagagcatcaggaagggcccccctgtgcggccctggagggaccggccccagagcagcatctatgacccctttgctggcatgaagaccccaggccagaggcagctgatcaccctgcaggagcaggtgaagctgggcatcgtgaatgtggatgaagctgtgctgcacttcaaggagtggcagctgaaccagaagaagaggtctgagagcttccgcttccagcaggagaacctgaagaggctgcgggacagcatcacccggcggcagcgggagaagcagaagagcggcaagcagacagacctggagatcaccgtgcccatccgccacagccagcacctgcctgccaaggtggagtttggagtgtatgagagcggccccaggaagagcgtcatcccccccaggacagagctgcggcggggggactggaagacagacagcaccagcagcacagccagcagcaccagcaacagaagcagcaccaggagcctgctgtctgtgagcagcggcatggagggggacaatgaagataatgaggtgcctgaggtgaccaggagccgcagccctggccccccccaggtggatggcacccccaccatgagcctggagcggcccccccgggtgccccccagggctgccagccagaggcctcccacccgggagaccttccaccccccacctcctgtgcccccccggggccgctag

SEQ ID NO: 242988 - DNA, 2418 bp, Artificial Sequence
  derived and/or modified sequence
atggccgccagcggcgtgccccggggctgcgacatcctgatcgtgtacagcccagacgccgaagagtggtgtcagtatctgcagacactgtttctgtcatctagacaggtgcgcagccagaaaatcctgacacaccggttggggcccgaagcgtctttctctgcagaggatttgagcctgtttctgtccactcgttgcgttgtggtacttctgagcgcagaacttgtgcagcatttccataaacccgctctgctgcccctgcttcaaagagcgtttcaccctccccaccgtgttgtgaggctgctgtgtggagtgcgggatagtgaggaattcctggacttctttcctgattgggcccattggcaagaactaacttgtgacgatgagcctgaaacctatgttgccgcggttaaaaaggctattagtgaagactccggctgtgacagcgtcacggacaccgaaccggaggacgaaaaggtggtgagttactcaaagcaacagaacctaccaacagtgacgagccctgggaatctgatggtggtgcagcccgataggatcagatgtggcgccgagactacagtgtatgtgattgtgagatgtaaattggatgaccgagtcgccaccgaggccgagttcagtccagaagactcccccagtgtacggatggaagcaaaagtggagaatgagtacacaatctccgtgaaagctccaaatctgtcatccggaaacgtatcacttaagatttattccggagacctcgtcgtgtgtgaaactgttatttcttattacacggatatggaagagattgggaacttactgtccaacgctgcgaatcctgtggaattcatgtgtcaggctttcaagatcgttccatataatactgaaaccttggataaactgctgacggagtctcttaagaataatatcccagcctccggactgcacttgttcggcattaaccagctggaggaggaggatatgatgactaaccagcgcgacgaggaactccccaccctgctgcatttcgcggccaaatacggcctgaagaacctaacggctctgctgctcacttgcccgggagcactgcaggcttattccgtagccaataaacacgggcactatccaaataccatcgcagaaaagcatgggtttcgggacctgcgacaatttattgatgagtatgtggaaaccgtcgacatgctcaagtcccatattaaagaggaactaatgcacggcgaggaggctgacgctgtatatgagagtatggcgcacctgtccaccgatctcctgatgaaatgctccttaaaccctgggtgcgacgaggatctttacgaaagtatggctgctttcgtgccagccgccacagaggacctatacgttgagatgctgcaggcttcgacttccaaccctatcccaggcgatggcttctctcgcgccacaaaggacagtatgatcagaaagtttctagaaggcaacagcatggggatgacaaacctggagcgtgatcaatgccacctcggccaagaagaagacgtttatcacacagttgatgatgacgaagcgtttagcgtggatttagcctctcgcccgcccgtacccgttcctcgtcccgagactactgctcccggcgcacaccagctcccggacaacgagccatacatcttcaaggtcttcgccgaaaagagccaggagagaccgggtaatttctacgtgtctagtgagtccattaggaagggcccacctgtgagaccgtggagagatcgcccacagtcttccatctatgacccttttgctggaatgaaaacaccaggtcagaggcaactgatcactttacaagagcaagtgaaactcggcatagtcaatgtggacgaagctgtgctccacttcaaagagtggcagctgaatcagaagaaacggagtgagtcattcaggttccaacaggaaaacctaaagcgcttgcgcgactccatcacccgacgtcagagggagaagcagaagagcggcaagcagacagacctggagatcactgttcccattcggcattcacagcacttgcctgccaaggtagagttcggcgtgtacgaatccggtcctcgcaagtcagttattccacctcgcactgagctgaggcgcggagattggaaaactgactctacatcttctaccgcctctagcacatcaaaccgatccagcactcggtcgttgctgagcgtttcctctgggatggaaggggacaatgaagataatgaggtgcccgaggtcacccgatctaggtcgccaggaccacctcaggtcgacgggacgccaaccatgtcgctggagagaccaccacgtgtaccccccagagcggcctctcagcggcccccaacccgggagacattccaccctccaccacccgtccctccaaggggccgatag

SEQ ID NO: 242989 - DNA, 4803 bp, Artificial Sequence
  derived and/or modified sequence
agagcggcggccggtcccgcgcggagcccggcgcccctccagcccgagccaggacgccgccggccccggtcccggccccgggcacgcagcgagccagggatgtgagcggcgccccgcggcatggcagcctcaggggtgcccagaggatgcgacatcctcatcgtctacagcccggatgccgaggaatggtgccagtacctgcagaccctgttcctgtccagtcggcaggtccgcagccagaagatactgactcacaggctgggccccgaggcctccttctcggcagaggacctaagccttttcctcagcacccgctgtgtcgtggtgctgctgtccgcggagctggtgcagcacttccacaagcccgccttgctgcccctgctgcagagagctttccatcctccgcaccgcgtggtcaggctgctctgcggcgtgcgggacagcgaggagttcctagacttctttccagattgggcccattggcaggagctcacctgtgacgatgagccagagacctacgtggcagctgtgaaaaaagccatttccgaagattctggctgtgactcagtcactgacactgagcctgaggacgagaaggttgtttcctactcgaagcagcagaacctgccgacggtgacttcacctgggaacctgatggtggtgcagccggaccgcattcgctgtggggcagaaaccactgtctatgttattgtgagatgtaagctggatgacagggtggcgacagaagcagagttttctcctgaggattctccctctgtaaggatggaagccaaggtggagaatgagtacaccatttcagtgaaggctcccaacctttcatctgggaacgtttctctgaagatatattctggagacttagtggtgtgtgaaaccgttatcagctattatactgacatggaagaaattgggaatttattgtccaatgccgcgaatcctgtggaattcatgtgtcaggcctttaaaattgtgccctacaacacagagacccttgataaactgctaaccgaatccctgaagaacaatatccctgcaagcggactgcacctctttggaatcaaccagctggaagaagaagatatgatgacaaatcagagggatgaagagctgcccaccctgttgcattttgctgcgaagtatggactgaagaacctcactgccttgttgctcacctgcccaggagccctgcaggcgtacagcgtggccaacaagcatggccactaccccaacaccatcgctgagaaacacggcttcagggacctgcggcagttcatcgacgagtatgtggaaacggtggacatgctcaagagtcacattaaagaggaactgatgcacggggaggaggctgatgctgtgtacgagtccatggcccacctttccacagacctgcttatgaaatgctcgctcaaccccggctgtgacgaggatctctatgagtccatggctgcctttgtcccagctgccactgaagacctctatgttgaaatgcttcaggccagtacatctaacccaatccctggagatggtttctctcgggccactaaggactctatgatccgcaagtttttagaaggcaacagcatgggaatgaccaatctggagagagatcagtgccatcttggtcaggaagaagatgtttatcacacggtggatgacgatgaggccttttctgtggacctggccagcaggccccctgtcccagtgcccagaccagagaccactgctcctggtgctcaccagctgcctgacaacgaaccatacatttttaaagtttttgcagaaaaaagtcaagagcggcctgggaatttctacgtttcctcagagagcatcaggaaagggccgcccgtcagaccatggagggacaggccccagtcgagtatatatgacccttttgcgggaatgaaaacgccaggccagcggcagcttatcaccctccaggagcaggtgaagctgggcattgtcaacgtggatgaggctgtgctccacttcaaagagtggcagctcaaccagaagaaacgatcggagtcctttcgtttccagcaggaaaatcttaaacggctaagagacagcatcacccgaagacagagagagaagcaaaaatcaggaaagcagacagacttggagatcacggtcccaattcggcactcacagcacctgcctgcaaaagtggagtttggagtctatgagagtggccccaggaaaagtgtcattccccctaggacggagctgagacgaggagactggaaaacagacagcacctccagcacagcaagtagcacaagtaaccgctccagcacccggagcctcctcagtgtgagcagcgggatggaaggggacaacgaggataatgaagtccctgaggttaccagaagtcgcagtccaggccccccacaagtggatgggacacccaccatgtccctcgagagaccccccagggtgcctccgagagctgcctcacagaggcctccgaccagggagaccttccatcctcctccacctgttccacccagaggacgctgattccacctcctaaaacctgcctacttcaggactttaagactcacagtcttcagcctgttaatgatgtcttcatgttgagttttatagcatgactgttgaccttaagatccattctcattgctgataatgctgcagccctgctggtttgggcttgcctcgaagattttattaaggcacgaagaagtgaaaaactaagggcttcattcaccatcaccaagtatatcgaaccatatacttgtttgccaaaaggatgaagacttaatcgaaatacttacctctaatttgccatatcagaagcctaaaaagaatgatcataaatgtacttcaccagtgattttactgaaatgcacttatattagtctttatgtatttgctagttcagcctgatttctagaagaggttatagtgtgagacttgtagtattcaagtaagataagtgacctaattttaaaataattcttctacttttctgtatattcagcagggtatttaagtgctagggctggtcacacacaaccaactgaaaaagactagagggattagtacaaactcctcttatacagaaggcaaatctgaggttccacagaagtctggaaccaagactattcagttggttaaataaagaggttagtctagactgggcctgctcattctaggtcaccacattttccatctccaaatagccaggccctctctccctcaagaaatgcccagatgtagaaattcatcagtgcctattggtcttccagaattttccatcttccgtatctcccaggcatgagactaccaagtttgtttgttttctttccaatttgggaatttatacttcagtatggtttcaacgcagttatgtttccagagaacatctagaagtggctggaaaccagaagctggggattccagggaccccacttagtgctctatttcctttataggttttatttctggtcatagagagagaaggacctttgactttttcttcgttgaggcttctgaggaggaaaaacaaacctaaaatagaaatacagtcagcctttcaaatccatgggttctgtgtccgtggattcaaccaaccttggatcaaaaatatttgaaaaaaaatctacaaagtttcaaaaagcaaaacttgaatttgctgcatgccaagaagtatgttgaattcatgtaaatgaagtgatgtgtaggcattgtattagatattataagaaatctagaaatgatttaaagcatacaggaggatgtgcataggttatatgcaaatactatgctattttatatatgggacttgagcatttgtggattttgatactgggggatcctggaaccaatcccccatggataccaaagtacgactgtagttatctattttttacatacttattattaccaccatgctcagtaagtccatttttgcatggaatatggagccttaaaacatgtcatgaatttggagtccctggcacataaatctaccttcaaatcagaggtccttaatgatgcctaaacatacagtaaaattagaatcagaaatacttctttaaaaaatattcaaaatgtgtttgtttcccatgggattattctctatcccacacgaatgtaaaaaaatccacattaatgatccatttaagtatagttttattgggtccttttctaatgattaaaggttctttctcaatttcattcctcagtcctgcaagtaaggactcatactgaagagtactgaaacaaggacttcttgtcagaaacagcttctggaatcttgggttttgtttttgttttttgacaaaatacactattggccatgtccatcacgagagtgtttgtagtaattaattaccttgtacaggacctggcacttagtagcattcttcaaatgttccctcagtgatccttttactctccttgtcacttatttgggagaaataggggcacgtgagataagaagaagaataattttgatgttggtatgcttgccctgttacttatagacagtctttgtcataggcaaacttgaatttgatttaaaatagggctgggaaaaatattcaataactgtaagcccccttttggatgccaaacttagaattttgtacattctctgatgaacaagcatttagatcgtaacatggtaaagcctattaccagccaatgttgttagcatctttgtatgcacatcactgtttgtgcaatatatgaatattttgttgcattgtattcttatataaaaataagtagaaaacataaaattgaaattgctgatgagaa

SEQ ID NO: 242990 - DNA, 3151 bp, Artificial Sequence
  derived and/or modified sequence
ataatgctgcccaggctggtctcaaactcctgagctcaagcaatcctcccgactcggcttcccaaagcacttggattacagattctggctgtgactcagtcactgacactgagcctgaggacgagaaggttgtttcctactcgaagcagcagaacctgccgacggtgacttcacctgggaacctgatggtggtgcagccggaccgcattcgctgtggggcagaaaccactgtctatgttattgtgagatgtaagctggatgacagggtggcgacagaagcagagttttctcctgaggattctccctctgtaaggatggaagccaaggtggagaatgagtacaccatttcagtgaaggctcccaacctttcatctgggaacgtttctctgaagatatattctggagacttagtggtgtgtgaaaccgttatcagctattatactgacatggaagaaattgggaatttattgtccaatgccgcgaatcctgtggaattcatgtgtcaggcctttaaaattgtgccctacaacacagagacccttgataaactgctaaccgaatccctgaagaacaatatccctgcaagcggactgcacctctttggaatcaaccagctggaagaagaagatatgatgacaaatcagagggatgaagagctgcccaccctgttgcattttgctgcgaagtatggactgaagaacctcactgccttgttgctcacctgcccaggagccctgcaggcgtacagcgtggccaacaagcatggccactaccccaacaccatcgctgagaaacacggcttcagggacctgcggcagttcatcgacgagtatgtggaaacggtggacatgctcaagagtcacattaaagaggaactgatgcacggggaggaggctgatgctgtgtacgagtccatggcccacctttccacagacctgcttatgaaatgctcgctcaaccccggctgtgacgaggatctctatgagtccatggctgcctttgtcccagctgccactgaagacctctatgttgaaatgcttcaggccagtacatctaacccaatccctggagatggtttctctcgggccactaaggactctatgatccgcaagtttttagaaggcaacagcatgggaatgaccaatctggagagagatcagtgccatcttggtcaggaagaagatgtttatcacacggtggatgacgatgaggccttttctgtggacctggccagcaggccccctgtcccagtgcccagaccagagaccactgctcctggtgctcaccagctgcctgacaacgaaccatacatttttaaagtttttgcagaaaaaagtcaagagcggcctgggaatttctacgtttcctcagagagcatcaggaaagggccgcccgtcagaccatggagggacaggccccagtcgagtatatatgacccttttgcgggaatgaaaacgccaggccagcggcagcttatcaccctccaggagcaggtgaagctgggcattgtcaacgtggatgaggctgtgctccacttcaaagagtggcagctcaaccagaagaaacgatcggagtcctttcgtttccagcaggaaaatcttaaacggctaagagacagcatcacccgaagacagagagagaagcaaaaatcaggaaagcagacagacttggagatcacggtcccaattcggcactcacagcacctgcctgcaaaagtggagtttggagtctatgagagtggccccaggaaaagtgtcattccccctaggacggagctgagacgaggagactggaaaacagacagcacctccagcacagcaagtagcacaagtaaccgctccagcacccggagcctcctcagtgtgagcagcgggatggaaggggacaacgaggataatgaagtccctgaggttaccagaagtcgcagtccaggccccccacaagtggatgggacacccaccatgtccctcgagagaccccccagggtgcctccgagagctgcctcacagaggcctccgaccagggagaccttccatcctcctccacctgttccacccagaggacgctgattccacctcctaaaacctgcctacttcaggactttaagactcacagtcttcagcctgttaatgatgtcttcatgttgagttttatagcatgactgttgaccttaagatccattctcattgctgataatgctgcagccctgctggtttgggcttgcctcgaagattttattaaggcacgaagaagtgaaaaactaagggcttcattcaccatcaccaagtatatcgaaccatatacttgtttgccaaaaggatgaagacttaatcgaaatacttacctctaatttgccatatcagaagcctaaaaagaatgatcataaatgtacttcaccagtgattttactgaaatgcacttatattagtctttatgtatttgctagttcagcctgatttctagaagaggttatagtgtgagacttgtagtattcaagtaagataagtgacctaattttaaaataattcttctacttttctgtatattcagcagggtatttaagtgctagggctggtcacacacaaccaactgaaaaagactagagggattagtacaaactcctcttatacagaaggcaaatctgaggttccacagaagtctggaaccaagactattcagttggttaaataaagaggttagtctagactgggcctgctcattctaggtcaccacattttccatctccaaatagccaggccctctctccctcaagaaatgcccagatgtagaaattcatcagtgcctattggtcttccagaattttccatcttccgtatctcccaggcatgagactaccaagtttgtttgttttctttccaatttgggaatttatacttcagtatggtttcaacgcagttatgtttccagagaacatctagaagtggctggaaaccagaagctggggattccagggaccccacttagtgctctatttcctttataggttttatttctggtcatagagagagaaggacctttgactttttcttcgttgaggcttctgaggaggaaaaacaaacctaaaatagaaatacagtcagcctttcaaatccatgggttctgtgtccgtggattcaaccaaccttggatc

SEQ ID NO: 242991 - DNA, 2418 bp, Artificial Sequence
  derived and/or modified sequence
atggccgctagcggggtcccacggggttgtgacattctaattgtgtattcaccagatgctgaggaatggtgccagtatctgcagactctcttcctgtcttctcgccaggtccggtctcagaagattttgactcataggctggggcctgaagcctccttttcagccgaagatctgtcactgttcctgagcacacgatgcgtggtggtgctgctgtccgccgagcttgtacagcattttcacaaaccagcattactgcctctgctccagcgggcttttcatccaccccacagggttgtcaggctgctgtgtggagtcagagactcggaagaatttctggacttcttccccgactgggcccattggcaggagctcacttgtgacgatgaaccggagacctatgtggccgctgtgaaaaaggccatctctgaggacagtgggtgcgattctgttacggacacagagccggaagatgaaaaggttgtaagttacagtaaacagcaaaacctgccaacagtgacctcacccggtaacctgatggtagtgcagcctgaccgcatcaggtgcggcgcagagactactgtctacgtgattgtaagatgtaagctggatgaccgagtggccaccgaagccgaatttagcccggaggattcccctagcgttcggatggaagcaaaggtggaaaatgaatataccatctccgtgaaagccccaaatctaagcagtggcaatgtgagtctcaaaatctatagtggagatctcgtggtttgcgagacggtgatctcttattacacagacatggaggagataggcaatttactctcgaatgctgctaaccctgtcgaatttatgtgtcaggctttcaagattgtcccatataacacagaaacgctcgacaagttgctgaccgagagcctcaagaataacatacccgcttcagggctgcacctctttgggattaaccaactggaagaggaagacatgatgaccaatcaacgtgatgaagagctacctaccctgctgcattttgcagcgaagtatggactcaagaacctgaccgcactgttgctgacttgcccaggagcactgcaggcctattctgtcgctaacaagcacggccactaccccaataccattgctgagaagcacggattccgggacctgaggcagtttatagatgagtacgtggaaaccgtggatatgctgaagtcgcacatcaaggaagagctgatgcacggggaagaggctgatgctgtctacgagagcatggcgcacctcagtacggacttgttgatgaaatgcagtctgaaccccggttgcgacgaggacctgtacgaaagcatggccgcattcgtacccgctgcaacagaggacctttacgtggaaatgctgcaagcttccacctccaaccccattcccggagacgggttctccagggctacgaaagatagcatgattagaaagttcctcgagggcaacagcatgggcatgactaacctagagcgcgaccagtgtcatttgggacaagaagaggatgtttaccatactgtggacgacgatgaagcgttttctgttgatcttgcgagccgacctccagtacctgtgcccaggccagagacgaccgcccctggcgctcaccagctccccgataatgagccatacatttttaaagtgtttgccgaaaagtcccaggagcggccaggaaacttttatgtgtcatctgagtctatccgaaagggacccccagtgcgcccatggcgggataggccgcagagctcaatctacgacccatttgctggtatgaagaccccaggtcagcggcaattgatcacactccaggaacaggtgaaacttggcattgtcaacgtggacgaagctgtgctgcacttcaaagaatggcagctgaatcagaagaagaggagcgaatctttccggtttcaacaagagaatctgaagcggctgagagactccatcactcgccgacagagggagaagcaaaaaagcggaaaacaaacggatctagagatcaccgtacctattagacattcacagcatctgcctgcgaaagtagagttcggcgtctatgagtccggaccccgaaagtctgtcatccccccaagaacagaactaaggcgtggtgactggaagactgatagtaccagctccactgcctccagcacgtccaatcgctcttcgactcggtcgttactgtccgttagctctggcatggaaggagacaacgaggataacgaggtacccgaggtgactagatctagatcgcccggacccccacaagtcgacggaacacccactatgtccctggagcggcctccaagagtaccacctcgggcagcttcccaacggcctcctacgcgggagacctttcacccacccccaccagtgccccctagagggaggtag

SEQ ID NO: 242992 - DNA, 1218 bp, Artificial Sequence
  derived and/or modified sequence
atgagcagccctgcgctaaccgccggtgcctcgggcaaagtcatggacttcaataacggaacatacctcgtcagcttcaccctattttgggagggacaagtctccctgagtctattgttaattcacccatctgagggagcctcagctctgtggcgagccaggaaccaaggctatgataaaatcattttcaaggggaagttcgtcaatggcacctctcacgtgtttaccgagtgtgggttaactttgaatagcaacgcagaactctgcgaatacttggatgacagagatcaggaagctttttactgcatgaaaccacagcatatgccctgcgaagcactgacgtatatgaccactcggaaccgcgaggtgagctacctaacggacaaggagaacagtctgttccataggtctaaagtgggagtcgaaatgatgaaagacagaaagcatattgatgtgacgaattgcaataagcgcgagaagatagaagagacctgccaagtggggatgaaaccacctgtcccaggaggctacacccttcaggggaagtggataacaaccttctgtaatcaagtccagcttgacactatcaagataaacgggtgccttaaggggaagctgatatatctgctgggggactccaccctcagacagtggatatattactttcccaaagtggtgaaaacactgaagttctttgacctgcacgagactgggatttttaagaagcacctgctgctggatgccgaacgtcatacgcagattcagtggaagaagcactcctaccctttcgtgacctttcagctgtacagcctgattgaccatgactacatccccagggaaattgataggctttccggtgacaaaaacacagccattgttattacctttggccagcattttaggccatttccaatcgatatctttattagacgcgcaataggggttcagaaagcaattgaaaggctgtttctgcgcagcccagccacgaaagtgattatcaaaactgaaaacattcgtgagatgcacatagagactgagcgctttggcgatttccacgggtacatacattacctcataatgaaagatatcttcaaagacctcaacgttggcattattgacgcttgggacatgacaattgcctacgggactgatactatccacccacctgatcacgtcataggcaatcagatcaacatgtttctcaactatatatgttag

SEQ ID NO: 242993 - DNA, 1218 bp, Artificial Sequence
  derived and/or modified sequence
atgtcgtctcctgctctcacagctggcgcctctggcaaggttatggattttaataacggtacctacctggtcagcttcacactgttttgggagggccaagtgtcattatcattgcttttaatccacccctctgagggtgcttctgccctgtggcgtgctcggaaccaaggatacgataaaattatcttcaaaggaaaattcgtcaacggcacttcgcacgtgtttacagaatgtgggctaacgctcaactccaatgccgaactctgtgaatatttggacgaccgtgaccaggaggcgttttattgtatgaagccgcaacacatgccatgcgaggccttgacatacatgacgactcgtaatagggaagtttcataccttaccgataaagagaacagcctttttcaccgcagtaaggtcggtgtggagatgatgaaagaccgaaagcacattgatgttacaaattgcaacaagagggaaaagattgaagaaacttgtcaggttggaatgaagccaccagtgccaggtggctatacactgcagggtaagtggatcacgaccttctgcaatcaggtgcagttggacactatcaaaatcaacggctgcttaaaaggaaaactgatttatttactgggagatagcacattgagacagtggatctactacttccctaaagtagttaagacactaaagttctttgacttacacgagaccggaatcttcaagaaacatctcctgctggacgccgaacggcacactcaaatacagtggaagaaacactcctacccatttgtgaccttccaactttattcactcatagaccacgattacattccccgtgagattgatcgactgtcaggcgataagaataccgcaattgtcatcacgtttggtcagcactttaggccatttccaatagatatcttcatccggagagccattggggtgcagaaggcaatcgaaagactctttctgagatcacccgccacgaaagtcatcattaagacggagaatattagagagatgcatatcgagaccgaaagatttggcgactttcacggctacatccattacctaatcatgaaggacatattcaaagatctgaatgtggggattatcgatgcctgggacatgacaattgcatacgggaccgacaccattcaccccccagatcacgtgattggcaaccaaataaatatgttcctgaactatatctgttag

SEQ ID NO: 242994 - DNA, 1218 bp, Artificial Sequence
  derived and/or modified sequence
atgagtagccccgcattaacagccggtgcatcaggcaaggtgatggatttcaataatggtacttaccttgtttccttcacactcttttgggaaggacaggtgtcactcagcctcctgctcatccacccttcggagggagccagtgccttgtggagggcccggaaccaagggtacgacaagatcatattcaagggtaagttcgttaacggtacctcacacgtttttactgaatgcggcctcactttgaacagtaatgcagagctttgcgaatacctggatgatagagatcaagaagctttttactgtatgaaaccccagcacatgccatgtgaagctttgacatatatgaccacacgcaacagagaagtttcctacctaacagataaagagaacagcctgtttcacagatcaaaagttggtgttgaaatgatgaaagacagaaagcatatagatgtaaccaattgcaacaaacgagagaagatcgaggaaacttgtcaggtcggaatgaaaccacctgtgccaggaggttacaccctgcaaggaaaatggatcaccaccttctgcaatcaggtccagctcgacacaataaagataaatggctgtctaaaggggaaacttatctacctgctgggtgactcaacactgcgacaatggatctactacttcccaaaagtggttaagaccctcaaattcttcgacctccacgagacgggcatttttaaaaagcatttgcttctggacgcagaaaggcacacccagatccaatggaagaagcacagctaccctttcgtaacatttcagttatactccttgatagatcacgactacattccccgggaaatcgatcgcctatctggagacaaaaacactgcgattgtcattacttttggccagcactttaggcctttccctattgacattttcattcgccgcgctattggggtgcagaaagcaattgagcggttattcctgaggtcacccgcaactaaagtaattattaaaacagagaacattcgagaaatgcacatagaaactgaaaggtttggggacttccatgggtacattcactatctgatcatgaaggacatctttaaggatttaaacgtcgggattatagacgcctgggatatgactatcgcttatggtacggacaccattcatcctcccgaccacgttattggcaaccagataaatatgtttctgaattacatctgctag

SEQ ID NO: 242995 - DNA, 1218 bp, Artificial Sequence
  derived and/or modified sequence
atgagcagccccgccctgaccgccggcgccagcggcaaggtgatggacttcaacaacggcacctacctggtgagcttcaccctgttctgggagggccaggtgagcctgagcctgctgctgatccaccccagcgagggcgccagcgccctgtggagagccagaaaccagggctacgacaagatcatcttcaagggcaagttcgtgaacggcaccagccacgtgttcaccgagtgcggcctgaccctgaacagcaacgccgagctgtgcgagtacctggacgacagagaccaggaggccttctactgcatgaagccccagcacatgccctgcgaggccctgacctacatgaccaccagaaacagagaggtgagctacctgaccgacaaggagaacagcctgttccacagaagcaaggtgggcgtggagatgatgaaggacagaaagcacatcgacgtgaccaactgcaacaagagagagaagatcgaggagacctgccaggtgggcatgaagccccccgtgcccggcggctacaccctgcagggcaagtggatcaccaccttctgcaaccaggtgcagctggacaccatcaagatcaacggctgcctgaagggcaagctgatctacctgctgggcgacagcaccctgagacagtggatctactacttccccaaggtggtgaagaccctgaagttcttcgacctgcacgagaccggcatcttcaagaagcacctgctgctggacgccgagagacacacccagatccagtggaagaagcacagctaccccttcgtgaccttccagctgtacagcctgatcgaccacgactacatccccagagagatcgacagactgagcggcgacaagaacaccgccatcgtgatcaccttcggccagcacttcagacccttccccatcgacatcttcatcagaagagccatcggcgtgcagaaggccatcgagagactgttcctgagaagccccgccaccaaggtgatcatcaagaccgagaacatcagagagatgcacatcgagaccgagagattcggcgacttccacggctacatccactacctgatcatgaaggacatcttcaaggacctgaacgtgggcatcatcgacgcctgggacatgaccatcgcctacggcaccgacaccatccacccccccgaccacgtgatcggcaaccagatcaacatgttcctgaactacatctgctag

SEQ ID NO: 242996 - DNA, 1218 bp, Artificial Sequence
  derived and/or modified sequence
atgtctagccccgccctgactgcaggagctagcggcaaggtgatggacttcaataatggaacttatctggtgtccttcacattgttctgggaaggacaggtttctctgagccttctcctaattcacccttcagagggcgcttcagctctgtggagagcccggaaccagggatacgataaaatcattttcaagggaaagttcgtgaacgggacctcacatgtatttactgagtgtggcctgacgctaaatagcaatgctgaactgtgtgagtacctagacgaccgtgatcaggaggccttctattgcatgaagcctcaacacatgccctgtgaagccctcacgtacatgactacacgtaatcgggaggtgtcgtacttgactgataaggagaattctctcttccataggtctaaggttggggttgagatgatgaaggacagaaagcatattgatgttactaattgcaataaacgcgaaaagatcgaagagacatgtcaggtcggaatgaagcccccagtacctggggggtatacactccagggcaaatggataacaaccttttgcaatcaggtccagctcgacactattaagatcaatggctgtctcaaaggcaaactgatttatctcctcggcgactctacccttagacagtggatttactacttcccgaaagttgttaagactctgaaattttttgatttgcatgagacaggtatctttaagaagcacctgctgctggacgctgagagacatacacagatccagtggaaaaaacactcttaccctttcgtaaccttccagttgtatagtcttattgaccatgattacattcctagggagatagaccgactgagcggcgacaaaaacacagcaatagtgataacgttcgggcagcattttcgaccattcccaatagatatcttcattcgccgcgccattggcgtgcagaaagccattgaaagactattcttgagatcacccgccacaaaagtaattattaaaaccgaaaacatcagagagatgcatatcgagacggagcggttcggcgactttcatgggtatattcactatctgataatgaaagacatcttcaaggacctgaatgtaggaatcattgacgcttgggatatgacaattgcctatggcactgacacaatccatcccccagatcatgtcattggcaatcaaatcaacatgtttctgaattacatctgttag

SEQ ID NO: 242997 - DNA, 1218 bp, Artificial Sequence
  derived and/or modified sequence
atgagcagccctgccctgacagctggggccagcggcaaggtgatggacttcaacaacggcacctacctggtgtccttcaccctcttctgggagggccaggtgtccctgagcctgctgctgatccaccccagcgagggcgccagcgccctgtggagggccaggaaccagggctatgacaagatcatcttcaagggcaagtttgtgaatggcaccagccacgtgttcacagaatgtggcctgaccctgaacagcaatgctgagctgtgtgagtacctggatgaccgggaccaggaggccttctactgcatgaagccccagcacatgccctgtgaggccctgacctacatgaccaccaggaaccgggaggtgtcctacctgacagacaaggagaacagcctcttccacaggagcaaggtgggcgtggagatgatgaaggacaggaagcacattgatgtgaccaactgcaacaagcgggagaagattgaggagacctgccaggtgggcatgaagccccctgtgcctgggggctacaccctgcagggcaagtggatcaccaccttctgcaaccaggtgcagctggacaccatcaagatcaatggctgcctgaagggcaagctgatctacctgctgggggacagcaccctgcggcagtggatctactacttccccaaggtggtgaagaccctgaagttctttgacctgcatgaaacaggcatcttcaagaagcacctgctgctggatgctgagcggcacacccagatccagtggaagaagcacagctacccctttgtgaccttccagctgtacagcctgattgaccatgactacatcccccgggagattgaccggctgagcggggacaagaacacagccatcgtcatcaccttcggccagcacttccggcccttccccatcgacatcttcatccggcgggccatcggcgtgcagaaggccatcgagcggctcttcctgcggagccctgccaccaaggtgatcatcaagacagagaacatccgggagatgcacattgaaacagaaagatttggagacttccacggctacatccactacctgatcatgaaggacatcttcaaggacctgaatgtgggcatcattgatgcctgggacatgaccatcgcctatggaacagacaccatccaccccccagaccacgtgattggcaaccagatcaacatgttcctgaactacatctgctag

SEQ ID NO: 242998 - DNA, 1218 bp, Artificial Sequence
  derived and/or modified sequence
atgagcagccccgccctgaccgccggcgccagcggcaaggtgatggactttaacaacgggacttatctagtctcctttactcttttctgggagggccaggtgtccctgtctcttttgctcattcacccttcggagggagcctccgctctgtggagggcccgaaaccagggttatgacaagatcattttcaagggtaaattcgttaacggcacttcacacgttttcaccgaatgtggcctgaccctgaatagcaatgcggagttgtgtgaatacttggatgatagggatcaggaagctttctactgtatgaagccccaacatatgccttgcgaggccctgacctacatgacaaccaggaatcgcgaagtgagctatcttaccgataaagagaattccctgttccaccgcagtaaagtaggcgtggaaatgatgaaggaccgaaaacacatcgacgtcacaaattgcaataagagagagaagattgaggagacctgtcaggtgggaatgaagccaccagtccctggtgggtataccttacagggaaaatggatcactactttttgcaaccaagttcagctcgatactatcaaaatcaacgggtgcttgaagggcaagctgatatatcttctaggggacagcactctcagacaatggatttactattttcccaaggtagtaaagaccttgaagtttttcgacctccatgagaccgggatctttaaaaagcacctgctgcttgacgccgagagacacacacagatacaatggaagaagcactcctacccatttgtaacattccagctttactccctgattgatcatgattatattccaagagagattgaccggctgtcgggcgacaaaaacaccgcaattgtgattaccttcgggcaacatttcaggccattcccgatcgacattttcatccgccgcgctatcggggtacaaaaggccattgagaggttgtttctacgatctcctgccaccaaggtcatcatcaagactgagaatatccgagagatgcatatcgagacagagagattcggcgacttccatggatacattcattatctgatcatgaaggacatatttaaagatctaaacgtcggcatcatcgacgcctgggatatgactatcgcctacgggacagacactatacatccccctgaccatgtcattggcaaccagatcaatatgtttttgaattatatatgctag

SEQ ID NO: 242999 - RNA, 1218 nt, Artificial Sequence
  derived and/or modified sequence
augucgucuccugcucucacagcuggcgccucuggcaagguuauggauuuuaauaacgguaccuaccuggucagcuucacacuguuuugggagggccaagugucauuaucauugcuuuuaauccaccccucugagggugcuucugcccuguggcgugcucggaaccaaggauacgauaaaauuaucuucaaaggaaaauucgucaacggcacuucgcacguguuuacagaaugugggcuaacgcucaacuccaaugccgaacucugugaauauuuggacgaccgugaccaggaggcguuuuauuguaugaagccgcaacacaugccaugcgaggccuugacauacaugacgacucguaauagggaaguuucauaccuuaccgauaaagagaacagccuuuuucaccgcaguaaggucgguguggagaugaugaaagaccgaaagcacauugauguuacaaauugcaacaagagggaaaagauugaagaaacuugucagguuggaaugaagccaccagugccagguggcuauacacugcaggguaaguggaucacgaccuucugcaaucaggugcaguuggacacuaucaaaaucaacggcugcuuaaaaggaaaacugauuuauuuacugggagauagcacauugagacaguggaucuacuacuucccuaaaguaguuaagacacuaaaguucuuugacuuacacgagaccggaaucuucaagaaacaucuccugcuggacgccgaacggcacacucaaauacaguggaagaaacacuccuacccauuugugaccuuccaacuuuauucacucauagaccacgauuacauuccccgugagauugaucgacugucaggcgauaagaauaccgcaauugucaucacguuuggucagcacuuuaggccauuuccaauagauaucuucauccggagagccauuggggugcagaaggcaaucgaaagacucuuucugagaucacccgccacgaaagucaucauuaagacggagaauauuagagagaugcauaucgagaccgaaagauuuggcgacuuucacggcuacauccauuaccuaaucaugaaggacauauucaaagaucugaauguggggauuaucgaugccugggacaugacaauugcauacgggaccgacaccauucaccccccagaucacgugauuggcaaccaaauaaauauguuccugaacuauaucuguuag

SEQ ID NO: 243000 - RNA, 1218 nt, Artificial Sequence
  derived and/or modified sequence
augaguagccccgcauuaacagccggugcaucaggcaaggugauggauuucaauaaugguacuuaccuuguuuccuucacacucuuuugggaaggacaggugucacucagccuccugcucauccacccuucggagggagccagugccuuguggagggcccggaaccaaggguacgacaagaucauauucaaggguaaguucguuaacgguaccucacacguuuuuacugaaugcggccucacuuugaacaguaaugcagagcuuugcgaauaccuggaugauagagaucaagaagcuuuuuacuguaugaaaccccagcacaugccaugugaagcuuugacauauaugaccacacgcaacagagaaguuuccuaccuaacagauaaagagaacagccuguuucacagaucaaaaguugguguugaaaugaugaaagacagaaagcauauagauguaaccaauugcaacaaacgagagaagaucgaggaaacuugucaggucggaaugaaaccaccugugccaggagguuacacccugcaaggaaaauggaucaccaccuucugcaaucagguccagcucgacacaauaaagauaaauggcugucuaaaggggaaacuuaucuaccugcugggugacucaacacugcgacaauggaucuacuacuucccaaaagugguuaagacccucaaauucuucgaccuccacgagacgggcauuuuuaaaaagcauuugcuucuggacgcagaaaggcacacccagauccaauggaagaagcacagcuacccuuucguaacauuucaguuauacuccuugauagaucacgacuacauuccccgggaaaucgaucgccuaucuggagacaaaaacacugcgauugucauuacuuuuggccagcacuuuaggccuuucccuauugacauuuucauucgccgcgcuauuggggugcagaaagcaauugagcgguuauuccugaggucacccgcaacuaaaguaauuauuaaaacagagaacauucgagaaaugcacauagaaacugaaagguuuggggacuuccauggguacauucacuaucugaucaugaaggacaucuuuaaggauuuaaacgucgggauuauagacgccugggauaugacuaucgcuuaugguacggacaccauucauccucccgaccacguuauuggcaaccagauaaauauguuucugaauuacaucugcuag

SEQ ID NO: 243001 - protein, 260 aa, Artificial Sequence
  derived and/or modified sequence
MMDPCSVGVQLRTTNECHKTYYTRHTGFKTLQELSSNDMLLLQLRTGMTLSGNNTICFHHVKIYIDRFEDLQKSCCDPFNIHKKLAKKNLHVIDLDDATFLSAKFGRQLVPGWKLCPKCTQIINGSVDVDTEDRQKRKPESDGRTAKALRSLQFTNPGRQTEFAPETGKREKRRLTKNATAGSDRQVIPAKSKVYDSQGLLIFSGMDLCDCLDEDCLGCFYACPACGSTKCGAECRCDRKWLYEQIEIEGGEIIHNKHAG

SEQ ID NO: 243002 - protein, 168 aa, Artificial Sequence
  derived and/or modified sequence
MMDPCSVGVQLRTTNECHKTYYTRHTGFKTLQELSSNDMLLLQLRTGMTLSGNNTICFHHVKIYIDRFEDLQKSCCDPFNIHKKLAKKNLHVIDLDDATFLSAKFGRQLVPGWKLCPKCTQIINGSVDVDTEDRQKRKPESDGRTAKALRSLQFTNPGRQTEFAPETG

SEQ ID NO: 243003 - DNA, 783 bp, Artificial Sequence
  derived and/or modified sequence
atgatggatccgtgctctgttggagtgcaactgaggactacaaatgaatgtcacaagacttactatacacgacacacggggttcaaaactctgcaggagctttcgtccaacgatatgttgttgcttcagctcagaactggaatgaccttatccgggaacaacaccatatgtttccaccacgttaaaatttacattgaccggtttgaggacctgcagaaatcctgctgcgatccgttcaatatccacaagaaactcgctaaaaagaatctccatgtgatcgatcttgacgatgccacctttctgtcagctaaatttggacgccaactcgtgccagggtggaagctctgccctaagtgcactcagatcatcaacggctctgtcgacgtcgataccgaggaccggcagaagcggaaaccagagtccgacggccggactgcaaaagccctgcgatcccttcagttcacaaaccccggccgacagactgagtttgctcccgagacaggaaagagggaaaagcggcggctgacgaaaaatgctacggctggaagtgacagacaggtcattccagcgaagagcaaggtctacgactctcaaggcctgttaatattttcaggtatggacctctgcgattgcctggacgaagattgtctgggctgtttttacgcttgtccagcctgcggtagtactaaatgcggcgccgaatgcagatgcgaccgcaagtggctgtacgagcagatcgagatcgaaggtggagaaatcatacacaataagcacgccggctag

SEQ ID NO: 243004 - DNA, 507 bp, Artificial Sequence
  derived and/or modified sequence
atgatggacccatgttctgtcggagtccagttaagaacaaccaatgagtgccacaaaacgtattacactaggcacacgggcttcaagacactgcaagagctctcatcgaacgacatgctactcctgcagctaagaaccggcatgacactgagtggcaataacactatatgctttcatcacgtgaaaatttacatcgaccgctttgaggatcttcagaagtcttgctgtgacccctttaatatccataaaaagttagccaaaaagaatttacacgtcatcgatttggacgatgctacatttttatcggcaaaatttggacgccagcttgttcctggctggaaactctgtccaaaatgcactcagataatcaacggctccgtggatgtggatacggaagaccggcagaaaaggaaaccagaatcggatggaagaacagccaaagcgttaaggtctctgcagtttacaaaccctggacgacagaccgagtttgcgcccgaaactggttag

SEQ ID NO: 243005 - DNA, 783 bp, Artificial Sequence
  derived and/or modified sequence
atgatggacccctgcagcgtgggcgtgcagctgcggaccaccaatgaatgccacaagacctactacaccaggcacacaggcttcaagaccctgcaggagctgagcagcaatgacatgctgctgctgcagctgaggacaggcatgaccctgagcggcaacaacaccatctgcttccaccacgtgaagatctacatcgacagatttgaggacctgcagaagagctgctgtgaccccttcaacatccacaagaagctggccaagaagaacctgcacgtgattgacctggatgatgccaccttcctgagcgccaagtttggccggcagctggtgcccggctggaagctgtgccccaagtgcacccagatcatcaatggatctgtggatgtggacacagaggaccggcagaagaggaagccagagagtgatggccgcacagccaaggccctgcggagcctgcagttcaccaaccctggccggcagacagaatttgcccctgagaccgggaagcgggagaagaggcggctgaccaagaatgccacagctggcagtgaccggcaggtgatcccagccaagagcaaggtgtatgacagccagggcctgctgatcttcagcggcatggacctgtgtgactgcctggatgaggactgcctgggctgcttctacgcctgcccagcctgtggcagcaccaagtgtggggctgagtgccgctgtgacaggaagtggctgtatgagcagatcgagattgagggcggggagatcatccacaacaagcatgctggatag

SEQ ID NO: 243006 - DNA, 507 bp, Artificial Sequence
  derived and/or modified sequence
atgatggacccctgcagcgtgggcgtgcagctgcggaccaccaatgaatgccacaagacctactacaccaggcacacaggcttcaagaccctgcaggagctgagcagcaatgacatgctgctgctgcagctgaggacaggcatgaccctgagcggcaacaacaccatctgcttccaccacgtgaagatctacatcgacagatttgaggacctgcagaagagctgctgtgaccccttcaacatccacaagaagctggccaagaagaacctgcacgtgattgacctggatgatgccaccttcctgagcgccaagtttggccggcagctggtgcccggctggaagctgtgccccaagtgcacccagatcatcaatggatctgtggatgtggacacagaggaccggcagaagaggaagccagagagtgatggccgcacagccaaggccctgcggagcctgcagttcaccaaccctggccggcagacagaatttgcccctgagactggatag

SEQ ID NO: 243007 - DNA, 783 bp, Artificial Sequence
  derived and/or modified sequence
atgatggacccctgcagcgtgggcgtgcagctgcggaccaccaacgagtgccacaagacctactatactcgccataccggatttaaaactctacaggagctgtcatccaatgacatgttgttgctgcagctgcgcacaggcatgacgcttagcgggaataacacaatttgttttcaccacgtgaaaatttacatcgatcgcttcgaagaccttcagaaaagctgctgcgacccttttaacatacacaagaagctcgccaaaaagaacctgcacgtcatagatctcgacgatgctacttttctaagtgctaaatttggacggcagttagtgccaggctggaaactgtgccccaaatgcacacagattatcaatggatctgtagacgtggacaccgaagacagacaaaagagaaaacccgagtctgatggacgaactgctaaggcactgcgatctctgcagtttacaaatcctggcaggcagacagagttcgcccctgagaccgggaagcgagagaaacggcgcctgactaaaaacgccaccgccggcagtgataggcaggtaatcccagcaaaatccaaagtctacgactcacagggacttctgatcttctctggaatggatctctgcgactgcctggatgaggattgtctgggctgcttctatgcctgcccggcctgcggctccacgaaatgcggggctgaatgccgatgtgacagaaagtggctttacgaacaaatcgagatcgaaggtggagagattattcataacaagcatgcggggtag

SEQ ID NO: 243008 - DNA, 507 bp, Artificial Sequence
  derived and/or modified sequence
atgatggacccctgcagcgtgggcgtgcagctgcggaccaccaacgagtgccacaaaacttattatacccggcatactgggttcaagaccctccaagagctatcatctaacgacatgctgttgctgcaactccggactggcatgactctctcaggtaacaatacaatctgcttccatcacgtaaagatctacatcgataggtttgaagatttgcagaagtcctgctgtgacccctttaacattcacaaaaagttggcaaaaaaaaacctgcacgtcatcgatctggatgacgccacattcctcagcgcaaagtttgggcggcagctggttcccggatggaaattgtgccccaagtgcacccagatcatcaacgggtcagttgacgtggacactgaagatcgacaaaagcggaagccagaatcagatggcagaacagccaaagccttgagaagtcttcagtttactaaccctggccggcaaacagagtttgctccggagaccggctag

SEQ ID NO: 243009 - DNA, 783 bp, Artificial Sequence
  derived and/or modified sequence
atgatggatccttgcagcgtcggcgtgcaattaaggacgactaacgaatgccataagacctactataccagacataccggttttaaaactcttcaggagctttcttctaatgatatgttgctccttcagctgcgtacaggcatgactctaagcggaaacaataccatctgctttcaccatgttaagatatacattgacagatttgaagacttacagaaatcatgttgtgatccattcaacatccataagaaactggccaagaagaacctccatgtgattgacctggacgatgccacatttctgtcggctaagtttggaaggcagctggttcccggttggaagctttgccccaagtgcactcaaattatcaacggaagtgtcgacgtcgatacagaggacagacagaagcgcaaaccagagtccgacggcaggactgccaaggcactgagatctctccagttcaccaatccaggcaggcagacggaattcgctccggaaacgggtaagcgggaaaagaggaggctaaccaagaacgcaaccgcagggagcgaccggcaggtgatccctgccaagagcaaggtgtatgattcacaagggctgcttatattttctggaatggatctctgcgactgtctggacgaggattgtcttggctgcttttacgcctgtccagcatgcgggtccaccaagtgcggggctgagtgccgctgtgatcgtaaatggctttacgaacagatagagattgagggcggagaaatcatccacaataagcacgcagggtag

SEQ ID NO: 243010 - DNA, 507 bp, Artificial Sequence
  derived and/or modified sequence
atgatggacccttgttctgtaggggtgcagttgcgaacaacgaatgaatgccataagacctactatacgcgacacacagggtttaagactttacaggaactgtcctctaacgatatgctgctcttacaattgcggaccgggatgaccctcagcggaaataacaccatctgcttccaccacgtgaagatatacattgaccggttcgaggatttgcagaaatcgtgttgcgacccctttaacattcataaaaagttagccaagaaaaacctacatgtgattgatttggacgatgctactttcctgtccgcaaaattcgggcgtcaattagtgccagggtggaagctctgccccaagtgtacccagattattaacggctctgtggatgtggacaccgaggacaggcagaagcggaaacccgaaagtgacggtcggaccgccaaagccctgcggtcactgcaattcaccaatcccggaaggcaaaccgagttcgccccagagacggggtag

SEQ ID NO: 243011 - DNA, 2430 bp, Artificial Sequence
  derived and/or modified sequence
acgtctctttgtggtggcgttgagctcctctagcccgcgcttgccgtcctctcagtggtagcgcggggactggctgggaagcggtcggtcgagtgtggcctgtgtggactcgcatcttgcccgaagccgggcggaggagagctcaagctaagggtgatcagcccatgacctaaacctccagacaaaataaaacggaaaatttgctagaatcaagaatgatggatccatgttcagttggagtccagcttcgtactacaaatgagtgccataaaacctactatactcgtcacacaggttttaagactttgcaagaattgtcatcaaatgatatgcttttacttcaacttagaactggaatgacactttctgggaacaatacaatttgctttcatcatgtaaaaatttacattgacagatttgaggatttacagaagtcatgttgtgacccatttaacatacacaagaaattagccaaaaaaaatttgcatgtaattgacttagatgatgccacttttctgagtgctaaatttggaagacagcttgtacctggttggaagctttgtccaaaatgcacacagataatcaatggaagtgtggatgttgatactgaagaccgccagaaaaggaaacctgagtcagatggaagaactgctaaagctttgaggtcattacaatttacgaatccaggaaggcaaactgaatttgctccagaaactggtaaaagagaaaaaagaaggcttacaaaaaatgcaaccgctggttcagacagacaagtgataccagcaaagagtaaggtctatgatagccagggtctcctgatttttagtgggatggacctctgtgactgcctggatgaagactgcttaggatgtttctatgcttgtcctgcctgtggttctaccaagtgtggagctgaatgccgctgtgaccgcaagtggctgtatgagcaaattgaaattgaaggaggagaaataattcataataaacatgctggataatctgcggtaccaaactatggagcctttaaaggtctttatttctaaaaatctgttactctaagatacattttaagcttgattatcatatgacaaagattttaaaaccatctcagtgtgccctaatttttcatcatgggtgctttaagattcactatttgatataaattcagataggctatttttcagtagtcagcgttaagcctgtctggatcaatataaacaagtagggtgtaggcagtcctctatttgcatgtttcccatgggcacaaatttcagtgacctagatttagtttaaataccagtttccttaccaggaaggaaagaaaactggtaaggaaactgttgttgttaaaatctaggttaaaattttagttagcacattgtaactgagtaattacatgaagtacaaacctctctgctagctcttcagtctacaaatcgctatgtaaataacagatatgcttcatgattgtgaccagtcatgttatttctttcaaattcttccagtggtttgtccctgtgcatctgttaattcagttcacgtacagcagagcatgtagttatgctgtctctctgtcatctacttgacattctatagaagtgaacactcgaaagaactggtcaacaaagatgaaagtgcagcaaagcaatgaaaaatgataacactggaagtgaaattttaatcaaacataaatgaatttgtagaagaagtcactgaccatgggaatgttgttcttgctgctgtgtattcataggagcttagtgaaggcaaacttaccaacacaaataagcaaagtggttgcaataaagacagatacgtcccagaggaagtgatggttaaaaaaaaaaaactttacattaaaagatatttaatgtgaatatagaaatatttcacaacattgaaagcacaagcaataaaagggtggaagctgacccaaacttagaaggagtatggcagtttgccgtgaacataaaagatgcttactcagtatggtaagttacttgccagaaaaaaaggcaagccctattcaaactactttgtttttacaatgaaataaaacactttaattctatttctaatgttttaaattacagtgtactaaatatttttaaacatttttgcatttttttctacatttataactggtcttaagagtttttaatatttgagcagaaccttaaaggtcatggaacaatcatcattttccctattgattattaagattgcaggaccatttttatggtcccacagtaccatgtgaaatgaggatcgcttgtagctgggaacagtgcttacttcagggaaaactgattttgatagaaccgactagttgagtattaaactgttttggaaataatttatatatctaagtgctgaaatatatttctcttctccccacttattcaaataaaaaagttttaatactataaa

SEQ ID NO: 243012 - DNA, 3417 bp, Artificial Sequence
  derived and/or modified sequence
atacattgccacatagttcgttgccttgtaactttacctctgatttcctttttctcctccttaatttatcttaatccaattatctgtttgaagaaaaaaaaaattttttttatttttttattttttgagatgagagtctcgctttgtcgcccgggctggagtccagtgacacgatctcggctcaccgcaacttccgcctcctgggttcaagcgattctcatgcctcaacctcccatatagctgcactaccacacctgactaatatttttgtatttttagtagacacgagatttcactatgttagccagtctagtctagaactcctggcatcaagtgatcaacccacattggcctcccaaagtgctgggattacaggcaggagccacaatgcctggctagaagaaacttttctaattattactgtgatagaagccattttatctgatttgattgggacctgtattagttcattttaaaaactgactaaaacacagtaaatgaatataaatatactctgtttttaccagctttaaaacttttttcagttaaaatgttcagtaacatattttaacactttaaagtgtattttattttttaactttgtaaatacagtattttgacctaaaacacagacatttattcgccattttttgttacctgaggccagagtcttctttttatatgattttgctgattattgtttttctctgcagaaaccatatcaaaatgtgtttaagatttctctccagtttttgttttttttttaattttgcaaagcttaaaaacacttgtaaaattgctgaatcctagacttcacagtccctccctaccactcagatttcagtggttcacattttttctcaacagcagattttttcctaatgagttgcattggttgcatattttcttgagaatccaacttttttttttaatttgctttgaaaattatttatgaaaaatttcaaatagaaagtatggacagtagtgaagcacttatgtacatgtcaccaaaccttattttctgtaaatctttttggggaaaataatgttttttcccctcagaagtatccacaaatgtgatatatgttactcttatgtatattttagtatatattcatgtttcatctgtaaatcttatgtactatcttatctttttaaattttacctttaatgatgatactatataacctttacaacttttttcacttaagattgtctttgagatttattcatgttgattcacgtaattcatgtagtttattcattttaactgttatgtgggagtcccttgtatgagtaacgatttcacatcctttacaattaggttatttgtcatctttcactgccaaaggcagtgaatgctgaaagttttcgtatataacttgtgctcttattggagatatttttctccatctgacacccagaactgaaaagagctgagtcccaaggtgtatgcttcctcagttttacaagaaattgcagaaaatgttctaaagcagttgcagcaatttacattcctaccaaagttattataaggagcatgtgagagttggacacatcttaaccagatatcagatttttaaattgatttcaagcaaatgtttaataaatgatatttaatttgcattttcctaggaactatgggggaaacagtttgtatgcatgtattggcttttgttctctttctctgtgaattgcctgactatatttgtttagttttccagtggactctgtcattttctaattgatttttggaagtgaggagttactcgaatatttatgataataatcctaacacctttcaagtgtctttttttttctcctttagttatacagaaatgtgtaaattttacatataatcaaatatatccatctttttatttatttatttttttggtatctgcttgcttgtttgaaaaattcttccatacttccatgtcagaaaaccttctttattttctcataaacatgtttagtttttcttttcatgtttaaatctttaatccacttgttattgatttttgtttgtgcagaagagatctaattgtttttccatatggttaaagtcccttcttcattagtgtgtgatacccatcgattaatagtaccacatgtcatatactgagccctcatctactcatggatctgtttgtttatactataccaataccatagttttaattagaataggtttaaagtaaatcaatatgttactgtattttccttcaggattaccttggctttcttagacctttgctctttcatatagaccagcttgctaaattccaagggggtggcagtagaatatctgatggaactttgattgtaacagaactgaatttacagatgtattcccagataattgacatattttttataatgagccactccatgatatatagctgcatttatttagggtaccgtttttgtcttgcagtttgataattttctccatgaaggtcttgttgtatgtcttttgtaagagtcacatattttgtaagatacagtgttttttggtttctagcatccctggtgaattctcttattagttctaatagtttgttaaacctcttgtatttctcatgtatcttaggataatatttcttatttcctcctttttaattcttatgtggtcttaaatataatctgtaattgcagatgttttcgtgaagttctgactttacagggaacgcttctgtttgattattaaatgtctattataagacttcgataaataccttttttattccttattttcttttagataggtgttgaattttatcaaatgctttttcagtttcctagataaacttgcagcacaaatttgattctctttaatattttctctagggtgatcagcccatgacctaaacctccagacaaaataaaacggaaaatttgctagaatcaagaatgatggatccatgttcagttggagtccagcttcgtactacaaatgagtgccataaaacctactatactcgtcacacaggttttaagactttgcaagaattgtcatcaaatgatatgcttttacttcaacttagaactggaatgacactttctgggaacaatacaatttgctttcatcatgtaaaaatttacattgacagatttgaggatttacagaagtcatgttgtgacccatttaacatacacaagaaattagccaaaaaaaatttgcatgtaattgacttagatgatgccacttttctgagtgctaaatttggaagacagcttgtacctggttggaagctttgtccaaaatgcacacagataatcaatggaagtgtggatgttgatactgaagaccgccagaaaaggaaacctgagtcagatggaagaactgctaaagctttgaggtcattacaatttacgaatccaggaaggcaaactgaatttgctccagaaactggt

SEQ ID NO: 243013 - DNA, 783 bp, Artificial Sequence
  derived and/or modified sequence
atgatggacccctgcagcgtgggcgtgcagctgagaaccaccaacgagtgccacaagacctactacaccagacacaccggcttcaagaccctgcaggagctgagcagcaacgacatgctgctgctgcagctgagaaccggcatgaccctgagcggcaacaacaccatctgcttccaccacgtgaagatctacatcgacagattcgaggacctgcagaagagctgctgcgaccccttcaacatccacaagaagctggccaagaagaacctgcacgtgatcgacctggacgacgccaccttcctgagcgccaagttcggcagacagctggtgcccggctggaagctgtgccccaagtgcacccagatcatcaacggcagcgtggacgtggacaccgaggacagacagaagagaaagcccgagagcgacggcagaaccgccaaggccctgagaagcctgcagttcaccaaccccggcagacagaccgagttcgcccccgagaccggcaagagagagaagagaagactgaccaagaacgccaccgccggcagcgacagacaggtgatccccgccaagagcaaggtgtacgacagccagggcctgctgatcttcagcggcatggacctgtgcgactgcctggacgaggactgcctgggctgcttctacgcctgccccgcctgcggcagcaccaagtgcggcgccgagtgcagatgcgacagaaagtggctgtacgagcagatcgagatcgagggcggcgagatcatccacaacaagcacgccggctag

SEQ ID NO: 243014 - DNA, 507 bp, Artificial Sequence
  derived and/or modified sequence
atgatggacccctgcagcgtgggcgtgcagctgagaaccaccaacgagtgccacaagacctactacaccagacacaccggcttcaagaccctgcaggagctgagcagcaacgacatgctgctgctgcagctgagaaccggcatgaccctgagcggcaacaacaccatctgcttccaccacgtgaagatctacatcgacagattcgaggacctgcagaagagctgctgcgaccccttcaacatccacaagaagctggccaagaagaacctgcacgtgatcgacctggacgacgccaccttcctgagcgccaagttcggcagacagctggtgcccggctggaagctgtgccccaagtgcacccagatcatcaacggcagcgtggacgtggacaccgaggacagacagaagagaaagcccgagagcgacggcagaaccgccaaggccctgagaagcctgcagttcaccaaccccggcagacagaccgagttcgcccccgagaccggctag

SEQ ID NO: 243015 - protein, 248 aa, Artificial Sequence
  derived and/or modified sequence
MTCVEQDKLGQAFEDAFEVLRQHSTGDLQYSPDYRNYLALINHRPHVKGNSSCYGVLPTEEPVYNWRTVINSAADFYFEGNIHQSLQNITENQLVQPTLLQQKGGKGRKKLRLFEYLHESLYNPEMASCIQWVDKTKGIFQFVSKNKEKLAELWGKRKGNRKTMTYQKMARALRNYGRSGEITKIRRKLTYQFSEAILQRLSPSYFLGKEIFYSQCVQPDQEYLSLNNWNANYNYTYANYHELNHHDC

SEQ ID NO: 243016 - DNA, 1116 bp, Artificial Sequence
  derived and/or modified sequence
cagaattgtcaatttattaatgaaatatgacgtgtgttgaacaagacaagctgggtcaagcatttgaagatgcttttgaggttctgaggcaacattcaactggagatcttcagtactcgccagattacagaaattacctggctttaatcaaccatcgtcctcatgtcaaaggaaattccagctgctatggagtgttgcctacagaggagcctgtctataattggagaacggtaattaacagtgctgcggacttctattttgaaggaaatattcatcaatctctgcagaacataactgaaaaccagctggtacaacccactcttctccagcaaaaggggggaaaaggcaggaagaagctccgactgtttgaataccttcacgaatccctgtataatccggagatggcatcttgtattcagtgggtagataaaaccaaaggcatctttcagtttgtatcaaaaaacaaagaaaaacttgccgagctttgggggaaaagaaaaggcaacaggaagaccatgacttaccagaaaatggccagggcactcagaaattacggaagaagtggggaaattaccaaaatccggaggaagctgacttaccagttcagtgaggccattctccaaagactctctccatcctatttcctggggaaagagatcttctattcacagtgtgttcaacctgatcaagaatatctcagtttaaataactggaatgcaaattataattatacatatgccaattaccatgagctaaatcaccatgattgctaaatatactttcatatttcatggtttactggcatcggaaatctctacaagttttaatgatttctccctccctctctttttttcctcctctgaagaaatttaggatttttctcttaaagcaaatactaaagaggaaaaaaaattaactttattgttgcttttatcaaagagtatgtaatctatactaacttgttgggaaattctgccaatgaacaacttttttataataaaaaaaaaaaaaaaaaaaaaaaaaaaaaaaaaaaaaaaaaaaaaaaaaaaaaaaaaaaaaaaaaaaaaaaaaaaaaaaaaaaaaaaaaaaaaaaaaaaaaaaaaaaaaaaaaaaaaa

SEQ ID NO: 243017 - DNA, 747 bp, Artificial Sequence
  derived and/or modified sequence
atgacctgcgtggagcaggacaagctgggccaggccttcgaggacgccttcgaggtgctgagacagcacagcaccggcgacctgcagtacagccccgactacagaaactacctggccctgatcaaccacagaccccacgtgaagggcaacagcagctgctacggcgtgctgcccaccgaggagcccgtgtacaactggagaaccgtgatcaacagcgccgccgacttctacttcgagggcaacatccaccagagcctgcagaacatcaccgagaaccagctggtgcagcccaccctgctgcagcagaagggcggcaagggcagaaagaagctgagactgttcgagtacctgcacgagagcctgtacaaccccgagatggccagctgcatccagtgggtggacaagaccaagggcatcttccagttcgtgagcaagaacaaggagaagctggccgagctgtggggcaagagaaagggcaacagaaagaccatgacctaccagaagatggccagagccctgagaaactacggcagaagcggcgagatcaccaagatcagaagaaagctgacctaccagttcagcgaggccatcctgcagagactgagccccagctacttcctgggcaaggagatcttctacagccagtgcgtgcagcccgaccaggagtacctgagcctgaacaactggaacgccaactacaactacacctacgccaactaccacgagctgaaccaccacgactgctag

SEQ ID NO: 243018 - DNA, 747 bp, Artificial Sequence
  derived and/or modified sequence
atgacctgtgtcgagcaggataaactgggacaggcatttgaggacgcattcgaagttctgcgacagcatagcacaggggatctccaatatagtcctgactaccgaaattatctggcactgatcaatcaccggcctcatgtgaaaggtaatagctcctgctacggcgtcctgccaacggaggaacccgtttataattggagaaccgtgattaacagcgcagcagacttttacttcgaggggaacattcatcagtcgctgcagaatatcactgaaaatcagcttgtgcaaccgacactactacaacagaaggggggcaagggtcggaaaaagcttcgattattcgagtatctgcacgaatccctatacaaccccgagatggcttcttgtattcagtgggtggataagactaagggaatcttccagtttgtgagcaaaaacaaagagaagctggcagaactgtggggcaaacggaagggaaatcgcaagacaatgacataccagaaaatggcaagagcacttagaaattatgggcgtagcggagagatcacaaagatccgacgcaaactgacgtaccagttctcggaggctatactgcagagactgtcaccgtcatacttcctggggaaggagatattttattcccagtgcgtgcagccggaccaggagtacctgagcctgaacaattggaacgccaactataattatacttatgccaactaccacgaactcaatcatcatgactgctag

SEQ ID NO: 243019 - DNA, 747 bp, Artificial Sequence
  derived and/or modified sequence
atgacgtgtgtcgagcaagacaagctaggccaggccttcgaggatgctttcgaagtgctcaggcagcactccacgggagacctgcagtatagccccgattataggaattatcttgcgctcattaaccaccgcccccacgtaaagggcaattcaagctgctatggcgttctgcccactgaggagcctgtgtataactggaggacagtcattaattctgccgctgatttctatttcgagggtaatatccatcagagccttcagaatattacagaaaaccagttggttcagcccacgttattacagcaaaagggtggaaaggggcgcaaaaagctgcgcctgtttgagtaccttcacgaaagcctttataatcccgagatggcgtcttgcatccagtgggtcgacaagaccaaggggatttttcagtttgtgagcaagaacaaagagaaactggctgaactctggggcaagcgcaagggtaacagaaagaccatgacttaccagaagatggctcgcgccttgcgcaattatggccgatccggggaaattaccaaaatacggcgtaagctcacataccagttctctgaagccatcctccaacggctgtcccccagttattttctgggaaaggagatcttttactcccagtgtgtgcaaccagatcaggagtacctaagtttgaataactggaatgccaattacaactacacatatgccaattatcatgaactgaatcaccacgactgctag

SEQ ID NO: 243020 - DNA, 747 bp, Artificial Sequence
  derived and/or modified sequence
atgacctgtgtggagcaggacaagctgggccaggcctttgaagatgcctttgaggtgctgcggcagcacagcactggagacctgcagtacagcccagactacagaaactacctggccctgatcaaccaccggccccacgtgaagggcaacagcagctgctacggcgtgctgcccacagaggagcctgtgtacaactggaggacagtcatcaacagcgctgctgacttctactttgagggcaacatccaccagagcctgcagaacatcacagagaaccagctggtgcagcccaccctgctgcagcagaagggcggcaagggcaggaagaagctgcggctgtttgagtacctgcacgagagcctgtacaaccctgagatggccagctgcatccagtgggtggacaagaccaagggcatcttccagtttgtgtccaagaacaaggagaagctggccgagctgtggggcaagaggaagggcaacaggaagaccatgacctaccagaagatggcccgggccctgaggaactacggccgctctggagagatcaccaagatccggaggaagctgacctaccagttcagcgaggccatcctgcagaggctgagccccagctacttcctgggcaaggagatcttctacagccagtgtgtgcagcctgaccaggagtacctgagcctgaacaactggaatgccaactacaactacacctacgccaactaccacgagctgaaccaccacgactgctag

SEQ ID NO: 243021 - DNA, 747 bp, Artificial Sequence
  derived and/or modified sequence
atgacctgcgtggagcaggacaagctgggccaggccttcgaggacgcctttgaggtgcttcgtcagcactcaaccggagatttgcagtattctccggattacaggaattatcttgcactgattaaccaccggccgcatgtgaagggcaactcaagttgttatggtgtcttacctaccgaggagccagtttacaattggagaacggtcattaattcagccgcagacttttacttcgagggaaatatccatcaatcacttcagaatatcactgaaaaccaactggtgcagccaaccctgctacagcagaaagggggaaagggaagaaaaaaactcagacttttcgagtacctacacgaatcactgtacaatcccgagatggcctcttgtatccagtgggtagataaaacaaagggaatattccagtttgtgtctaagaataaagagaagcttgccgagctatgggggaaaagaaagggcaaccggaagacgatgacataccagaaaatggccagagccttgcgcaactacggccggtctggcgaaatcactaagattaggagaaagctgacttaccagttctccgaagctatactccaacgtttaagcccgagctacttcttaggtaaagaaatcttctacagccagtgtgtgcagcccgaccaagagtacctgagtttgaataattggaatgcaaattacaactacacatatgcaaattatcacgagcttaaccaccacgactgttag

SEQ ID NO: 243022 - DNA, 747 bp, Artificial Sequence
  derived and/or modified sequence
atgacctgcgtggagcaggacaagctgggccaggccttcgaggacgcctttgaagtactaaggcaacattccaccggggacttgcaatatagccctgattaccgcaactatctggcattgataaatcataggcctcacgtcaaggggaatagctcatgttacggagtgttacctactgaagaacctgtgtacaactggaggaccgtgattaattctgccgctgatttttattttgagggcaatatccatcagagtcttcaaaatatcactgaaaaccagctggtacagcccacattattacagcaaaaaggaggaaagggaaggaaaaagctgcggttgttcgagtacttacatgaaagcctttataaccctgaaatggcctcgtgtattcagtgggtagacaagaccaaaggtatttttcagttcgtgtcaaaaaacaaagaaaaactcgcagaactgtggggcaaacggaaagggaacaggaaaaccatgacctatcaaaagatggcacgagccctgcggaactatggtaggagtggtgagatcactaaaatcagacggaagctaacttatcagtttagcgaagcaattctgcagcggctctcaccatcgtactttttgggaaaagaaatcttctactcccaatgtgtacagcccgaccaggagtatctgtcactcaataattggaacgccaactataactacacatatgctaattatcatgagttaaaccaccacgactgttag

SEQ ID NO: 243023 - DNA, 747 bp, Artificial Sequence
  derived and/or modified sequence
atgacttgcgttgaacaagacaagctgggccaggctttcgaggatgccttcgaggtgctgagacagcattccacaggggacctgcaatattctcctgattacaggaactacctggccctgattaaccacaggccccatgttaagggcaattctagttgctacggtgtgctgcctacagaagagccagtgtacaactggaggaccgtgatcaatagcgctgccgatttctatttcgaggggaatatccatcagtcactacaaaacattaccgagaatcaactggtgcagcccactctgctgcaacagaaaggcggaaaaggcagaaagaaactgagactgttcgagtacctacatgaatcattatacaaccctgagatggctagctgcatccagtgggtggacaaaacgaagggcatattccagttcgtctcgaaaaataaggaaaaactggcagaactctggggcaaacgtaaagggaaccgcaagaccatgacctatcagaaaatggctcgcgctctacgaaattatgggaggagtggcgaaataactaaaataaggagaaaattgacctatcaatttagcgaagccatcctccaaagattgtctccttcctacttcttaggaaaggaaatcttctactcgcagtgcgtacaacccgatcaggagtatctgagtctgaataactggaatgctaattacaattatacttacgcgaactaccacgagctcaatcatcacgactgctag

SEQ ID NO: 243024 - DNA, 747 bp, Artificial Sequence
  derived and/or modified sequence
atgacatgcgtagagcaggacaagctcggtcaggcattcgaagacgcattcgaagtcctccgtcagcacagcacgggcgacctccaatatagtcccgattaccggaattacctggctttgattaaccacagacctcacgtcaagggcaattcatcatgttatggggtgctgcctaccgaagaaccagtctataattggcgaacagtgatcaactccgccgcagacttctattttgagggcaacattcatcagagtctccagaacattaccgaaaaccagctggtgcagcccacccttctccagcagaagggcggaaaggggaggaagaaactgaggctctttgaatacttgcatgaaagcctgtacaaccctgagatggctagttgtatacagtgggtagataaaacaaaaggcatcttccagtttgtgagtaaaaataaagagaaactggccgagctttgggggaaaagaaaaggaaaccgaaaaactatgacctaccagaaaatggctagggcgctgaggaattacggcagatcaggagaaattacaaagatccgcagaaagttgacatatcagttcagcgaggccattctgcaaagactgtctcccagttattttttgggaaaggagattttttactcacagtgtgtgcagccagaccaggagtacctgtctctgaataactggaatgccaactacaactatacctatgctaattaccacgaattgaatcaccatgactgctag

SEQ ID NO: 243025 - DNA, 993 bp, Artificial Sequence
  derived and/or modified sequence
cagaattgtcaatttattaatgaaatatgacgtgtgttgaacaagacaagctgggtcaagcatttgaagatgcttttgaggttctgaggcaacattcaactggagatcttcagtactcgccagattacagaaattacctggctttaatcaaccatcgtcctcatgtcaaaggaaattccagctgctatggagtgttgcctacagaggagcctgtctataattggagaacggtaattaacagtgctgcggacttctattttgaaggaaatattcatcaatctctgcagaacataactgaaaaccagctggtacaacccactcttctccagcaaaaggggggaaaaggcaggaagaagctccgactgtttgaataccttcacgaatccctgtataatccggagatggcatcttgtattcagtgggtagataaaaccaaaggcatctttcagtttgtatcaaaaaacaaagaaaaacttgccgagctttgggggaaaagaaaaggcaacaggaagaccatgacttaccagaaaatggccagggcactcagaaattacggaagaagtggggaaattaccaaaatccggaggaagctgacttaccagttcagtgaggccattctccaaagactctctccatcctatttcctggggaaagagatcttctattcacagtgtgttcaacctgatcaagaatatctcagtttaaataactggaatgcaaattataattatacatatgccaattaccatgagctaaatcaccatgattgctaaatatactttcatatttcatggtttactggcatcggaaatctctacaagttttaatgatttctccctccctctctttttttcctcctctgaagaaatttaggatttttctcttaaagcaaatactaaagaggaaaaaaaattaactttattgttgcttttatcaaagagtatgtaatctatactaacttgttgggaaattctgccaatgaacaactttttt

SEQ ID NO: 243026 - DNA, 1132 bp, Artificial Sequence
  derived and/or modified sequence
ttattttcatgatagcctaccgttgaatttaccgttctgatattaatgaaacatctctataaagggttgaagtgtcttcccggattgtcaacttattttattttattttcttcaagcaacaattgctaaggaacagaattgtcaatttattaatgaaatatgacgtgtgttgaacaagacaagctgggtcaagcatttgaagatgcttttgaggttctgaggcaacattcaactggagatcttcagtactcgccagattacagaaattacctggctttaatcaaccatcgtcctcatgtcaaaggaaattccagctgctatggagtgttgcctacagaggagcctgtctataattggagaacggtaattaacagtgctgcggacttctattttgaaggaaatattcatcaatctctgcagaacataactgaaaaccagctggtacaacccactcttctccagcaaaaggggggaaaaggcaggaagaagctccgactgtttgaataccttcacgaatccctgtataatccggagatggcatcttgtattcagtgggtagataaaaccaaaggcatctttcagtttgtatcaaaaaacaaagaaaaacttgccgagctttgggggaaaagaaaaggcaacaggaagaccatgacttaccagaaaatggccagggcactcagaaattacggaagaagtggggaaattaccaaaatccggaggaagctgacttaccagttcagtgaggccattctccaaagactctctccatcctatttcctggggaaagagatcttctattcacagtgtgttcaacctgatcaagaatatctcagtttaaataactggaatgcaaattataattatacatatgccaattaccatgagctaaatcaccatgattgctaaatatactttcatatttcatggtttactggcatcggaaatctctacaagttttaatgatttctccctccctctctttttttcctcctctgaagaaatttaggatttttctcttaaagcaaatactaaagaggaaaaaaaattaactttattgttgcttttatcaaagagtatgtaatctatactaacttgttgggaaattctgccaatgaacaacttttttataata

SEQ ID NO: 243027 - protein, 151 aa, Artificial Sequence
  derived and/or modified sequence
MEYVLEVKNSPRHLLKQFTVCDVPLYDICDYNVSRDRCQELGCCFYEGVCYKKAVPIYIHVFSALIVIIAGAFVITIIYRVIQESRKEKAIPVDVALPQKSSEKAELASSSSKLGLKPASPGPPSAGPSMKSDEDKDDVTGTITEAEETED

SEQ ID NO: 243028 - DNA, 709 bp, Artificial Sequence
  derived and/or modified sequence
ccagtttgttgttttacctaaaaggtgttttccacgtggagtgggactgagaggcacaggtggctgaggggacccgcctgggatgtgaggcgcaggtgtgctcggccccttcatctgtcagctgcagcaatggaatacgtgctggaagtgaagaactctccgcggcacctcctgaagcaattcacagtgtgtgacgttcctctgtatgacatttgtgactacaacgtctccagggaccgatgccaggagctcgggtgctgcttctacgaaggcgtctgctacaagaaagcggttcccatttacatccacgtgttctctgccttgattgtgatcatcgctggggccttcgtcatcaccatcatctacagagtcattcaggagagcaggaaagaaaaggccatccctgtggatgtcgcgctgccacagaagtccagcgaaaaggcggagttggcctcatccagcagcaagttagggctgaagcctgcgagtcctgggcctccaagtgctgggccctcgatgaagagtgacgaggataaggatgatgtaacagggacaataacagaagccgaagaaactgaggactgactgagacgcatgaagaagtggagattgtcagaattatccaaatgaaatggtacagcaggtgcactgttaacagtgtgatggaatgaccacccaaagagaaaaaaataaaggtattttgaaaatt

SEQ ID NO: 243029 - DNA, 456 bp, Artificial Sequence
  derived and/or modified sequence
atggagtacgtgctggaggtgaagaacagccccagacacctgctgaagcagttcaccgtgtgcgacgtgcccctgtacgacatctgcgactacaacgtgagcagagacagatgccaggagctgggctgctgcttctacgagggcgtgtgctacaagaaggccgtgcccatctacatccacgtgttcagcgccctgatcgtgatcatcgccggcgccttcgtgatcaccatcatctacagagtgatccaggagagcagaaaggagaaggccatccccgtggacgtggccctgccccagaagagcagcgagaaggccgagctggccagcagcagcagcaagctgggcctgaagcccgccagccccggcccccccagcgccggccccagcatgaagagcgacgaggacaaggacgacgtgaccggcaccatcaccgaggccgaggagaccgaggactag

SEQ ID NO: 243030 - DNA, 456 bp, Artificial Sequence
  derived and/or modified sequence
atggagtatgtgctggaggtcaaaaattctcccaggcatctgctgaagcagttcacagtctgtgatgttcctttatatgatatttgcgactacaatgtgtcaagagaccgctgccaagagttagggtgctgtttctacgagggcgtttgctacaagaaggcagttccgatctacatccacgttttcagcgcgctgattgttatcattgcgggtgcctttgtgataaccatcatctacagagttatccaggaatcccggaaagagaaggccatcccagtggacgtggctctaccacagaaatcatcagagaaagcagagctggcttcttcttccagcaaacttggtttgaagccagcctcccctgggcctccgtcagctggtccgagcatgaagtctgatgaagataaggatgatgtcaccggcacaatcacagaggcagaagaaacagaggattag

SEQ ID NO: 243031 - DNA, 456 bp, Artificial Sequence
  derived and/or modified sequence
atggagtatgtgctggaggtgaagaacagccccaggcacctgctgaagcagttcaccgtgtgtgatgtgcccctgtatgacatctgtgactacaacgtgtcccgggaccgctgccaggagctgggctgctgcttctatgagggcgtgtgctacaagaaggctgtgcccatctacatccacgtgttttctgccctgattgtcatcatcgccggggcctttgtgatcaccatcatctacagagtcatccaggagagcaggaaggagaaggccatccctgtggatgtggccctgccccagaagagcagcgagaaggccgagctggccagcagcagcagcaagctgggcctgaagccagccagccctggccccccatctgctggccccagcatgaagagtgatgaggacaaggatgatgtgacaggcaccatcacagaggccgaggagacagaggactag

SEQ ID NO: 243032 - DNA, 456 bp, Artificial Sequence
  derived and/or modified sequence
atggagtacgtgctggaggtgaagaacagcccccggcacctgctgaagcagtttacggtatgcgacgtcccgctgtatgacatttgtgattacaatgtcagccgggaccggtgtcaggaactaggatgttgcttttacgagggtgtatgttacaaaaaggcagtgcctatctacatccacgtcttcagtgctctgattgtcatcatcgcaggtgcgttcgtgataaccatcatttatcgcgtgattcaagagagcagaaaagagaaggctattccagtggacgtggccctcccgcagaaaagcagcgaaaaagccgaacttgcatcatcctcaagcaagctaggattaaaacctgcatctcccggcccgccaagcgccggaccttcaatgaagagtgatgaggacaaagatgatgtgacaggaactattaccgaggcagaggaaaccgaagactag

SEQ ID NO: 243033 - DNA, 456 bp, Artificial Sequence
  derived and/or modified sequence
atggaatacgtgctggaagtgaagaatagccccagacatcttctgaaacagtttaccgtctgcgacgtacccctgtacgatatttgtgactacaatgtctccagagataggtgtcaggagctggggtgttgtttctatgagggagtatgttacaaaaaggccgtgcctatctatatccacgttttttctgcattaatcgtcattatcgccggagctttcgtaataaccattatctacagagttatacaggaatctaggaaggaaaaggcgattcccgttgacgtggccctcccacagaagtcctctgagaaggccgagttggcctcctcttcctccaagctgggccttaagccggcatccccaggaccaccctcggccggaccatctatgaaaagcgacgaggataaagacgatgttacaggtaccattacagaagcagaggagacagaggattag

SEQ ID NO: 243034 - protein, 723 aa, Artificial Sequence
  derived and/or modified sequence
MAEEEETAALTEKVIRTQRVFINLLDSYSSGNIGKFLSNCVVGASLEEITEEEEEEDENKSAMLEASSTKVKEGTFQIVGTLSKPDSPRPDFAVETYSAISREDLLMRLLECDVIIYNITESSQQMEEAIWAVSALSEEVSHFEKRKLFILLSTVMTWARSKALDPEDSEVPFTEEDYRRRKSHPNFLDHINAEKMVLKFGKKARKFAAYVVAAGLQYGAEGGMLHTFFKMAWLGEIPALPVFGDGTNVIPTIHVLDLAGVIQNVIDHVPKPHYLVAVDESVHTLEDIVKCISKNTGPGKIQKIPRENAYLTKDLTQDCLDHLLVNLRMEALFVKENFNIRWAAQTGFVENINTILKEYKQSRGLMPIKICILGPPAVGKSSIAKELANYYKLHHIQLKDVISEAIAKLEAIVAPNDVGEGEEEVEEEEEEENVEDAQELLDGIKESMEQNAGQLDDQYIIRFMKEKLKSMPCRNQGYILDGFPKTYDQAKDLFNQEDEEEEDDVRGRMFPFDKLIIPEFVCALDASDEFLKERVINLPESIVAGTHYSQDRFLRALSNYRDINIDDETVFNYFDELEIHPIHIDVGKLEDAQNRLAIKQLIKEIGEPRNYGLTDEEKAEEERKAAEERLAREAAEEAEREHQEAVEMAEKIARWEEWNKRLEEVKREERELLEAQSIPLRNYLMTYVMPTLIQGLNECCNVRPEDPVDFLAEYLFKNNPEAQ

SEQ ID NO: 243035 - DNA, 2172 bp, Artificial Sequence
  derived and/or modified sequence
atggccgaggaagaggagacggccgccctgaccgaaaaagtgatcaggactcagcgggttttcattaatctcttggactcttatagcagcggcaacataggaaaatttctgtctaactgtgtggtaggcgcttccctggaggagataacggaggaggaggaggaggaggacgaaaataaaagcgcgatgctagaggcgtccagcaccaaggttaaggaggggacgttccagatagtcggtaccctctcaaagccagattctcctcggcctgactttgctgtggagacttatagtgcgatttccagagaggacctgcttatgaggcttctcgaatgcgacgtgataatatataacataactgaaagtagtcagcagatggaggaagcaatctgggccgtctcagcactgagtgaggaagtctcgcattttgagaagcggaagttgttcattttgctttcaacggtgatgacttgggcccgcagtaaggccctggacccagaggatagtgaggtgcccttcacagaggaagactaccgccggaggaaaagccacccaaacttcctcgaccatattaacgccgagaagatggttctgaagttcggcaagaaagcccgaaagttcgccgcctatgtcgttgccgctggtttacagtacggagcagaaggcggaatgctgcacacgtttttcaagatggcctggcttggggagatccccgccctcccagtgtttggagacggtaccaatgtgatcccgacaatccacgttctcgacttagctggtgtgattcagaatgtgattgaccacgtgcctaaaccccattatctagtcgcggttgacgagtctgtacacaccttggaggacatcgtgaagtgtatctccaaaaatacaggccctggcaagattcagaaaatcccaagagaaaacgcgtacttaacaaaagatcttacccaggactgtctggaccaccttctggtcaatctcagaatggaggccttgttcgtaaaggagaactttaatattcgttgggccgcccagactggatttgtcgagaatattaacaccatcctaaaggagtacaaacagtcgagggggctgatgcctatcaagatttgcattctgggccctccagccgtcgggaagtcatccattgctaaagagctagccaactactataaattgcaccacattcagttaaaagacgtgatttccgaagccatcgctaaactggaagccatcgttgcccccaacgacgtaggtgagggggaggaggaggtggaggaagaggaagaggaggagaacgtagaagatgcgcaggagctgctggatggtatcaaagaatccatggaacaaaatgctggacagctcgacgaccagtacatcatccgcttcatgaaagaaaagctcaagagcatgccctgtagaaatcagggctacattctcgatggttttcccaagacttacgatcaagcaaaggatctctttaatcaggaagacgaggaggaagaagacgatgtgcgcggacgcatgttccccttcgataagctcatcatccctgagttcgtatgtgcgctggacgcatcagacgaattcctgaaggagagggtgatcaatctccctgaatcaattgtggccggcacacattactctcaagatcggtttctgcgggctctaagtaactatcgcgacattaacattgatgacgaaaccgtcttcaactactttgatgagctagagatacatcctatccatatcgacgtgggtaaactagaggatgcccagaaccgtctggccattaaacagctgatcaaggaaattggcgaaccacgcaattatggcttgaccgacgaagagaaggccgaggaggagcgcaaggcagcggaggagagacttgcacgagaggcagcggaggaggcggagcgggagcatcaggaagctgtcgaaatggctgaaaaaattgcgcgctgggaagaatggaataagaggttggaagaggtcaagcgtgaagagagggaactgctagaggcgcagtcaatccctttacggaattaccttatgacttacgtgatgccaactctgatccaggggttgaacgagtgctgcaacgtccgtcctgaggaccccgtcgactttttagctgaatatctctttaagaataatccagaagcgcaatag

SEQ ID NO: 243036 - DNA, 2172 bp, Artificial Sequence
  derived and/or modified sequence
atggccgaggaggaggagacagctgccctgacagagaaggtgatccgcacccagagggtcttcatcaacctgctggacagctacagcagcggcaacatcggcaagttcctgagcaactgtgtggtgggcgccagcctggaggagatcacagaggaggaggaggaggaggatgagaacaagagcgccatgctggaggccagcagcaccaaggtgaaggagggcaccttccagatcgtgggcaccctgagcaagccagacagccccaggccagactttgctgtggagacctacagcgccatcagccgggaggacctgctgatgaggctgctggagtgtgatgtgatcatctacaacatcacagagagcagccagcagatggaggaggccatctgggccgtgtctgccctgtctgaggaggtgagccactttgagaagaggaagctgttcatcctgctgagcacagtgatgacctgggcccggagcaaggccctggaccctgaagattctgaggtgcccttcacagaggaggactacagaagaaggaagagccaccccaacttcctggaccacatcaatgctgagaagatggtgctgaagtttgggaagaaggccaggaagtttgctgcctacgtggtggccgccggcctgcagtacggggctgagggcggcatgctgcacaccttcttcaagatggcctggctgggggagatcccagccctgcctgtgtttggagatggcaccaacgtcatccccaccatccacgtgctggacctggccggggtcatccagaatgtcatcgaccacgtgcccaagccccactacctggtggccgtggatgaatctgtgcacaccctggaggacatcgtgaagtgcatcagcaagaacacaggccctgggaagatccagaagatccccagagaaaatgcctacctgaccaaggacctgacccaggactgcctggaccacctgctggtgaacctgaggatggaggccctgtttgtgaaggagaacttcaacatccgctgggccgcccagacaggctttgtggagaacatcaacaccatcctgaaggagtacaagcagagccggggcctgatgcccatcaagatctgcatcctgggccccccagctgtgggcaagagcagcatcgccaaggagctggccaactactacaagctgcaccacatccagctgaaggatgtgatcagcgaggccatcgccaagctggaggccatcgtggccccaaatgatgtgggggagggggaggaggaggtggaggaggaggaggaggaggagaatgtggaggatgcccaggagctgctggatggcatcaaggagagcatggagcagaatgccggccagctggatgaccagtacatcatccgcttcatgaaggagaagctgaagtccatgccctgcaggaaccagggctacatcctggatggcttccccaagacctatgaccaggccaaggacctcttcaaccaggaggatgaggaggaggaggatgatgtgcggggccgcatgttcccctttgacaagctgatcatccctgagtttgtgtgtgccctggatgccagtgatgagttcctgaaggagagggtcatcaacctgcctgagagcatcgtggccggcacccactacagccaggaccgcttcctgcgggccctgagcaactacagagacatcaacattgatgatgaaacagtgttcaactactttgatgagctggagatccaccccatccacattgatgtgggcaagctggaggatgcccagaaccggctggccatcaagcagctgatcaaggagattggagagcccagaaattatggcctgacagatgaggagaaggccgaggaggagaggaaggctgctgaggagcggctggcccgggaggccgctgaggaggccgagcgggagcaccaggaggccgtggagatggccgagaagatcgcccgctgggaggagtggaacaagaggctggaggaggtgaagcgggaggagcgggagctgctggaggcccagagcatccccctgaggaactacctgatgacctacgtgatgcccaccctcatccagggcctgaatgaatgctgcaatgtgcggccagaagatcctgtggacttcctggccgagtacctgttcaagaacaaccctgaggcccagtag

SEQ ID NO: 243037 - DNA, 2172 bp, Artificial Sequence
  derived and/or modified sequence
atggccgaggaggaggagaccgccgccctgaccgagaaggtgatccggacacagagagttttcatcaatttactcgactcatattctagcggcaatatcggcaagttcctgtccaactgcgttgtgggcgccagtctcgaggaaattacagaagaagaagaagaggaggacgaaaataagagcgcgatgctggaggccagcagcaccaaggtgaaagagggcacctttcaaatcgtgggtacattaagcaaacctgacagtcctagaccggatttcgcggtggaaacctatagcgccatttcacgggaagacttactgatgaggctgctagaatgtgacgtgattatctacaatattaccgagtcgtcacaacaaatggaggaagcaatttgggcagtgtcagctttgagcgaggaagtgagtcactttgagaagcgtaagttgttcattctgctatccacagtcatgacgtgggcaaggtcgaaagctctggaccccgaagattcagaggtgccatttactgaggaagattataggagacggaaaagccatcctaacttcctggatcacataaacgccgaaaagatggttctgaagtttggcaaaaaggctagaaagttcgctgcctacgtcgtggcagctggcctccagtacggggccgagggaggcatgctgcacacattcttcaaaatggcgtggctgggcgaaattccggccttgcccgtctttggggacggaaccaacgtgatcccaaccatccacgtgctcgatcttgccggtgtgattcaaaatgtcatcgaccatgttcccaagccgcattacttggttgccgtggatgagagcgtacatacactcgaggacattgttaaatgtattagtaagaatacaggacccggcaaaatacagaaaataccccgggagaatgcttatctgaccaaagacctgacacaagattgtttggatcacctgttagtgaaccttcgcatggaagccttgtttgtaaaagaaaacttcaatattaggtgggccgcccaaactggattcgtcgagaatatcaataccattctgaaagagtacaaacagtcccggggtttaatgcccatcaaaatttgcattctcggcccaccggccgtgggcaagtcctcaatcgccaaggagcttgccaactattacaaactgcaccatatccagctcaaggatgtcatctctgaagcgatcgccaagctcgaagctattgtcgctcccaacgatgtcggagagggcgaggaggaagtggaagaggaggaagaggaggagaatgttgaggatgcccaggaattgcttgatgggatcaaagaatccatggagcagaacgccgggcaactggatgaccagtatattatccggttcatgaaggagaagctgaagtcaatgccctgccgcaatcaggggtatatcctagatggcttccccaagacctatgatcaagccaaagacctctttaaccaggaggatgaagaggaggaggatgatgtgcggggtcgcatgttcccattcgataaattgattatccccgagttcgtgtgcgccctcgacgctagtgacgagttcctgaaggaaagggtgattaacctacccgagtccatcgttgctggtactcattacagccaggatcggttcctccgggccctttccaactacagggatataaacattgatgatgagactgtgttcaattactttgacgagctcgaaattcacccaatccatatcgacgtgggcaagttggaagacgcacagaaccggcttgcaattaaacaacttattaaagagattggagaacccaggaactacggtctgacagacgaggaaaaagctgaagaagagcggaaagcagctgaggagaggctagcccgagaggccgcagaggaagccgagcgagaacatcaggaagcagttgagatggcagagaagattgcaaggtgggaggaatggaataagcgattggaggaagtcaagagggaagagcgcgaattactggaggctcagtcaatcccactgaggaactatctcatgacatacgttatgccaactctcattcaaggcctcaacgagtgctgcaacgtcaggcctgaagatcctgtcgactttctcgctgaatacctgtttaaaaataacccggaggcccaatag

SEQ ID NO: 243038 - DNA, 2172 bp, Artificial Sequence
  derived and/or modified sequence
atggccgaggaagaagagactgccgcactgacagagaaggtgatcagaactcagcgagtctttatcaatttgcttgacagctatagttcaggcaatatcggcaagttcctgtcaaattgtgttgttggggctagcctggaggaaattaccgaggaggaagaggaagaagatgagaacaaaagcgcaatgcttgaggctagtagcactaaagtgaaagagggaacatttcaaatcgtggggaccctctctaaaccggacagtcccagacccgattttgccgtcgaaacatattccgcaatctctagggaggacttgctcatgaggctgttagagtgcgatgtgatcatttacaatataaccgaaagtagtcaacaaatggaggaggccatttgggcagtttccgctctatcggaagaggtgagccattttgagaaacggaagctgttcatcctgctcagtacagtgatgacctgggcccgatccaaggctcttgatcctgaggactctgaggtcccctttaccgaggaggattacaggcggaggaaaagccatcccaactttctggatcatataaatgccgagaaaatggtactgaaatttggtaaaaaggctcgcaagtttgctgcctatgtggtagccgctgggttgcagtatggtgccgaggggggaatgttacacactttcttcaagatggcatggctgggcgagattccggctctgcctgtgtttggtgatggcaccaatgttatccctacgatccacgtgctggatctcgctggggtaatccagaacgttattgatcacgtgccaaagcctcactatttggtggcagtcgacgaatccgtacacaccctggaggatatcgtcaagtgtatctccaagaacaccgggccaggtaagatccagaaaatcccacgagagaatgcttacctgacgaaggacctaacccaagactgcctggatcacttgcttgtgaatctgagaatggaagcactgtttgtgaaggaaaactttaacattaggtgggcggcacagactggttttgtagagaatattaatacaatcctgaaggaatataagcaaagtcgcggtttgatgcctattaaaatctgcatcctgggacctcccgcagtcggcaagagcagtatcgccaaggaactggcaaactactacaagttacaccatattcaactgaaggatgtgattagcgaggccattgccaagctggaggccatcgttgcgcctaacgatgtcggagagggggaggaagaagtggaagaagaggaggaagaagaaaatgtggaagatgcccaggagttgctggatgggattaaagaaagcatggagcaaaacgccggacagcttgacgaccagtatatcatcagattcatgaaagagaagctgaagtccatgccttgtcgcaatcaggggtacatattggatggattcccaaagacatatgatcaggcgaaggacctctttaatcaggaagatgaggaagaggaggacgacgtgcgcggtcggatgtttcccttcgataaattgatcatcccagaatttgtgtgcgcacttgatgcatctgatgagttcctcaaagaacgggttataaacctgcccgagtctatcgttgctggcactcattacagtcaagaccggttcctcagggctctgtcaaattacagagatattaacatcgacgatgagacggtgtttaactactttgacgagctggaaattcaccccatccatatcgacgtgggaaaactggaggatgcgcaaaaccggctggccatcaaacagttgattaaagaaatcggcgagccaaggaattatggactcacagatgaggagaaagcagaggaggaaagaaaggccgctgaggagcgactggcacgggaggctgccgaagaggcagagagagaacatcaggaggccgtcgagatggcggaaaaaattgcacggtgggaggaatggaacaagcgcttggaagaggtcaagagagaggagcgcgaattactcgaagctcagagtattccgcttcggaactatcttatgacatacgtcatgccaaccctaattcaaggactgaacgaatgttgtaatgtgcgccctgaagaccccgttgacttcttagcagagtaccttttcaagaacaaccccgaagcgcagtag

SEQ ID NO: 243039 - DNA, 3300 bp, Artificial Sequence
  derived and/or modified sequence
aagcgagtggcgctttcaccttagcaaccagcgcggctcccaccatggctgaagaagaggaaactgctgctctcacggagaaggttatccggacccagagggtgtttataaacctgttggattcctacagcagcggaaacatcgggaagtttctatctaactgtgtagttggggcttcgcttgaagaaattacagaggaagaggaagaggaagatgaaaataagtcagctatgctggaagcttcctcaaccaaagtgaaggaaggcacattccagattgtgggcacgctgtccaagcctgacagcccgcggcctgactttgcggtggagacgtactctgccatctctcgagaagaccttctcatgcgcctgctggagtgtgatgttattatttataacatcactgagagctcacagcaaatggaggaagccatctgggcagtctctgcactcagtgaagaagtcagccactttgaaaagcgaaagctatttattttactgtcgacggtgatgacttgggcgcgctccaaagccctggaccccgaggattctgaggttccattcactgaagaagattatcgaagaagaaagtctcatcctaattttctggaccacataaatgctgaaaaaatggttctcaaatttggaaaaaaggccagaaaatttgcagcatacgtagttgctgctggactccagtatggagcggaaggaggcatgttacacacattttttaagatggcttggttgggcgagattcctgcattaccagtttttggcgatggaacaaatgtaattccaacaatccatgttcttgatctagcaggagtgatacaaaacgtcatagatcacgtgccaaagcctcactacctggttgctgtggatgagtctgttcataccctggaagacatagtcaagtgtatcagtaaaaatactggccctgggaaaatccagaaaatacccagagaaaatgcatacctaaccaaggacttaacgcaagattgtcttgaccatttactggtcaacttaagaatggaagcgctctttgtgaaggagaattttaatattcgatgggctgcccaaacaggatttgtggaaaatatcaacactatcctcaaggagtacaagcaaagcagaggattgatgccaatcaagatctgcattcttggtccccctgctgtgggaaaatccagtattgctaaagaattggccaactactacaaactgcatcacatccaactgaaggatgtcatttctgaagccatagcaaaactggaggcgattgttgcccctaacgatgtaggggaaggagaagaagaagtcgaagaggaagaggaggaggagaatgtggaagatgcacaggagctcctagatggcatcaaggagagcatggagcagaatgcaggtcaactagacgatcaatatataattagatttatgaaagaaaagctaaaatcaatgccttgcaggaatcaaggttatattttggatggattcccaaagacctatgatcaagcaaaagacctgttcaatcaggaagatgaggaggaggaagatgatgtcagaggcagaatgtttccctttgataaattaattatacctgaattcgtttgtgcactggatgcttcggatgagtttctgaaggagcgtgtgataaaccttcctgagagcatcgtggcggggacccactacagccaagaccgattcctccgggctctgagcaactaccgggacatcaatatcgacgatgagactgtcttcaactattttgatgaacttgaaattcacccgatacatattgatgtaggaaaacttgaagatgctcagaatagacttgctatcaaacagctcatcaaagagattggggagcctcgaaattatggtttaacagacgaagaaaaggcagaagaggagcggaaggctgcggaggagcggctggccagggaggctgctgaggaagcagaacgcgagcaccaggaggccgtggagatggcagagaagatagctcgctgggaggagtggaataaacgactggaggaagtgaaaagagaagaaagagaattactggaggctcagtcaattcccctgagaaactatttaatgacctatgtgatgccaactcttattcagggcctgaatgaatgttgcaacgtccgacccgaagaccctgttgattttctggcagaatatctcttcaagaacaatcctgaagcacagtgaaacttgaaagatctggtattatctacctttacagaaccacagatcacttattatactttgaaaaattgctttgaaaaatgcttttccagttcttagaaaattctttttttgtagacaaatattctataaactagaatctctattaaaagctatatgacatgactatgtcattaaaactatatttgaaatgtaaattgataaagacatttgtgcatagctcatgagacaaatactgatttaatattttattctttagtcagatctaaatataccgcttctgtacactaatgtttataggtatttatagcatgaagaaaatcagactatatattgtagactatgtattattctaacatgtaggctaatttacatgacttgttatcgccccaataacaatgttattagaaatggaaataaattgaagtgatttatgcctgttgactcacagtaaatcagacaagattggtgcctgtaaggtggctttttttttttttttttttaaatgaagcaatggttagggaaaggttgctttgagttcagggtcaggatcccagacaatgaatcggagagaactgtaaacctttaggcggagaaatctgcataacaggataattccaatctttgtgataagtgagaagttgctaaatattttcaacacactttataacataggcataagttatcaatcctatagtcttttccagttctaaaaatcccataagattcctagaattaccctaaatgagaaattagtttaggtttaatggcatatgtattttatctctttaaataatgtaacctaatataactgcccgactttttatttgtgctaaaatacatgtaacataaaattgaccactgtaaccattttaaagtgtataattcagtggcactaagttcattcacaatgatctgcagccaccactatctagtccagaactttctcatcaccccaaatggaaacccagcacctattaggcagtcacgctccattattccctccccccagttccaggcaaccacgaatctgctttctgtctctatggatttacctattataaataaaaccatataatgggtggtc

SEQ ID NO: 243040 - DNA, 2172 bp, Artificial Sequence
  derived and/or modified sequence
atggccgaggaggaggagaccgccgccctgaccgagaaggtgatcagaacccagagagtgttcatcaacctgctggacagctacagcagcggcaacatcggcaagttcctgagcaactgcgtggtgggcgccagcctggaggagatcaccgaggaggaggaggaggaggacgagaacaagagcgccatgctggaggccagcagcaccaaggtgaaggagggcaccttccagatcgtgggcaccctgagcaagcccgacagccccagacccgacttcgccgtggagacctacagcgccatcagcagagaggacctgctgatgagactgctggagtgcgacgtgatcatctacaacatcaccgagagcagccagcagatggaggaggccatctgggccgtgagcgccctgagcgaggaggtgagccacttcgagaagagaaagctgttcatcctgctgagcaccgtgatgacctgggccagaagcaaggccctggaccccgaggacagcgaggtgcccttcaccgaggaggactacagaagaagaaagagccaccccaacttcctggaccacatcaacgccgagaagatggtgctgaagttcggcaagaaggccagaaagttcgccgcctacgtggtggccgccggcctgcagtacggcgccgagggcggcatgctgcacaccttcttcaagatggcctggctgggcgagatccccgccctgcccgtgttcggcgacggcaccaacgtgatccccaccatccacgtgctggacctggccggcgtgatccagaacgtgatcgaccacgtgcccaagccccactacctggtggccgtggacgagagcgtgcacaccctggaggacatcgtgaagtgcatcagcaagaacaccggccccggcaagatccagaagatccccagagagaacgcctacctgaccaaggacctgacccaggactgcctggaccacctgctggtgaacctgagaatggaggccctgttcgtgaaggagaacttcaacatcagatgggccgcccagaccggcttcgtggagaacatcaacaccatcctgaaggagtacaagcagagcagaggcctgatgcccatcaagatctgcatcctgggcccccccgccgtgggcaagagcagcatcgccaaggagctggccaactactacaagctgcaccacatccagctgaaggacgtgatcagcgaggccatcgccaagctggaggccatcgtggcccccaacgacgtgggcgagggcgaggaggaggtggaggaggaggaggaggaggagaacgtggaggacgcccaggagctgctggacggcatcaaggagagcatggagcagaacgccggccagctggacgaccagtacatcatcagattcatgaaggagaagctgaagagcatgccctgcagaaaccagggctacatcctggacggcttccccaagacctacgaccaggccaaggacctgttcaaccaggaggacgaggaggaggaggacgacgtgagaggcagaatgttccccttcgacaagctgatcatccccgagttcgtgtgcgccctggacgccagcgacgagttcctgaaggagagagtgatcaacctgcccgagagcatcgtggccggcacccactacagccaggacagattcctgagagccctgagcaactacagagacatcaacatcgacgacgagaccgtgttcaactacttcgacgagctggagatccaccccatccacatcgacgtgggcaagctggaggacgcccagaacagactggccatcaagcagctgatcaaggagatcggcgagcccagaaactacggcctgaccgacgaggagaaggccgaggaggagagaaaggccgccgaggagagactggccagagaggccgccgaggaggccgagagagagcaccaggaggccgtggagatggccgagaagatcgccagatgggaggagtggaacaagagactggaggaggtgaagagagaggagagagagctgctggaggcccagagcatccccctgagaaactacctgatgacctacgtgatgcccaccctgatccagggcctgaacgagtgctgcaacgtgagacccgaggaccccgtggacttcctggccgagtacctgttcaagaacaaccccgaggcccagtag

SEQ ID NO: 243041 - protein, 457 aa, Artificial Sequence
  derived and/or modified sequence
MSGTRASNDRPPGAGGVKRGRLQQEAAATGSRVTVVLGAQWGDEGKGKVVDLLATDADIISRCQGGNNAGHTVVVDGKEYDFHLLPSGIINTKAVSFIGNGVVIHLPGLFEEAEKNEKKGLKDWEKRLIISDRAHLVFDFHQAVDGLQEVQRQAQEGKNIGTTKKGIGPTYSSKAARTGLRICDLLSDFDEFSSRFKNLAHQHQSMFPTLEIDIEGQLKRLKGFAERIRPMVRDGVYFMYEALHGPPKKILVEGANAALLDIDFGTYPFVTSSNCTVGGVCTGLGIPPQNIGDVYGVVKAYTTRVGIGAFPTEQINEIGGLLQTRGHEWGVTTGRKRRCGWLDLMILRYAHMVNGFTALALTKLDILDVLGEVKVGVSYKLNGKRIPYFPANQEMLQKVEVEYETLPGWKADTTGARRWEDLPPQAQNYIRFVENHVGVAVKWVGVGKSRESMIQLF

SEQ ID NO: 243042 - DNA, 1374 bp, Artificial Sequence
  derived and/or modified sequence
atgagcggcaccagagccagcaacgacagaccccccggcgccggcggcgtgaagagaggcagactgcagcaggaggccgccgccaccggcagcagagtgaccgtggtgctgggcgcccagtggggcgacgagggcaagggcaaggtggtggacctgctggccaccgacgccgacatcatcagcagatgccagggcggcaacaacgccggccacaccgtggtggtggacggcaaggagtacgacttccacctgctgcccagcggcatcatcaacaccaaggccgtgagcttcatcggcaacggcgtggtgatccacctgcccggcctgttcgaggaggccgagaagaacgagaagaagggcctgaaggactgggagaagagactgatcatcagcgacagagcccacctggtgttcgacttccaccaggccgtggacggcctgcaggaggtgcagagacaggcccaggagggcaagaacatcggcaccaccaagaagggcatcggccccacctacagcagcaaggccgccagaaccggcctgagaatctgcgacctgctgagcgacttcgacgagttcagcagcagattcaagaacctggcccaccagcaccagagcatgttccccaccctggagatcgacatcgagggccagctgaagagactgaagggcttcgccgagagaatcagacccatggtgagagacggcgtgtacttcatgtacgaggccctgcacggcccccccaagaagatcctggtggagggcgccaacgccgccctgctggacatcgacttcggcacctaccccttcgtgaccagcagcaactgcaccgtgggcggcgtgtgcaccggcctgggcatccccccccagaacatcggcgacgtgtacggcgtggtgaaggcctacaccaccagagtgggcatcggcgccttccccaccgagcagatcaacgagatcggcggcctgctgcagaccagaggccacgagtggggcgtgaccaccggcagaaagagaagatgcggctggctggacctgatgatcctgagatacgcccacatggtgaacggcttcaccgccctggccctgaccaagctggacatcctggacgtgctgggcgaggtgaaggtgggcgtgagctacaagctgaacggcaagagaatcccctacttccccgccaaccaggagatgctgcagaaggtggaggtggagtacgagaccctgcccggctggaaggccgacaccaccggcgccagaagatgggaggacctgcccccccaggcccagaactacatcagattcgtggagaaccacgtgggcgtggccgtgaagtgggtgggcgtgggcaagagcagagagagcatgatccagctgttctag

SEQ ID NO: 243043 - DNA, 1766 bp, Artificial Sequence
  derived and/or modified sequence
ccccggcccggctccatttaatggcgcggacgccggcggcggcgggctcctggccgggccagcgcagcggaagagccaagccagcatgtcggggacccgagcctccaacgaccggccccccggcgcaggcggcgtcaagcgggggcggctgcagcaggaggcggcggcgaccggctcccgcgtgacggtggtgctgggcgcgcagtggggggacgagggcaaaggcaaggtggtggacctgctggccacggacgccgacatcatcagccgctgccaggggggcaacaacgccggccacacggtggtggtggatgggaaagagtacgacttccacctgctgcccagcggcatcatcaacaccaaggccgtgtccttcattggcaacggggtggtcatccacttgccaggcttgtttgaggaagcagagaagaatgaaaagaaaggcctgaaggactgggagaagaggctcatcatctctgacagagcccaccttgtgtttgattttcaccaggctgtcgacggacttcaggaagtgcagcgccaggcacaagaggggaagaatataggcaccaccaagaagggaatcggaccaacctactcttccaaagctgcccggacaggcctccgcatctgcgacctcctgtcagattttgatgagttttcctccagattcaagaacctggcccaccagcaccagtcgatgttccccaccctggaaatagacattgaaggccaactcaaaaggctcaagggctttgctgagcggatcagacccatggtccgagatggtgtttactttatgtatgaggcactccacggcccccccaagaagatcctggtggagggtgccaacgccgccctcctcgacattgacttcgggacctacccctttgtgacttcatccaactgcaccgtgggcggtgtgtgcacgggcctgggcatccccccgcagaacataggtgacgtgtatggcgtggtgaaagcctataccacacgtgtgggcatcggggccttccccaccgagcagatcaacgagattggaggcctgctgcagacccgcggccacgagtggggagtgaccacaggcaggaagaggcgctgcggctggctcgacctgatgattctaagatatgctcacatggtcaacggattcactgcgctggccctgacgaagctggacatcctggacgtactgggtgaggttaaagtcggtgtctcatacaagctgaacgggaaaaggattccctatttcccagctaaccaggagatgcttcagaaggtcgaagttgagtatgaaacgctgcctgggtggaaagcagacaccacaggcgccaggaggtgggaggacctgcccccacaggcccagaactacatccgctttgtggagaatcacgtgggagtcgcagtcaaatgggttggtgttggcaagtcaagagagtcgatgatccagctgttttagtcacagactgagctgatcccaacaggccctggcagcgtctggacttgtgtaaacagcagcagtcacgttcctcggccgccacaaccaacaccaaagcaggaaaaccattttctgtacttttatatttctgttcaacctgttggtttctacaatgattttaaacattggaaagccagccttgtgtatatttttaaaaattatattcaaaatgagccaaagtgctcagagaccttctatgacacattagtgtcacatggttgcgtgtccagccgaagcagtgtaataaacatctccaatggccactgaa

SEQ ID NO: 243044 - DNA, 1374 bp, Artificial Sequence
  derived and/or modified sequence
atgagcggaactagagccagcaacgacaggccacccggggcaggtggagtgaagcgcggacgtctgcagcaggaggccgctgccacgggctcacgggttacagtggtcctcggagcccagtggggagacgaaggcaaaggcaaagtcgtcgaccttctggcaaccgatgctgatatcatcagccgctgccaagggggaaacaacgccgggcacacggtagttgtcgacggcaaggagtacgatttccacctgttacccagcgggatcatcaatactaaggcagtgagcttcatcggaaatggggtggtcattcacctcccaggccttttcgaagaagcggagaagaacgaaaagaagggcctgaaggactgggagaaaaggcttatcatctcagatagggctcacttggtgtttgactttcatcaggcagttgatggcctgcaggaagttcagaggcaggcccaggagggcaaaaatataggcactacaaagaagggaatcggacccacctattcttccaaagcggccaggaccggcctcaggatttgtgatctgctgtctgactttgacgaattttcatctagatttaaaaacctcgcacatcagcatcagagcatgtttcccaccctggaaatcgacatcgaggggcagctgaagagactgaaggggttcgcagagcgtatccgcccaatggtgcgggacggcgtgtacttcatgtatgaggctctgcatggccctcccaaaaaaatcctggttgaaggcgccaacgctgcattactggatattgatttcggcacctacccattcgttacgtcctccaactgtactgtgggcggagtgtgtaccggcctcggtataccaccccagaacattggcgacgtctatggggttgtaaaagcatatacgaccagggtgggtatcggtgcctttccaactgagcagatcaatgaaataggcggcctgctgcagactcgggggcacgagtggggggttaccactggacgtaaaagacggtgcggctggctagatctgatgattctgcggtacgcacatatggtaaatggttttacagcccttgctctgacgaagctagacatcctggacgttctaggcgaggtgaaggtgggagttagctacaagctgaatggaaagcgaataccatacttcccagcaaatcaggaaatgttgcaaaaggtggaagtcgaatatgaaaccctacctgggtggaaggctgacactacaggagcgcgcaggtgggaagacctgccacctcaggctcagaactacattcgatttgtggagaatcacgtaggggtggccgtcaagtgggtgggagttggaaagtcgcgagaatctatgattcagcttttctag

SEQ ID NO: 243045 - DNA, 1374 bp, Artificial Sequence
  derived and/or modified sequence
atgagcggcacccgggccagcaatgacaggcctcctggggccggcggcgtgaagaggggccgcctgcagcaggaggccgccgccaccggcagccgggtgacagtggtgctgggcgcccagtggggagatgagggcaagggcaaggtggtggacctgctggccacagatgctgacatcatcagccgctgccagggcggcaacaatgccggccacacagtggtggtggatggcaaggagtatgacttccacctgctgcccagcggcatcatcaacaccaaggctgtgtccttcatcggaaatggagtggtgatccacctgcccggcctgtttgaggaggccgagaagaatgagaagaagggcctgaaggactgggagaagaggctcatcatcagtgaccgggcccacctggtgtttgacttccaccaggccgtggatggcctgcaggaggtgcagaggcaggcccaggagggcaagaacatcggcaccaccaagaagggcatcggccccacctacagcagcaaggccgccaggacaggcctgcgcatctgtgacctgctgagtgactttgatgagttcagcagccgcttcaagaacctggcccaccagcaccagagcatgttccccaccctggagattgacatcgagggccagctgaagaggctgaagggctttgctgagcgcatccggcccatggtgagagatggagtgtacttcatgtatgaggccctgcacggcccccccaagaagatcctggtggagggcgccaatgctgccctgctggacatcgactttggcacctacccctttgtgaccagcagcaactgcaccgtgggcggcgtgtgcaccggcctgggcatccccccccagaacattggagatgtgtatggagtggtgaaggcctacaccaccagggtgggcattggagccttccccacagagcagatcaatgagatcggcggcctgctgcagacccggggccacgagtggggcgtgaccactggaaggaagagaagatgtggctggctggacctgatgatcctgcgctatgcccacatggtgaatggcttcaccgccctggccctgaccaagctggacatcctggatgtgctgggggaggtgaaggtgggcgtgtcctacaagctgaatggcaagaggatcccctacttccctgccaaccaggagatgctgcagaaggtggaggtggagtatgagaccctgcccggctggaaggctgacaccaccggggcccggcgctgggaggacctgcccccccaggcccagaactacatccgctttgtggagaaccacgtgggcgtggccgtgaagtgggtgggcgtgggcaagagccgggagagcatgatccagctgttctag

SEQ ID NO: 243046 - DNA, 1374 bp, Artificial Sequence
  derived and/or modified sequence
atgagcggcacccgggccagcaacgaccggccccccggcgccggcggagtgaagagaggcaggctgcaacaggaggcagctgcaactgggagcagagtaaccgtggtcttgggcgcccagtggggggacgaggggaagggaaaagttgtggacctgcttgccaccgatgccgacatcatctctcgctgccaaggcgggaataacgcaggtcacactgttgtagtggatgggaaagagtatgacttccacttgctcccttcaggtatcatcaacaccaaagccgtgtccttcattggaaacggggttgtcatccatctgccaggactgttcgaggaagctgagaagaacgaaaagaagggcctgaaagattgggagaaaaggctgattatcagcgacagagcccacctggtatttgattttcaccaggctgttgatggtctgcaggaagtccagagacaagcccaggaaggcaagaatatcgggaccacaaaaaagggcatcgggccaacatatagcagcaaagccgccaggacaggactccgcatatgcgacttgcttagcgacttcgacgagttttcctctcggttcaagaatctggcccatcagcaccagtctatgttccccactctcgagatagacatcgaggggcagctgaaacgcttgaaagggttcgctgagcggattagacccatggtgagagacggcgtctacttcatgtacgaggcactccatggcccaccaaagaaaattctcgtggaaggtgccaacgcagctctcctggatatcgactttggcacctaccccttcgtgacgtctagtaactgtaccgtggggggtgtgtgtaccggactgggtattcccccgcagaacatcggcgacgtctatggggtggtcaaagcctataccactcgcgtaggcatcggtgcctttccgaccgagcaaattaacgaaatcggaggcctcctacagactaggggacatgagtggggggtgacaaccgggcgtaaacgccgatgtgggtggctggacctgatgatactgcggtacgcacacatggtcaacggattcactgccttagctctgacgaagctagacattttggacgtgcttggagaagttaaagtgggcgttagttacaagctaaacggaaaaagaatcccctactttcctgcaaatcaggaaatgttgcaaaaggttgaggtggaatatgagacccttccggggtggaaagccgacaccactggagcccggaggtgggaggacctgccaccacaagctcagaactacattcgcttcgtggagaatcacgtcggggttgccgtgaagtgggttggcgtgggaaagtcccgtgagagtatgatccagttattttag

SEQ ID NO: 243047 - DNA, 1374 bp, Artificial Sequence
  derived and/or modified sequence
atgtccggaactcgggctagcaatgatagacctcccggagctggcggtgtgaaacggggaagactgcagcaggaagcagcggcaactggaagccgagtcacggtggtgctgggggctcagtggggcgatgagggcaagggcaaggtcgttgacctgcttgctaccgacgccgacatcatttcaaggtgtcaaggaggtaacaatgccggtcacactgttgtggtggacgggaaagagtatgatttccatttgctgccatccggtatcatcaacactaaagcggtttcgtttattggaaatggggtggtcattcatttacccggacttttcgaggaggcagagaagaacgagaaaaaggggttaaaggactgggagaagcgattaattattagtgatcgggcacacctggtcttcgattttcaccaggcagttgacggcctccaagaggtacaacgacaggcacaggaagggaagaacatcggcaccaccaaaaaggggattgggcctacttacagcagtaaggccgctcggacaggactcaggatttgcgatcttctatctgatttcgacgagttctcgtcccggtttaagaatctagcccaccagcaccaatcgatgttccccactctcgagatcgatatcgaagggcaactgaagcgacttaaaggatttgcggagaggatccgaccaatggtgcgggatggcgtatacttcatgtatgaagccttgcacgggccacccaagaaaatattagtggaaggtgccaatgctgccctgttagacattgacttcggcacataccccttcgtcacatcctcaaattgcaccgtaggcggagtgtgcactggtctgggcatccccccacaaaacattggtgacgtgtatggggtggtaaaagcctatacaactagggttggcattggggcatttccaacagagcagattaacgagattgggggtctgctgcagacacgcggacacgaatggggggtgactacaggccgaaaacgcaggtgcgggtggcttgatttgatgatccttaggtacgcccatatggtcaatggatttaccgctttggctcttactaagctggatattctagacgtgttaggggaagtgaaagtgggggtgtcctacaagctgaatggtaaaaggatcccgtactttcccgcaaatcaggagatgctgcaaaaggtggaagtcgaatacgagaccctccctggttggaaggccgacacgacaggcgcacgaaggtgggaggatctgccgccacaagcccagaactacatcaggtttgtggaaaaccacgtgggagtggctgttaagtgggtcggagtcgggaagtcccgcgagtcaatgatacagctgttctag

SEQ ID NO: 243048 - protein, 414 aa, Artificial Sequence
  derived and/or modified sequence
MKLHCEVEVISRHLPALGLRNRGKGVRAVLSLCQQTSRSQPPVRAFLLISTLKDKRGTRYELRENIEQFFTKFVDEGKATVRLKEPPVDICLSKAISSSLKGFLSAMRLAHRGCNVDTPVSTLTPVKTSEFENFKTKMVITSKKDYPLSKNFPYSLEHLQTSYCGLVRVDMRMLCLKSLRKLDLSHNHIKKLPATIGDLIHLQELNLNDNHLESFSVALCHSTLQKSLRSLDLSKNKIKALPVQFCQLQELKNLKLDDNELIQFPCKIGQLINLRFLSAARNKLPFLPSEFRNLSLEYLDLFGNTFEQPKVLPVIKLQAPLTLLESSARTILHNRIPYGSHIIPFHLCQDLDTAKICVCGRFCLNSFIQGTTTMNLHSVAHTVVLVDNLGGTEAPIISYFCSLGCYVNSSDMLK

SEQ ID NO: 243049 - protein, 422 aa, Artificial Sequence
  derived and/or modified sequence
MKLHCEVEVISRHLPALGLRNRGKGVRAVLSLCQQTSRSQPPVRAFLLISTLKDKRGTRYELRENIEQFFTKFVDEGKATVRLKEPPVDICLSKMESHSVTQVGVQWEELGSLQPTGHFQQFKRFPFSYETGHRGCNVDTPVSTLTPVKTSEFENFKTKMVITSKKDYPLSKNFPYSLEHLQTSYCGLVRVDMRMLCLKSLRKLDLSHNHIKKLPATIGDLIHLQELNLNDNHLESFSVALCHSTLQKSLRSLDLSKNKIKALPVQFCQLQELKNLKLDDNELIQFPCKIGQLINLRFLSAARNKLPFLPSEFRNLSLEYLDLFGNTFEQPKVLPVIKLQAPLTLLESSARTILHNRTIYPKEINVNMWETLPGRISLGCMYDFAASNWSKGRFLYTCWRGGMCIVTHLDDSKTFIKTNFSF

SEQ ID NO: 243050 - DNA, 1245 bp, Artificial Sequence
  derived and/or modified sequence
atgaagctgcactgcgaggtggaggtgatcagcagacacctgcccgccctgggcctgagaaacagaggcaagggcgtgagagccgtgctgagcctgtgccagcagaccagcagaagccagccccccgtgagagccttcctgctgatcagcaccctgaaggacaagagaggcaccagatacgagctgagagagaacatcgagcagttcttcaccaagttcgtggacgagggcaaggccaccgtgagactgaaggagccccccgtggacatctgcctgagcaaggccatcagcagcagcctgaagggcttcctgagcgccatgagactggcccacagaggctgcaacgtggacacccccgtgagcaccctgacccccgtgaagaccagcgagttcgagaacttcaagaccaagatggtgatcaccagcaagaaggactaccccctgagcaagaacttcccctacagcctggagcacctgcagaccagctactgcggcctggtgagagtggacatgagaatgctgtgcctgaagagcctgagaaagctggacctgagccacaaccacatcaagaagctgcccgccaccatcggcgacctgatccacctgcaggagctgaacctgaacgacaaccacctggagagcttcagcgtggccctgtgccacagcaccctgcagaagagcctgagaagcctggacctgagcaagaacaagatcaaggccctgcccgtgcagttctgccagctgcaggagctgaagaacctgaagctggacgacaacgagctgatccagttcccctgcaagatcggccagctgatcaacctgagattcctgagcgccgccagaaacaagctgcccttcctgcccagcgagttcagaaacctgagcctggagtacctggacctgttcggcaacaccttcgagcagcccaaggtgctgcccgtgatcaagctgcaggcccccctgaccctgctggagagcagcgccagaaccatcctgcacaacagaatcccctacggcagccacatcatccccttccacctgtgccaggacctggacaccgccaagatctgcgtgtgcggcagattctgcctgaacagcttcatccagggcaccaccaccatgaacctgcacagcgtggcccacaccgtggtgctggtggacaacctgggcggcaccgaggcccccatcatcagctacttctgcagcctgggctgctacgtgaacagcagcgacatgctgaagtag

SEQ ID NO: 243051 - DNA, 1269 bp, Artificial Sequence
  derived and/or modified sequence
atgaagctgcactgcgaggtggaggtgatcagcagacacctgcccgccctgggcctgagaaacagaggcaagggcgtgagagccgtgctgagcctgtgccagcagaccagcagaagccagccccccgtgagagccttcctgctgatcagcaccctgaaggacaagagaggcaccagatacgagctgagagagaacatcgagcagttcttcaccaagttcgtggacgagggcaaggccaccgtgagactgaaggagccccccgtggacatctgcctgagcaagatggagagccacagcgtgacccaggtgggcgtgcagtgggaggagctgggcagcctgcagcccaccggccacttccagcagttcaagagattccccttcagctacgagaccggccacagaggctgcaacgtggacacccccgtgagcaccctgacccccgtgaagaccagcgagttcgagaacttcaagaccaagatggtgatcaccagcaagaaggactaccccctgagcaagaacttcccctacagcctggagcacctgcagaccagctactgcggcctggtgagagtggacatgagaatgctgtgcctgaagagcctgagaaagctggacctgagccacaaccacatcaagaagctgcccgccaccatcggcgacctgatccacctgcaggagctgaacctgaacgacaaccacctggagagcttcagcgtggccctgtgccacagcaccctgcagaagagcctgagaagcctggacctgagcaagaacaagatcaaggccctgcccgtgcagttctgccagctgcaggagctgaagaacctgaagctggacgacaacgagctgatccagttcccctgcaagatcggccagctgatcaacctgagattcctgagcgccgccagaaacaagctgcccttcctgcccagcgagttcagaaacctgagcctggagtacctggacctgttcggcaacaccttcgagcagcccaaggtgctgcccgtgatcaagctgcaggcccccctgaccctgctggagagcagcgccagaaccatcctgcacaacagaaccatctaccccaaggagatcaacgtgaacatgtgggagaccctgcccggcagaatcagcctgggctgcatgtacgacttcgccgccagcaactggagcaagggcagattcctgtacacctgctggagaggcggcatgtgcatcgtgacccacctggacgacagcaagaccttcatcaagaccaacttcagcttctag

SEQ ID NO: 243052 - DNA, 1245 bp, Artificial Sequence
  derived and/or modified sequence
atgaagctacattgcgaagtagaggtgatctcccgtcacctccccgccctcgggcttcgaaacaggggcaaaggagttagggctgtcctctcgctctgccagcagaccagccggagccagcctcctgtgcgagcattcctccttatttctactctgaaggataaaagaggcaccagatacgagctgagagagaacattgagcaattcttcacaaaatttgtggacgaagggaaagctacagtcaggctaaaagagccaccggtggacatctgtctctccaaggccatctcatcatcactgaaggggtttttaagcgccatgagactcgcgcatcgcggatgtaatgtggacacccctgtgtcaacccttacacccgtgaagacctctgagttcgagaacttcaagaccaaaatggtgatcacctcaaagaaagattaccccctgtccaagaatttcccatactccctggaacacctccaaacttcgtactgcggactggttagggtggacatgagaatgttatgtctaaaatcactgcggaagctggacctctcgcacaatcatatcaagaagttgccagcaactattggtgatctcatccatcttcaggagttaaacctgaatgataaccacctggagtcattctctgtggcgctgtgccacagcaccctgcagaagagtctcagatccctggatctgagtaagaataaaatcaaggcactgcccgtgcaattttgtcagttgcaggagcttaaaaaccttaaactcgatgacaatgaattaatccagttcccatgtaagatcggtcagctgataaatttgcggttcctgtctgccgcccgcaataagctgccgttccttccctcggagtttaggaacctttctctcgagtacctggatctgttcggaaacacttttgagcagcccaaggtccttcctgttatcaagctgcaggcgcctcttaccctgttagagagctccgcgcgaaccatcctgcacaaccgcattccatatggctcccacattatcccgtttcacctatgtcaggacctcgataccgccaaaatctgtgtgtgcggacggttttgcttaaattcattcatccaagggacaaccaccatgaatctgcactccgtggctcatactgtcgtcctagttgataacctgggtggaactgaagccccaatcatcagctatttttgttctctggggtgctatgtgaattcttccgacatgctcaaatag

SEQ ID NO: 243053 - DNA, 1269 bp, Artificial Sequence
  derived and/or modified sequence
atgaagcttcattgcgaggtcgaggtaatcagtcgccatctcccagccctgggtctcagaaacaggggaaagggtgtgcgcgctgttctgagcctttgccagcagactagtcggtctcagccaccggtaagagcattcctcctcatttccacactgaaggataagcgtggtaccagatatgagctcagagaaaatattgagcagttcttcaccaaatttgtagatgaaggaaaagctacggtacggctgaaagagccgcccgtggacatctgcttgagcaaaatggaatctcatagtgtgacccaggtgggggtgcagtgggaagagctgggatcactgcagccaactggacacttccagcagtttaaaaggttcccttttagctatgagaccggccaccgagggtgcaatgttgatactccagtctccacacttacacccgttaaaacatcagaatttgaaaattttaaaactaagatggtgataacaagtaaaaaggactaccctctgagcaagaacttcccgtattctctggaacatctgcagacgtcttattgcggactggtgcgggtcgacatgcgtatgctgtgcctgaagtccctccgcaaattggatttgtctcataaccatataaaaaagctccctgcgactataggcgatcttattcacctacaggaattaaatctgaacgacaatcacctggaatctttctccgtcgccttgtgccacagcaccctgcagaagtcacttcggtccctagacctgagtaagaacaaaattaaagcccttcccgtgcagttctgccagctgcaggagctaaagaacttgaaattagacgataatgagctgatccagtttccttgcaaaattggccagttgatcaatttacgcttcctcagcgccgctcgtaacaagctgccctttctgccttcggagtttcgcaatctgtccctcgagtaccttgacctgttcgggaacacgtttgagcagcccaaggttctgcccgtgatcaaactccaggcgcccttaactctgttagagtcatcggcacgcacgattctccacaaccgcacaatataccctaaagaaattaatgtcaacatgtgggaaaccctccctggtagaatatctctggggtgcatgtacgatttcgccgcatctaattggtccaagggacgcttcctgtatacttgttggcgggggggtatgtgtatcgtgacgcatcttgatgactccaaaacctttattaaaactaacttcagtttctag

SEQ ID NO: 243054 - DNA, 1245 bp, Artificial Sequence
  derived and/or modified sequence
atgaagctgcactgtgaggtggaggtgatcagccgccacctgcctgccctgggcctgaggaacagaggcaagggcgtgcgggctgtgctgagcctgtgccagcagaccagccgcagccagccccctgtgcgggccttcctgctgatcagcaccctgaaggacaagaggggcaccaggtatgagctgcgggagaacatcgagcagttcttcaccaagtttgtggatgagggcaaggccaccgtgcggctgaaggagccccctgtggacatctgcctgagcaaggccatcagcagcagcctgaagggcttcctgagcgccatgaggctggcccaccggggctgcaatgtggacacccctgtgtccaccctgacccctgtgaagaccagcgagtttgagaacttcaagaccaagatggtgatcaccagcaagaaggactaccccctgagcaagaacttcccctacagcctggagcacctgcagaccagctactgcggcctggtgcgggtggacatgaggatgctgtgcctgaagagcctgaggaagctggacctgagccacaaccacatcaagaagctgcctgccaccatcggggacctgatccacctgcaggagctgaacctgaatgacaaccacctggagagcttctctgtggccctgtgccacagcaccctgcagaagagcctgcggagcctggacctgagcaagaacaagatcaaggccctgcctgtgcagttctgccagctgcaggagctgaagaacctgaagctggatgacaatgaactcatccagttcccctgcaagattggccagctgatcaacctgcgcttcctgtctgctgccaggaacaagctgcccttcctgcccagcgagttcaggaacctgagcctggagtacctggacctgtttggaaacacctttgagcagcccaaggtgctgcctgtgatcaagctgcaggcccccctgaccctgctggagagcagcgcccggaccatcctgcacaaccgcatcccctacggcagccacatcatccccttccacctgtgccaggacctggacacagccaagatctgtgtgtgtggccgcttctgcctgaacagcttcatccagggcaccaccaccatgaacctgcacagcgtggcccacacagtggtgctggtggacaacctgggcggcacagaggcccccatcatctcctacttctgcagcctgggctgctacgtgaacagcagtgacatgctgaagtag

SEQ ID NO: 243055 - DNA, 1269 bp, Artificial Sequence
  derived and/or modified sequence
atgaagctgcactgtgaggtggaggtgatcagccgccacctgcctgccctgggcctgaggaacagaggcaagggcgtgcgggctgtgctgagcctgtgccagcagaccagccgcagccagccccctgtgcgggccttcctgctgatcagcaccctgaaggacaagaggggcaccaggtatgagctgcgggagaacatcgagcagttcttcaccaagtttgtggatgagggcaaggccaccgtgcggctgaaggagccccctgtggacatctgcctgagcaagatggagagccacagcgtgacccaggtgggcgtgcagtgggaggagctgggcagcctgcagcccaccggccacttccagcagttcaagcgcttccccttctcctatgaaacaggccaccggggctgcaatgtggacacccctgtgtccaccctgacccctgtgaagaccagcgagtttgagaacttcaagaccaagatggtgatcaccagcaagaaggactaccccctgagcaagaacttcccctacagcctggagcacctgcagaccagctactgcggcctggtgcgggtggacatgaggatgctgtgcctgaagagcctgaggaagctggacctgagccacaaccacatcaagaagctgcctgccaccatcggggacctgatccacctgcaggagctgaacctgaatgacaaccacctggagagcttctctgtggccctgtgccacagcaccctgcagaagagcctgcggagcctggacctgagcaagaacaagatcaaggccctgcctgtgcagttctgccagctgcaggagctgaagaacctgaagctggatgacaatgaactcatccagttcccctgcaagattggccagctgatcaacctgcgcttcctgtctgctgccaggaacaagctgcccttcctgcccagcgagttcaggaacctgagcctggagtacctggacctgtttggaaacacctttgagcagcccaaggtgctgcctgtgatcaagctgcaggcccccctgaccctgctggagagcagcgcccggaccatcctgcacaacagaaccatctaccccaaggagatcaacgtgaacatgtgggagaccctgcccggccgcatcagcctgggctgcatgtatgactttgctgccagcaactggagcaagggccgcttcctgtacacctgctggaggggcggcatgtgcatcgtgacccacctggatgacagcaagaccttcatcaagaccaacttctccttctag

SEQ ID NO: 243056 - DNA, 1745 bp, Artificial Sequence
  derived and/or modified sequence
aaccaccgctgccagctgcgcgctcgggggaaaagacgttgcgcccccgccgactgccggtttcccgggcgcgagcccggatccaggtggtcagtcccggtacgcaaccacggcgagaacccggccctgctaagggagaagggaagccgtttcccgcgggcttcatacagacacggtgctaagacagcccgagtcgcggaccagtccaacaggcaggcagatcagtgggcagcccgcgtgcgcgaggaccccgatggcggcgccgggtggcgggaaggaggaagtttcaaagccagcttgacgtggttgtggccgttgggcgagatgaagctacactgtgaggtggaggtgatcagccggcacttgcccgccttggggcttaggaaccggggcaagggcgtccgagccgtgttgagcctctgtcagcagacttccaggagtcagccgccggtccgagccttcctgctcatctccaccctgaaggacaagcgcgggacccgctatgagctaagggagaacattgagcaattcttcaccaaatttgtagatgaggggaaagccactgttcggttaaaggagcctcctgtggatatctgtctaagtaaggccatttccagcagtttaaaaggtttcctttcagctatgagactggctcatagaggctgtaatgttgatacaccagtttcaacgctcacaccagtgaagacttcagaatttgaaaactttaaaactaaaatggttatcacatccaaaaaagactatcctctaagtaagaattttccatattccttggaacatcttcagacttcttactgtgggcttgtccgagttgatatgcgtatgctttgcttaaaaagccttaggaaattagacttgagtcacaaccatataaaaaagcttccagctacaattggagacctcatacaccttcaagaacttaacctgaatgacaatcacttggagtcatttagtgtagccttgtgtcattctacactccagaagtcacttcggagtttggacctcagcaagaacaaaatcaaggcactccctgtgcagttttgccagctccaggaacttaagaatttaaaacttgacgataatgaattgattcaatttccttgcaagataggacaactaataaaccttcgctttttgtcagcagctcgaaataagcttccatttttgcctagtgaatttagaaatttatcccttgaatacttggatctttttggaaatacttttgaacaaccaaaagtccttccagtaataaagctgcaagcaccattaactttattggaatcttctgcacgaaccatattacataataggattccatatggctctcatatcattccattccatctctgccaagatttggataccgcaaaaatttgtgtttgtggaagattctgtctgaactctttcattcaaggaactactaccatgaatctgcattctgttgcccacactgtggtcttagtagataatttgggtggtactgaagcacctattatctcttatttctgttctctaggctgttatgttaattcctctgatatgttaaagtaatgggtgagaccagaaaaagaaatttcaataacagatcagtttggggtgcatgtatgattttgcagcgtcaaattggagtaagggaagatttctgtatacttgctggagaggaggaatgtgtatagttactcatttagatgactccaaaacttttattaaaaccaattttagtttta

SEQ ID NO: 243057 - DNA, 1590 bp, Artificial Sequence
  derived and/or modified sequence
aaccaccgctgccagctgcgcgctcgggggaaaagacgttgcgcccccgccgactgccggtttcccgggcgcgagcccggatccaggtggtcagtcccggtacgcaaccacggcgagaacccggccctgctaagggagaagggaagccgtttcccgcgggcttcatacagacacggtgctaagacagcccgagtcgcggaccagtccaacaggcaggcagatcagtgggcagcccgcgtgcgcgaggaccccgatggcggcgccgggtggcgggaaggaggaagtttcaaagccagcttgacgtggttgtggccgttgggcgagatgaagctacactgtgaggtggaggtgatcagccggcacttgcccgccttggggcttaggaaccggggcaagggcgtccgagccgtgttgagcctctgtcagcagacttccaggagtcagccgccggtccgagccttcctgctcatctccaccctgaaggacaagcgcgggacccgctatgagctaagggagaacattgagcaattcttcaccaaatttgtagatgaggggaaagccactgttcggttaaaggagcctcctgtggatatctgtctaagtaagatggagtctcattctgtcacccaggttggagtgcagtgggaagagcttggttcactgcaacccacaggccatttccagcagtttaaaaggtttcctttcagctatgagactggccatagaggctgtaatgttgatacaccagtttcaacgctcacaccagtgaagacttcagaatttgaaaactttaaaactaaaatggttatcacatccaaaaaagactatcctctaagtaagaattttccatattccttggaacatcttcagacttcttactgtgggcttgtccgagttgatatgcgtatgctttgcttaaaaagccttaggaaattagacttgagtcacaaccatataaaaaagcttccagctacaattggagacctcatacaccttcaagaacttaacctgaatgacaatcacttggagtcatttagtgtagccttgtgtcattctacactccagaagtcacttcggagtttggacctcagcaagaacaaaatcaaggcactccctgtgcagttttgccagctccaggaacttaagaatttaaaacttgacgataatgaattgattcaatttccttgcaagataggacaactaataaaccttcgctttttgtcagcagctcgaaataagcttccatttttgcctagtgaatttagaaatttatcccttgaatacttggatctttttggaaatacttttgaacaaccaaaagtccttccagtaataaagctgcaagcaccattaactttattggaatcttctgcacgaaccatattacataatagaaccatctatccgaaagagattaatgtaaacatgtgggagacactccctggcagaatcagtttggggtgcatgtatgattttgcagcgtcaaattggagtaagggaagatttctgtatacttgctggagaggaggaatgtgtatagttactcatttagatgactccaaaacttttattaaaaccaattttagtttt

SEQ ID NO: 243058 - DNA, 1245 bp, Artificial Sequence
  derived and/or modified sequence
atgaagctgcactgcgaggtggaggtgatcagccggcacctgcccgctcttgggctcaggaaccggggcaagggcgttcgcgccgtgttgtccctctgtcagcagacaagccgcagccagccccccgtgagggcctttctgctgatttcaaccctcaaagataagaggggcactaggtacgagttgcgcgagaacatagagcaattcttcacaaagttcgtggacgaaggcaaggccacagttcgcctgaaggagcctccagtggatatctgcctgtctaaggctatatcctcctcactgaagggctttctcagcgccatgagactcgcccatcggggctgtaacgtggacacacccgttagtacactgacacctgtgaagaccagcgagttcgagaatttcaagactaaaatggtgattacatcaaaaaaggactacccactctctaagaatttcccctactctctggagcaccttcagacaagctactgcggcctggtccgggtggacatgcgcatgttgtgcctcaagtctctcaggaagctagatcttagccacaatcacattaagaagttgccagctaccatcggggaccttatccacctacaggagcttaatctgaacgacaaccacctcgaaagtttcagtgtggccctgtgtcactccactctccagaaaagcctcagatcactcgacctgtccaagaataaaattaaggcattgcctgttcagttttgccaactgcaggaactcaagaatctcaaactggacgataatgaacttatccagttcccctgtaaaatcggtcagctgatcaacttgcggtttttaagtgctgctcgaaacaagctcccctttctgcccagcgagttccgtaacctctccctagaatacctcgacttgttcggaaacacattcgagcaacctaaagtcctccctgtcataaagcttcaggctcctctgactcttctcgaatcgagcgcacgaacaatcctccacaaccgcattccatacggctctcacataatacccttccatctgtgtcaggatttggataccgctaagatttgtgtgtgcggaaggttttgcctcaattctttcatacagggaacaactaccatgaatttgcactctgtcgcgcacactgtcgtcctggtcgataacctgggaggcaccgaagcccccatcatatcttatttttgcagcctcggatgttacgtgaatagctccgatatgttgaaatag

SEQ ID NO: 243059 - DNA, 1269 bp, Artificial Sequence
  derived and/or modified sequence
atgaagctgcactgcgaggtggaggtgatcagccggcacctgcccgccctggggctgaggaatcgcggtaagggcgtccgtgcggtgctgagcctttgccaacagacatcaagaagccagcctccagtgcgggcttttctgctgattagcaccttaaaagacaagcgagggacacggtatgagttgcgggagaatattgagcaattcttcacaaaatttgtggatgagggaaaagcaaccgttcgcctgaaggaacccccggtggacatatgtttgagtaaaatggaatcccatagcgtcacacaggtgggcgtccaatgggaggagttgggcagcttacagcctactgggcattttcaacaattcaaacgctttcctttcagctatgaaactggtcaccgggggtgcaacgtcgatacccccgtctctactctgactcctgttaaaacatctgagtttgaaaacttcaagaccaagatggttatcacatccaaaaaggattatccactttccaaaaattttccctacagcctggaacatcttcaaacctcctactgcggcctcgtccgggtagatatgaggatgttgtgtttaaaatcattaagaaagcttgacctatcccacaaccacattaaaaagttacctgccaccattggggacctcatccacctgcaggaactgaacctgaacgacaatcatcttgaatcctttagtgtggccctctgtcactctaccctacagaaatccctgcgatccctggatttgtcaaagaacaagatcaaggctttgcccgttcaattctgtcagttgcaggaactgaagaatttgaagctggacgataatgagctgatccagtttccatgcaagattggtcaacttattaacttgcgctttttgtctgcagccaggaataaacttccctttctcccctctgagttccgcaacctttctctggagtacctcgatctctttggcaatacctttgaacagccaaaggtgctgccagtaataaaactccaggctccactcaccctgcttgaatccagtgctaggacgattctgcataaccggacgatatatcccaaggagatcaatgtcaacatgtgggaaacgctccctggacgcatatcgttggggtgcatgtacgactttgccgcttccaactggtccaagggcagattcctctatacctgctggaggggcggaatgtgcatcgtcactcacttagatgattcaaaaacattcataaaaacgaacttttcgttctag

SEQ ID NO: 243060 - DNA, 1245 bp, Artificial Sequence
  derived and/or modified sequence
atgaagctgcattgcgaagttgaggtcattagtaggcacctccccgcattggggctccgcaaccgcggaaaaggcgttagagcagtcctctctctgtgccagcagacaagtcgctcccagcctcctgtgcgggcattcctcctgatcagtaccctgaaggacaagaggggcactaggtacgagttgcgtgaaaacatcgaacagttttttacgaaattcgtagatgaaggtaaggctacagtgagactcaaagaaccacccgtggatatttgcctgtccaaggctatcagctcttccctgaaagggttcctgtctgccatgcgcctcgcccaccggggatgcaacgtggacactccagtgagcaccctcacaccggtgaagacaagcgagtttgaaaattttaaaacaaaaatggttataacaagcaagaaagattatccgctgtcgaaaaatttcccttactccttagagcacttgcaaacctcttactgtgggctcgtcagagtagatatgaggatgctgtgtttaaaatccctcagaaaactcgacctcagtcacaaccatatcaagaaactcccagccactatcggcgacttgattcatcttcaggagcttaatctgaacgataatcacttagaatcgttctcagttgctctgtgtcacagcaccctgcagaagagcctgcgaagtctggacctgtccaagaataagattaaggccctgcccgtgcagttctgtcagcttcaagagcttaagaatctgaaactggatgacaacgaacttatacagtttccttgcaagattggccagctgatcaacctccgcttcctttccgcagccaggaacaagcttcctttcctccccagtgagttcaggaacctctcactagaatatctggatctgttcgggaatacgtttgaacagccaaaagtccttcctgttattaagctacaggcacctctcaccctgctggagagcagtgcccgaaccattctccacaatcgaatcccttacggttcccacataattccctttcatctttgtcaggacttggacactgccaagatatgcgtctgtggccgattctgtctgaactcattcatccaggggacaaccaccatgaacttacatagtgtggcacacaccgtggtgctggtggacaacctgggtgggaccgaggcaccgatcatcagttatttttgttccctgggatgctatgtgaattccagtgacatgctgaaatag

SEQ ID NO: 243061 - DNA, 1269 bp, Artificial Sequence
  derived and/or modified sequence
atgaagttgcactgtgaggttgaagtgattagccgacatctccctgccctgggcctgcggaaccggggaaaaggggtccgggctgtgttatctctgtgccagcagacgagcagaagtcaaccacccgtgcgcgcatttcttcttatctctacacttaaagataagcgaggcactaggtatgagttgagagaaaatatcgaacaattttttacaaagttcgttgatgaaggaaaggcgaccgttcgcctgaaagagcctcccgtggatatctgtctgtccaagatggaaagtcatagcgtaacgcaggtgggagtacaatgggaagaactgggctcactacagccaaccgggcatttccagcagtttaaaagatttccgtttagctatgagactggccacaggggctgcaatgtagatactcccgtgagcactctgacccctgtgaagacgtccgagtttgaaaattttaagaccaaaatggttatcacttctaaaaaggactacccattgagtaagaattttccttattccctagaacacctgcagactagttattgtggcctagtgagagtcgatatgcggatgctgtgcctgaaatccctgagaaagctcgacctgtcccataatcatataaagaagctcccagccaccatcggtgatctcattcatttgcaagagctgaatcttaacgacaatcatctggagtccttcagcgtcgccctgtgtcactctaccttgcagaaaagcctgagatcacttgatctgagtaaaaacaaaatcaaggctctcccggtccagttctgccagctgcaggaattgaaaaacctgaaactcgacgataatgagctcatacagtttccatgtaagattggccagctgatcaacctgagatttttatcagcggctaggaataaacttccattcttgccgagcgagttccgtaacctttccctcgagtatctcgatctgttcggaaataccttcgaacagcctaaagtgcttccagtcattaagctgcaggctcccctgacgttgcttgaaagctccgcgagaactatcctgcataaccgtaccatatatcctaaagaaataaatgtgaacatgtgggagacattgcctggaaggatttcacttggctgcatgtatgactttgctgctagtaattggagcaaaggtcgttttctgtatacctgttggcggggaggaatgtgcatcgtgacgcaccttgatgatagcaagacgtttataaagacaaacttctctttttag

SEQ ID NO: 243062 - protein, 707 aa, Artificial Sequence
  derived and/or modified sequence
MAAEALAAEAVASRLERQEEDIRWLWSEVERLRDEQLNAPYSCQAEGPCLTREVAQLRAENCDLRHRLCSLRLCLAEERSRQATLESAELEAAQEAGAQPPPSQSQDKDMKKKKMKESEADSEVKHQPIFIKERLKLFEILKKDHQLLLAIYGKKGDTSNIITVRVADGQTVQGEVWKTTPYQVAAEISQELAESTVIAKVNGELWDLDRPLEGDSSLELLTFDNEKVNTATTTVYRCGPLIDLCKGPHVRHTGKIKTIKIFKNSSTYWEGNPEMETLQRIYGISFPDNKMMRDWEKFQEEAKNRDHRKIGKEQELFFFHDLSPGSCFFLPRGAFIYNTLTDFIREEYHKRDFTEVLSPNMYNSKLWEASGHWQHYSENMFTFEIEKDTFALKPMNCPGHCLMFAHRPRSWREMPIRFADFGVLHRNELSGTLSGLTRVRRFQQDDAHIFCTVEQIEEEIKGCLQFLQSVYSTFGFSFQLNLSTRPENFLGEIEMWNEAEKQLQNSLMDFGEPWKMNPGDGAFYGPKIDIKIKDAIGRYHQCATIQLDFQLPIRFNLTYVSKDGDDKKRPVIIHRAILGSVERMIAILSENYGGKWPFWLSPRQVMVIPVGPTCEKYALQVSSEFFEEGFMADVDLDHSCTLNKKIRNAQLAQYNFILVVGEKEKIDNAVNVRTRDNKIHGEILVTSAIDKLKNLRKTRTLNAEEAF

SEQ ID NO: 243063 - protein, 802 aa, Artificial Sequence
  derived and/or modified sequence
MAAEALAAEAVASRLERQEEDIRWLWSEVERLRDEQLNAPYSCQAEGPCLTREVAQLRAENCDLRHRLCSLRLCLAEERSRQATLESAELEAAQEAGAQPPPSQSQDKDMKKKKMKESEADSEVKHQPIFIKERLKLFEILKKDHQLLLAIYGKKGDTSNIITVRVADGQTVQGEVWKTTPYQVAAEISQELAESTVIAKVNGELWDLDRPLEGDSSLELLTFDNEEAQAVYWHSSAHILGEAMELYYGGHLCYGPPIENGFYYDMFIEDRAVSSTELSALENICKAIIKEKQPFERLEVSKEILLEMFKYNKFKCRILNEKVNTATTTVYRCGPLIDLCKGPHVRHTGKIKTIKIFKNSSTYWEGNPEMETLQRIYGISFPDNKMMRDWEKFQEEAKNRDHRKIGKEQELFFFHDLSPGSCFFLPRGAFIYNTLTDFIREEYHKRDFTEVLSPNMYNSKLWEASGHWQHYSENMFTFEIEKDTFALKPMNCPGHCLMFAHRPRSWREMPIRFADFGVLHRNELSGTLSGLTRVRRFQQDDAHIFCTVEQIEEEIKGCLQFLQSVYSTFGFSFQLNLSTRPENFLGEIEMWNEAEKQLQNSLMDFGEPWKMNPGDGAFYGPKIDIKIKDAIGRYHQCATIQLDFQLPIRFNLTYVSKDGDDKKRPVIIHRAILGSVERMIAILSENYGGKWPFWLSPRQVMVIPVGPTCEKYALQVSSEFFEEGFMADVDLDHSCTLNKKIRNAQLAQYNFILVVGEKEKIDNAVNVRTRDNKIHGEILVTSAIDKLKNLRKTRTLNAEEAF

SEQ ID NO: 243064 - protein, 766 aa, Artificial Sequence
  derived and/or modified sequence
MAAEALAAEAVASRLERQEEDIRWLWSEVERLRDEQLNAPYSCQAEGPCLTREVAQLRAENCDLRHRLCSLRLCLAEERSRQATLESAELEAAQEAGAQPPPSQSQDKDMKKKKMKESEADSEVKHQPIFIKERLKLFEILKKDHQLLLAIYGKKGDTSNIITVRVADGQTVQGEVWKTTPYQVAAEISQELAESTVIAKVNGELWDLDRPLEGDSSLELLTFDNEEAQAVYWHSSAHILGEAMELYYGGHLCYGPPIENGFYYDMFIEDRAVSSTELSALENICKAIIKEKQPFERLEVSKEILLEMFKYNKFKCRILNEKVNTATTTVYRCGPLIDLCKGPHVRHTGKIKTIKIFKNSSTYWEGNPEMETLQRIYGISFPDNKMMRDWEKFQEEAKNRDHRKIGKEQELFFFHDLSPGSCFFLPRGAFIYNTLTDFIREEYHKRDFTEVLSPNMYNSKLWEASGHWQHYSENMFTFEIEKDTFALKPMNCPGHCLMFAHRPRSWREMPIRFADFGVLHRNELSGTLSGLTRVRRFQQDDAHIFCTVEQIEEEIKGCLQFLQSVYSTFGFSFQLNLSTRPENFLGEIEMWNEAEKQLQNSLMDFGEPWKMNPGDGAFYGPKIDIKIKDAIGRYHQCATIQLDFQLPIRFNLTYVSKDGDDKKRPVIIHRAILGSVERMIAILSENYGGKWPFWLSPRQVMVIPVGPTCEKYALQVSSEFFEEGFMADVDLDHSCTLNKKIRNAQLAQYNFILDRFLPSVWQEAWL

SEQ ID NO: 243065 - DNA, 2124 bp, Artificial Sequence
  derived and/or modified sequence
atggccgccgaggccctggccgccgaggccgtggccagcagactggagagacaggaggaggacatcagatggctgtggagcgaggtggagagactgagagacgagcagctgaacgccccctacagctgccaggccgagggcccctgcctgaccagagaggtggcccagctgagagccgagaactgcgacctgagacacagactgtgcagcctgagactgtgcctggccgaggagagaagcagacaggccaccctggagagcgccgagctggaggccgcccaggaggccggcgcccagcccccccccagccagagccaggacaaggacatgaagaagaagaagatgaaggagagcgaggccgacagcgaggtgaagcaccagcccatcttcatcaaggagagactgaagctgttcgagatcctgaagaaggaccaccagctgctgctggccatctacggcaagaagggcgacaccagcaacatcatcaccgtgagagtggccgacggccagaccgtgcagggcgaggtgtggaagaccaccccctaccaggtggccgccgagatcagccaggagctggccgagagcaccgtgatcgccaaggtgaacggcgagctgtgggacctggacagacccctggagggcgacagcagcctggagctgctgaccttcgacaacgagaaggtgaacaccgccaccaccaccgtgtacagatgcggccccctgatcgacctgtgcaagggcccccacgtgagacacaccggcaagatcaagaccatcaagatcttcaagaacagcagcacctactgggagggcaaccccgagatggagaccctgcagagaatctacggcatcagcttccccgacaacaagatgatgagagactgggagaagttccaggaggaggccaagaacagagaccacagaaagatcggcaaggagcaggagctgttcttcttccacgacctgagccccggcagctgcttcttcctgcccagaggcgccttcatctacaacaccctgaccgacttcatcagagaggagtaccacaagagagacttcaccgaggtgctgagccccaacatgtacaacagcaagctgtgggaggccagcggccactggcagcactacagcgagaacatgttcaccttcgagatcgagaaggacaccttcgccctgaagcccatgaactgccccggccactgcctgatgttcgcccacagacccagaagctggagagagatgcccatcagattcgccgacttcggcgtgctgcacagaaacgagctgagcggcaccctgagcggcctgaccagagtgagaagattccagcaggacgacgcccacatcttctgcaccgtggagcagatcgaggaggagatcaagggctgcctgcagttcctgcagagcgtgtacagcaccttcggcttcagcttccagctgaacctgagcaccagacccgagaacttcctgggcgagatcgagatgtggaacgaggccgagaagcagctgcagaacagcctgatggacttcggcgagccctggaagatgaaccccggcgacggcgccttctacggccccaagatcgacatcaagatcaaggacgccatcggcagataccaccagtgcgccaccatccagctggacttccagctgcccatcagattcaacctgacctacgtgagcaaggacggcgacgacaagaagagacccgtgatcatccacagagccatcctgggcagcgtggagagaatgatcgccatcctgagcgagaactacggcggcaagtggcccttctggctgagccccagacaggtgatggtgatccccgtgggccccacctgcgagaagtacgccctgcaggtgagcagcgagttcttcgaggagggcttcatggccgacgtggacctggaccacagctgcaccctgaacaagaagatcagaaacgcccagctggcccagtacaacttcatcctggtggtgggcgagaaggagaagatcgacaacgccgtgaacgtgagaaccagagacaacaagatccacggcgagatcctggtgaccagcgccatcgacaagctgaagaacctgagaaagaccagaaccctgaacgccgaggaggccttctag

SEQ ID NO: 243066 - DNA, 2409 bp, Artificial Sequence
  derived and/or modified sequence
atggccgccgaggccctggccgccgaggccgtggccagcagactggagagacaggaggaggacatcagatggctgtggagcgaggtggagagactgagagacgagcagctgaacgccccctacagctgccaggccgagggcccctgcctgaccagagaggtggcccagctgagagccgagaactgcgacctgagacacagactgtgcagcctgagactgtgcctggccgaggagagaagcagacaggccaccctggagagcgccgagctggaggccgcccaggaggccggcgcccagcccccccccagccagagccaggacaaggacatgaagaagaagaagatgaaggagagcgaggccgacagcgaggtgaagcaccagcccatcttcatcaaggagagactgaagctgttcgagatcctgaagaaggaccaccagctgctgctggccatctacggcaagaagggcgacaccagcaacatcatcaccgtgagagtggccgacggccagaccgtgcagggcgaggtgtggaagaccaccccctaccaggtggccgccgagatcagccaggagctggccgagagcaccgtgatcgccaaggtgaacggcgagctgtgggacctggacagacccctggagggcgacagcagcctggagctgctgaccttcgacaacgaggaggcccaggccgtgtactggcacagcagcgcccacatcctgggcgaggccatggagctgtactacggcggccacctgtgctacggcccccccatcgagaacggcttctactacgacatgttcatcgaggacagagccgtgagcagcaccgagctgagcgccctggagaacatctgcaaggccatcatcaaggagaagcagcccttcgagagactggaggtgagcaaggagatcctgctggagatgttcaagtacaacaagttcaagtgcagaatcctgaacgagaaggtgaacaccgccaccaccaccgtgtacagatgcggccccctgatcgacctgtgcaagggcccccacgtgagacacaccggcaagatcaagaccatcaagatcttcaagaacagcagcacctactgggagggcaaccccgagatggagaccctgcagagaatctacggcatcagcttccccgacaacaagatgatgagagactgggagaagttccaggaggaggccaagaacagagaccacagaaagatcggcaaggagcaggagctgttcttcttccacgacctgagccccggcagctgcttcttcctgcccagaggcgccttcatctacaacaccctgaccgacttcatcagagaggagtaccacaagagagacttcaccgaggtgctgagccccaacatgtacaacagcaagctgtgggaggccagcggccactggcagcactacagcgagaacatgttcaccttcgagatcgagaaggacaccttcgccctgaagcccatgaactgccccggccactgcctgatgttcgcccacagacccagaagctggagagagatgcccatcagattcgccgacttcggcgtgctgcacagaaacgagctgagcggcaccctgagcggcctgaccagagtgagaagattccagcaggacgacgcccacatcttctgcaccgtggagcagatcgaggaggagatcaagggctgcctgcagttcctgcagagcgtgtacagcaccttcggcttcagcttccagctgaacctgagcaccagacccgagaacttcctgggcgagatcgagatgtggaacgaggccgagaagcagctgcagaacagcctgatggacttcggcgagccctggaagatgaaccccggcgacggcgccttctacggccccaagatcgacatcaagatcaaggacgccatcggcagataccaccagtgcgccaccatccagctggacttccagctgcccatcagattcaacctgacctacgtgagcaaggacggcgacgacaagaagagacccgtgatcatccacagagccatcctgggcagcgtggagagaatgatcgccatcctgagcgagaactacggcggcaagtggcccttctggctgagccccagacaggtgatggtgatccccgtgggccccacctgcgagaagtacgccctgcaggtgagcagcgagttcttcgaggagggcttcatggccgacgtggacctggaccacagctgcaccctgaacaagaagatcagaaacgcccagctggcccagtacaacttcatcctggtggtgggcgagaaggagaagatcgacaacgccgtgaacgtgagaaccagagacaacaagatccacggcgagatcctggtgaccagcgccatcgacaagctgaagaacctgagaaagaccagaaccctgaacgccgaggaggccttctag

SEQ ID NO: 243067 - DNA, 3008 bp, Artificial Sequence
  derived and/or modified sequence
ccctcgccgcagtcgcgggcaccccgctcggcgtcggtgcctgagggaggccgcgatggcggccgaggccctggcggcggaggccgtggcgtcgcgcctggagcggcaggaggaggacatccgctggctgtggtcggaggtcgagcgcctgagggacgagcagctgaacgcgccctacagctgccaggcggaggggccgtgcctcacgcgggaggtggcgcagctccgggccgagaactgcgacctgcgccaccgcctgtgcagcctgcggctgtgcctcgccgaggagcggagccgccaggccacgctggagagcgcggagctagaggcggcgcaggaggccggcgcacagcctcctcctagtcaaagccaagacaaggacatgaaaaagaagaaaatgaaggaaagcgaggctgacagcgaggtgaagcatcaaccaattttcataaaagaaagattgaagctttttgaaatactgaagaaagaccatcagctcttacttgccatttatggaaaaaagggggatacaagcaacatcatcacagtaagagtggctgatgggcaaacagtgcaaggggaagtctggaaaacaacgccttaccaagtggctgctgaaattagtcaggaactggctgaaagcacggtaatagccaaagtcaatggtgaactgtgggacctggaccgcccattggaaggggactcttctctagagctgcttacatttgataatgagaaagttaacactgcaactaccaccgtgtacaggtgcggtccattaattgacctttgcaaaggtccacatgtaagacacactggaaaaattaaaaccatcaaaatttttaagaattcctcaacatattgggagggcaatccggaaatggaaacattgcagaggatctatggaatatcctttcctgataacaagatgatgagagactgggaaaagttccaagaggaagcaaagaaccgagatcacaggaagatcgggaaggaacaagaacttttctttttccacgatttgagtcctggaagctgttttttccttcccagaggagccttcatttataatacgcttacagatttcatacgagaggaatatcacaaacgggacttcacggaggtgctctctcccaatatgtacaacagtaaactctgggaagcctcaggccactggcagcattacagcgagaacatgtttacctttgagattgaaaaggacacttttgccctcaaacccatgaattgtccagggcactgtctaatgtttgcccatcgtccacgatcttggagggaaatgcctattagatttgctgattttggagttctgcatagaaatgaactgtcggggactctcagcggcttgaccagagtgaggcgcttccagcaggacgatgctcacattttttgcacagtggagcagattgaagaagaaataaaggggtgtttgcagtttttgcaatctgtttactcaacatttggcttctcctttcaattaaacctgtcaacaaggccggaaaacttcctaggagagattgagatgtggaatgaggctgagaagcaactgcagaacagcttgatggactttggagaaccgtggaaaatgaacccaggagatggagcattttatggccctaaaattgacataaaaatcaaggatgctattggcagataccatcaatgtgctacaattcagctggacttccaactgcctattagatttaatctcacatatgttagtaaggatggggatgataagaagagacctgtgatcattcatcgagccattttgggatcagtggaaagaatgatagccattctttcagaaaactatggcggaaaatggcctttctggctatctcctcgtcaggtgatggtcatccctgtggggccaacttgtgaaaaatatgcacttcaggtatccagtgaattttttgaagaaggatttatggctgacgttgacttggatcacagttgtacactaaataagaaaatacgaaatgcacagctggctcagtataattttattttggtggttggagaaaaggaaaagatagataatgctgtaaacgtgcgaacaagagacaacaaaattcatggagagattttagtaacttctgccattgataaactgaagaatctcaggaagacacggacactcaatgctgaggaggccttttgaagtccttccctgatatttgcttctgtgtaactttgttttgacccttaaaaatgtatttttcttaacatgttagtacttctacgactttggagccactgatgggtccactcatggcctcagctgagaaaggagacgatgaacgtgtagctgacatgcacgaagtttaatttactcatgtccacgggggacgtttagagggcacgtgggaaattttccagcaatcaatgccttgagaaacttaaatggggaaatattattcatcgagaaagtgaaacaaaacactaggaaatgattatgaaatgttagtgattttcaaaagatgggcttcaaataaaagtctgcagagttttttttaaataggagggaaaatcttattttctaatatgtctcaggtatttttatgacttctactaaaattcacactgaaactttatcttctaaactggaatcattacttaattttaactaaccaacaaccacaaaagcagcagctactgctaaatattggattactgacaaaggaattcagttttgtggaatctggtgtttgcactataggttaagagttgccatttaaatgtttcttattcataattaggttttgttccgctttagaaaaaaataaattcccaaatgaattgcatcagtgtttccagcgtttcagctgtgggcttctaccaccactaagccgctcacctagagttgttacttttttgatgggatgacattccatggatttatgtactgaaatggatttcagattttaaagagaggaatgctctacgtgctcagaactgaattaaaatggcattatgtcaatagagaattc

SEQ ID NO: 243068 - DNA, 3610 bp, Artificial Sequence
  derived and/or modified sequence
ctgcagggtatctggcctaggccccgcccctccccgcccagcgccccgcccctgcaacgtgtaggcctcggctccaacgaggccccatggctccgtccccgccccatcgccccgcccctcccgggagccctgtcttctgccgtgcgctgagtgtccgcgtcgccctcgccgcagtcgcgggcaccccgctcggcgtcggtgcctgagggaggccgcgatggcggccgaggccctggcggcggaggccgtggcgtcgcgcctggagcggcaggaggaggacatccgctggctgtggtcggaggtcgagcgcctgagggacgagcagctgaacgcgccctacagctgccaggcggaggggccgtgcctcacgcgggaggtggcgcagctccgggccgagaactgcgacctgcgccaccgcctgtgcagcctgcggctgtgcctcgccgaggagcggagccgccaggccacgctggagagcgcggagctagaggcggcgcaggaggccggcgcacagcctcctcctagtcaaagccaagacaaggacatgaaaaagaagaaaatgaaggaaagcgaggctgacagcgaggtgaagcatcaaccaattttcataaaagaaagattgaagctttttgaaatactgaagaaagaccatcagctcttacttgccatttatggaaaaaagggggatacaagcaacatcatcacagtaagagtggctgatgggcaaacagtgcaaggggaagtctggaaaacaacgccttaccaagtggctgctgaaattagtcaggaactggctgaaagcacggtaatagccaaagtcaatggtgaactgtgggacctggaccgcccattggaaggggactcttctctagagctgcttacatttgataatgaggaagctcaagctgtgtactggcactccagtgctcacattcttggggaggccatggagctttactatggaggccacctgtgctacggtccgcccattgaaaatggattttattatgacatgttcattgaagacagagcagtgtccagcacagaattgtcagccctggagaatatatgtaaagccatcataaaagaaaagcaaccttttgaaagactagaagtcagcaaggaaatcctcctggaaatgtttaagtacaataaatttaaatgccgcattctgaatgagaaagttaacactgcaactaccaccgtgtacaggtgcggtccattaattgacctttgcaaaggtccacatgtaagacacactggaaaaattaaaaccatcaaaatttttaagaattcctcaacatattgggagggcaatccggaaatggaaacattgcagaggatctatggaatatcctttcctgataacaagatgatgagagactgggaaaagttccaagaggaagcaaagaaccgagatcacaggaagatcgggaaggaacaagaacttttctttttccacgatttgagtcctggaagctgttttttccttcccagaggagccttcatttataatacgcttacagatttcatacgagaggaatatcacaaacgggacttcacggaggtgctctctcccaatatgtacaacagtaaactctgggaagcctcaggccactggcagcattacagcgagaacatgtttacctttgagattgaaaaggacacttttgccctcaaacccatgaattgtccagggcactgtctaatgtttgcccatcgtccacgatcttggagggaaatgcctattagatttgctgattttggagttctgcatagaaatgaactgtcggggactctcagcggcttgaccagagtgaggcgcttccagcaggacgatgctcacattttttgcacagtggagcagattgaagaagaaataaaggggtgtttgcagtttttgcaatctgtttactcaacatttggcttctcctttcaattaaacctgtcaacaaggccggaaaacttcctaggagagattgagatgtggaatgaggctgagaagcaactgcagaacagcttgatggactttggagaaccgtggaaaatgaacccaggagatggagcattttatggccctaaaattgacataaaaatcaaggatgctattggcagataccatcaatgtgctacaattcagctggacttccaactgcctattagatttaatctcacatatgttagtaaggatggggatgataagaagagacctgtgatcattcatcgagccattttgggatcagtggaaagaatgatagccattctttcagaaaactatggcggaaaatggcctttctggctatctcctcgtcaggtgatggtcatccctgtggggccaacttgtgaaaaatatgcacttcaggtatccagtgaattttttgaagaaggatttatggctgacgttgacttggatcacagttgtacactaaataagaaaatacgaaatgcacagctggctcagtataattttattttggtggttggagaaaaggaaaagatagataatgctgtaaacgtgcgaacaagagacaacaaaattcatggagagattttagtaacttctgccattgataaactgaagaatctcaggaagacacggacactcaatgctgaggaggccttttgaagtccttccctgatatttgcttctgtgtaactttgttttgacccttaaaaatgtatttttcttaacatgttagtacttctacgactttggagccactgatgggtccactcatggcctcagctgagaaaggagacgatgaacgtgtagctgacatgcacgaagtttaatttactcatgtccacgggggacgtttagagggcacgtgggaaattttccagcaatcaatgccttgagaaacttaaatggggaaatattattcatcgagaaagtgaaacaaaacactaggaaatgattatgaaatgttagtgattttcaaaagatgggcttcaaataaaagtctgcagagttttttttaaataggagggaaaatcttattttctaatatgtctcaggtatttttatgacttctactaaaattcacactgaaactttatcttctaaactggaatcattacttaattttaactaaccaacaaccacaaaagcagcagctactgctaaatattggattactgacaaaggaattcagttttgtggaatctggtgtttgcactataggttaagagttgccatttaaatgtttcttattcataattaggttttgttccgctttagaaaaaaataaattcccaaatgaattgcatcagtgtttccagcgtttcagctgtgggcttctaccaccactaagccgctcacctagagttgttacttttttgatgggatgacattccatggatttatgtactgaaatggatttcagattttaaagagaggaatgctctacgtgctcagaactgaattaaaatggcattatgtcaatagagaattcagctaccaaacaagaagtattgtttattttgcgatatgctgtgaaattcaaaagaaatgtaagaaataatctcttttcaatatactgatcatttagttaacttcctgagggatgtgaacagtgaaacagttggcaaacaaaacaatatatatcag

SEQ ID NO: 243069 - DNA, 2124 bp, Artificial Sequence
  derived and/or modified sequence
atggctgccgaagccctcgcagccgaggctgtggcctcaagactggaacggcaggaagaggatatcaggtggctgtggagtgaggtggagcgtctaagggacgaacagcttaacgccccgtattcctgtcaggctgaaggtccctgcttgacacgggaagtggcgcagctcagagcggaaaattgcgacctccgccaccggctgtgtagtttgcggttatgcctggccgaggaacggtccagacaagctacgctcgagtcagccgaactggaggccgcccaggaggcaggagcccagccccctccatctcaatcacaggataaggatatgaagaagaagaagatgaaagagagcgaggctgatagcgaggttaaacatcaacccatatttattaaggaacgcctcaaactcttcgaaatcctgaagaaagatcatcagctgctccttgcaatctatggcaaaaagggagatacctcaaatattattactgtgagggtggccgacggacaaactgtacagggtgaagtgtggaaaaccaccccttaccaggtggcggcggagatctcacaagagctagccgaaagcacagtcatcgcaaaggtgaacggcgaactctgggatttggacagacctctggagggggacagttccctggagctgttgacctttgataacgagaaggtcaacacagccaccactactgtgtacagatgcggaccactcatagatctttgcaagggccctcatgtcaggcatacaggtaaaatcaaaactatcaaaatattcaagaattcctcaacttattgggaggggaacccagaaatggaaactcttcagcggatctatggtatttcattcccggataacaaaatgatgcgtgactgggagaagttccaagaggaagctaaaaatcgagaccacagaaaaatcggtaaagagcaggagctattcttttttcatgaccttagcccaggttcctgcttcttcctccctagaggcgctttcatctacaacaccctaacagatttcatcagagaggaatatcacaagcgcgacttcacagaagtgctgagcccgaatatgtataattctaagctgtgggaggccagtggacactggcagcactatagtgagaacatgttcacctttgaaatcgagaaggataccttcgccctcaagcctatgaattgccctggccattgcctaatgttcgcacacaggcccagaagctggagagaaatgcccatccgcttcgctgattttggagttctccatcggaacgagctgtccggcactttgtccggactgacgagagtgcggcgcttccagcaggacgacgcacacattttttgcactgtcgagcagatcgaggaggagattaaaggctgtttgcagtttctgcaatctgtgtattccacgtttggattcagttttcaattgaacctctccacccgcccagagaattttctgggagagattgaaatgtggaacgaggcagaaaagcagcttcaaaatagcctgatggatttcggcgaaccatggaaaatgaatccaggtgatggcgcattttatggtccgaaaatcgatataaaaatcaaagacgccatcggtaggtatcaccagtgtgccaccattcagcttgacttccaactgcccatccggttcaacctcacttacgtgagtaaggatggcgacgataagaaacggcccgttattatacatcgagctatcctcggctcagtggagcgcatgatagctatcctgagcgagaactacggagggaaatggcctttttggctgagcccccgccaggtgatggtgatccctgtgggccctacatgcgaaaagtacgccctgcaagtgagtagcgagttctttgaagaggggttcatggccgacgttgacttagaccactcgtgcaccctaaacaagaaaatcaggaacgcccagctggctcagtataacttcattctcgtggtgggcgaaaaggaaaagattgacaatgccgtgaacgtgaggacgagagacaacaagatacacggggagatcctcgttacctccgcaattgacaagctgaagaatctgagaaaaaccaggacattaaacgctgaggaggccttttag

SEQ ID NO: 243070 - DNA, 2409 bp, Artificial Sequence
  derived and/or modified sequence
atggcggcggaggccttagcggcggaggcagtagctagccgtctggagcggcaggaggaagacattcgttggctgtggagcgaggtggagagattgcgggatgaacagttgaacgcaccctatagctgtcaggcggaaggtccctgcctcacccgggaggtggctcaactgagagccgagaattgcgatctgcgacacaggctttgtagtctgaggctgtgcctagctgaggaaaggtccaggcaggcaacccttgagagcgcagagctggaagccgcccaggaggctggcgcacagccaccaccatcccagagccaggataaggacatgaagaaaaaaaagatgaaagagtccgaagccgactccgaagtcaagcaccagccaatttttataaaggagcgactgaagttgtttgagattctgaaaaaagatcatcagctccttctggccatctatggtaagaagggggacacatcaaatattatcaccgtaagggtggcagacggtcagacggtgcagggtgaggtgtggaagacaaccccgtatcaggtggccgcggagatttctcaggagctagcggagagtaccgtcattgcaaaggtcaacggagaattgtgggacctggacaggccgctggaaggcgatagtagtctggagttgcttacctttgataacgaagaggcacaggccgtgtactggcactcctcggctcacatcttaggagaggctatggagctctattacggcgggcacctgtgttatggtccgcctattgaaaacggattttattacgacatgtttattgaagatcgagcggtgtcatcgactgaactgagcgcgctggagaacatctgcaaggcaatcatcaaggagaagcagcccttcgaacgcctggaggtgagcaaggagattctgttggaaatgtttaagtataataagttcaaatgcaggatcctgaacgagaaggttaacaccgcaacgactactgtgtaccgctgcggtccccttattgacctctgcaaaggcccacacgttcggcacaccgggaagataaaaaccatcaagatattcaagaatagctccacctactgggaaggaaatcccgaaatggaaactctgcagcggatatacggtatcagttttcctgataacaaaatgatgagggactgggaaaagttccaagaggaggcaaagaatagggatcatcgtaagattgggaaagaacaggagctcttttttttccacgacctctcacctggaagctgcttctttctcccgcggggagccttcatttataacactttgaccgatttcatcagggaggaatatcacaagagggactttaccgaggttcttagcccaaacatgtataattcaaagctgtgggaagcctctggtcactggcagcattatagtgagaacatgtttacgttcgaaatcgagaaggacacctttgcattgaaaccaatgaactgcccgggccactgtctgatgtttgcccatcgcccacgctcgtggcgcgagatgcccatcagatttgccgactttggagtccttcatagaaatgaactgtctgggaccttgtcgggattaaccagagtccggaggtttcagcaggatgacgcccatatattctgcacggtggaacaaattgaagaagaaattaaaggatgcttgcagtttctccagagcgtgtactccacattcggattctcctttcagctgaatctgagcacccgtccagaaaatttcctcggagaaattgaaatgtggaacgaggcggaaaaacagctgcagaactccctgatggactttggagaaccctggaaaatgaatccaggggatggtgctttctacgggccgaaaattgacatcaagataaaggatgccatcgggagataccatcagtgtgctacaatccagctcgatttccagctgcccattcgattcaatcttacatacgtgagtaaggatggggacgataagaagcggcccgtgatcattcatcgagcaatcctgggtagcgttgagaggatgattgccattctgagcgaaaactatggaggaaaatggcccttctggctctcaccccgacaggttatggttattcccgtcggtcctacgtgtgagaagtatgcactgcaggtaagctctgaattcttcgaggagggatttatggccgatgtcgacctggaccattcctgcacactgaacaagaaaatcagaaacgcccagctggcccagtataacttcattcttgtcgtgggggaaaaagaaaagatcgataacgccgttaatgtgcgaaccagagacaataagatccacggagagatcctggtaactagcgcaattgataagttaaaaaacctgcggaagactcggactttgaacgctgaggaggcgttctag

SEQ ID NO: 243071 - DNA, 2124 bp, Artificial Sequence
  derived and/or modified sequence
atggctgctgaggccctggccgctgaggccgtggccagccggctggagcggcaggaggaggacatccgctggctgtggagcgaggtggagcggctgagagatgagcagctgaatgccccctacagctgccaggccgagggcccctgcctgacccgggaggtggcccagctgcgggcagagaactgtgacctgcggcaccggctgtgcagcctgcggctgtgcctggccgaggagaggagccggcaggccaccctggagagcgctgagctggaggccgcccaggaggccggggcccagcccccacccagccagagccaggacaaggacatgaagaagaagaagatgaaggagagcgaggccgacagcgaggtgaagcaccagcccatcttcatcaaggagcggctgaagctgtttgagatcctgaagaaggaccaccagctgctgctggccatctacggcaagaagggggacaccagcaacatcatcaccgtgcgggtggctgatggccagacagtgcagggcgaggtgtggaagaccaccccctaccaggtggccgctgagatcagccaggagctggccgagagcaccgtcatcgccaaggtgaatggagagctgtgggacctggaccggcccctggagggggacagcagcctggagctgctgacctttgacaatgagaaggtgaacacagccaccaccaccgtgtaccgctgtggccccctgattgacctgtgcaagggcccccacgtgcgccacacaggcaagatcaagaccatcaagatcttcaagaacagcagcacctactgggagggcaaccctgagatggagaccctgcagaggatctacggcatctccttcccagacaacaagatgatgagggactgggagaagttccaggaggaggccaagaacagagaccacaggaagattggcaaggagcaggagctgttcttcttccatgacctgagccctggcagctgcttcttcctgcccaggggggccttcatctacaacaccctgacagacttcatccgggaggagtaccacaagagggacttcacagaggtgctgagccccaacatgtacaacagcaagctgtgggaggccagcggccactggcagcactacagcgagaacatgttcacctttgaaattgagaaggacacctttgccctgaagcccatgaactgccccggccactgcctgatgtttgcccaccggcccaggtcctggagggagatgcccatccgctttgctgactttggagtgctgcacagaaatgagctgagcggcaccctgagcggcctgaccagggtgcggcgcttccagcaggatgatgcccacatcttctgcaccgtggagcagatcgaggaggagatcaagggctgcctgcagttcctgcagagcgtgtacagcaccttcggcttctccttccagctgaacctgagcaccaggcctgagaacttcctgggggagattgagatgtggaatgaagctgagaagcagctgcagaacagcctgatggactttggagagccctggaagatgaaccctggagatggagccttctacggccccaagattgacatcaagatcaaggatgccatcggccgctaccaccagtgtgccaccatccagctggacttccagctgcccatccgcttcaacctgacctacgtgtccaaggatggagatgacaagaagaggcctgtgatcatccaccgggccatcctgggctctgtggagaggatgattgccatcctgtctgagaactacggcggcaagtggcccttctggctgagcccccggcaggtgatggtgattcctgtgggccccacctgtgagaagtatgccctgcaggtgtcctctgagttctttgaggagggcttcatggctgatgtggacctggaccacagctgcaccctgaacaagaagatcagaaatgcccagctggcccagtacaacttcatcctggtggtgggggagaaggagaagattgacaatgctgtgaatgtgaggacccgggacaacaagatccacggggagatcctggtgaccagcgccatcgacaagctgaagaacctgaggaagaccaggaccctgaatgctgaggaggccttctag

SEQ ID NO: 243072 - DNA, 2409 bp, Artificial Sequence
  derived and/or modified sequence
atggctgctgaggccctggccgctgaggccgtggccagccggctggagcggcaggaggaggacatccgctggctgtggagcgaggtggagcggctgagagatgagcagctgaatgccccctacagctgccaggccgagggcccctgcctgacccgggaggtggcccagctgcgggcagagaactgtgacctgcggcaccggctgtgcagcctgcggctgtgcctggccgaggagaggagccggcaggccaccctggagagcgctgagctggaggccgcccaggaggccggggcccagcccccacccagccagagccaggacaaggacatgaagaagaagaagatgaaggagagcgaggccgacagcgaggtgaagcaccagcccatcttcatcaaggagcggctgaagctgtttgagatcctgaagaaggaccaccagctgctgctggccatctacggcaagaagggggacaccagcaacatcatcaccgtgcgggtggctgatggccagacagtgcagggcgaggtgtggaagaccaccccctaccaggtggccgctgagatcagccaggagctggccgagagcaccgtcatcgccaaggtgaatggagagctgtgggacctggaccggcccctggagggggacagcagcctggagctgctgacctttgacaatgaggaggcccaggccgtgtactggcacagcagcgcccacatcctgggggaggccatggagctgtactacggcggccacctgtgctacggcccccccattgaaaatggcttctactatgacatgtttattgaagatagagctgtgagcagcacagagctgagcgccctggagaacatctgcaaggccatcatcaaggagaagcagccctttgagcggctggaggtgtccaaggagatcctgctggagatgttcaagtacaacaagttcaagtgccgcatcctgaatgagaaggtgaacacagccaccaccaccgtgtaccgctgtggccccctgattgacctgtgcaagggcccccacgtgcgccacacaggcaagatcaagaccatcaagatcttcaagaacagcagcacctactgggagggcaaccctgagatggagaccctgcagaggatctacggcatctccttcccagacaacaagatgatgagggactgggagaagttccaggaggaggccaagaacagagaccacaggaagattggcaaggagcaggagctgttcttcttccatgacctgagccctggcagctgcttcttcctgcccaggggggccttcatctacaacaccctgacagacttcatccgggaggagtaccacaagagggacttcacagaggtgctgagccccaacatgtacaacagcaagctgtgggaggccagcggccactggcagcactacagcgagaacatgttcacctttgaaattgagaaggacacctttgccctgaagcccatgaactgccccggccactgcctgatgtttgcccaccggcccaggtcctggagggagatgcccatccgctttgctgactttggagtgctgcacagaaatgagctgagcggcaccctgagcggcctgaccagggtgcggcgcttccagcaggatgatgcccacatcttctgcaccgtggagcagatcgaggaggagatcaagggctgcctgcagttcctgcagagcgtgtacagcaccttcggcttctccttccagctgaacctgagcaccaggcctgagaacttcctgggggagattgagatgtggaatgaggccgagaagcagctgcagaacagcctgatggactttggagagccctggaagatgaaccctggagatggagccttctacggccccaagattgacatcaagatcaaggatgccatcggccgctaccaccagtgtgccaccatccagctggacttccagctgcccatccgcttcaacctgacctacgtgtccaaggatggagatgacaagaagaggcctgtgatcatccaccgggccatcctgggctctgtggagaggatgattgccatcctgtctgaaaattatggaggcaagtggcccttctggctgagcccccggcaggtgatggtgattcctgtgggccccacctgtgagaagtatgccctgcaggtgagcagcgagttctttgaggagggcttcatggctgatgtggacctggaccacagctgcaccctgaacaagaagatcagaaatgcccagctggcccagtacaacttcatcctggtggtgggggagaaggagaagattgacaatgctgtgaatgtgaggacccgggacaacaagatccatggagagatcctggtgaccagcgccatcgacaagctgaagaacctgaggaagaccaggaccctgaatgctgaggaggccttctag

SEQ ID NO: 243073 - DNA, 2124 bp, Artificial Sequence
  derived and/or modified sequence
atggccgccgaggccctggccgccgaggccgtggccagccggctggaaagacaggaagaggatattaggtggctctggtccgaagttgaacggctcagggatgaacagttgaacgctccttactcctgtcaggccgaggggccctgcctcacccgggaagtggcacagctgcgtgcggagaactgtgaccttcgacatcgactttgttctttacggctgtgtttggccgaagagcgaagtagacaggcaactctggaatctgcggaactggaggcagctcaggaagcgggggcgcagccgcccccctctcagtcccaggataaggacatgaaaaagaaaaaaatgaaagaatctgaggcagactccgaggtgaaacatcagccaatctttattaaggaacggctgaaactattcgagattctcaaaaaagaccaccagcttttactggctatctatggcaagaaaggcgatacgtccaatatcattactgtgcgtgtcgccgacgggcaaactgtccagggtgaggtctggaaaaccaccccatatcaagtagccgctgagatctcacaggaactggctgaatcaaccgtgattgccaaggtaaatggagagctgtgggaccttgaccgtcccctggagggcgactccagcttagagctcctgacgttcgacaacgagaaggtaaatacagcgactaccacggtctaccgatgcggtcccctgattgatctttgtaaaggcccccatgtgcggcacacggggaagataaaaactataaaaatttttaagaattcatctacctattgggagggcaacccagagatggagacactgcagcgcatttatggtatttcttttccggacaacaagatgatgcgtgattgggagaagttccaggaggaggccaagaacagggaccacagaaagatagggaaggagcaggaactcttcttctttcacgacctctccccaggctcctgtttcttcctgcctcggggagccttcatatacaacactctgacggattttatacgtgaagagtaccacaaaagggattttacggaagtgctgtcccccaacatgtacaattcaaagctgtgggaagcatcaggacattggcagcattatagtgagaacatgtttacctttgaaattgagaaggatacgtttgcgctcaaacccatgaactgccccggccactgcctgatgttcgcacacaggccccgcagctggcgggaaatgccaatcaggttcgctgatttcggcgtgctccaccgaaacgaactcagcggcaccctgtccggcctgacgagggtgcggagatttcagcaggatgatgcacatatattctgtacagtggaacagattgaggaagagattaaaggctgcctacaattccttcagagcgtctattccacctttggctttagctttcagttgaacctatcaactaggcccgagaatttcctgggagaaatagaaatgtggaatgaggccgagaaacagctgcagaattctttgatggatttcggcgagccatggaagatgaacccaggagacggcgccttctatggtccaaagattgacatcaagataaaggacgctataggccgctaccaccagtgtgccactatacagctggacttccagctgccgattagatttaacttaacatacgtaagcaaggacggggacgacaagaagcgccccgtgatcatccacagagccatattgggcagcgttgagaggatgatcgccattttaagcgagaattacggcggcaaatggcctttctggttatctccaaggcaggtaatggtcattccagtgggccctacctgtgagaaatacgcattacaagtgagctccgagttcttcgaggagggcttcatggccgatgtcgacctggaccattcctgcacacttaacaaaaagatccgcaacgcgcaactcgcccaatacaattttatattggtagtcggcgagaaggaaaaaatcgataatgcggtcaacgtccgcactagggataacaaaattcacggcgaaatcttggtgacaagcgctatcgacaaacttaaaaatctccgaaagacacggacgctcaacgccgaggaggccttttag

SEQ ID NO: 243074 - DNA, 2409 bp, Artificial Sequence
  derived and/or modified sequence
atggccgccgaggccctggccgccgaggccgtggccagccggctggagcggcaggaagaagacattaggtggttatggtctgaggtggaaagattgcgggacgagcaacttaatgctccgtacagctgtcaggctgagggtccttgcctgacaagggaagttgctcaactgcgcgccgagaactgcgatttgcgccaccgcctctgtagtctgcgactttgcctagctgaggagcgctcccgacaagccacactcgagtctgcggagctcgaggccgcacaggaggccggagctcagccacctcctagtcagagtcaggacaaagacatgaaaaagaagaaaatgaaagagagtgaggcggattccgaggtaaaacaccagcccatcttcatcaaagaaagattaaaacttttcgaaattctgaagaaggaccaccagctgctgctggctatctatggcaaaaaaggggatacttccaacattatcaccgtgcgcgtggctgacggccagactgtgcaaggcgaggtgtggaaaacaaccccctatcaggtggcagctgaaattagccaagagctggcagaatctaccgtgattgccaaggttaatggggagctgtgggacctcgaccgacctctggagggtgatagctcgctggaacttctgacgtttgataatgaagaggcccaggccgtctactggcatagcagtgctcacatcttgggcgaggcaatggagctgtattacggagggcacctgtgctatgggcccccaattgagaacgggttctattatgatatgttcattgaggatagagcagtgagctcgacggagttgtccgcactggagaatatctgtaaagccataatcaaggagaaacagccttttgagcggttggaggtctcaaaagaaatcctgctggagatgtttaagtacaacaaattcaagtgtcgaatcctcaatgagaaggtgaataccgcaaccacaacagtatacaggtgcggacccctcatcgacctctgcaagggtccccacgtcaggcatacagggaaaatcaagacaatcaaaatcttcaagaattcatctacatactgggaggggaaccccgagatggagacacttcagcgaatttacggaatcagcttccctgataataagatgatgcgcgattgggaaaaatttcaggaggaagccaaaaacagagatcatagaaagatcggcaaggagcaagagctgttcttcttccatgatctgtcaccaggtagttgttttttcctgcccaggggcgcgttcatctataacacgttgacagacttcatcagagaagagtaccacaaaagggatttcactgaagttctgtcgcccaacatgtataattctaagttatgggaagcctccggacactggcaacattatagcgaaaacatgttcacttttgaaatcgaaaaggataccttcgcactgaaacctatgaactgcccagggcattgcctgatgtttgcccatagaccacggagttggagggagatgccaattaggtttgctgacttcggcgtgctccaccgcaacgagctttcaggtaccttgtctggactgacgagggttaggcgattccaacaggatgacgcccacatcttctgcacagtggagcagatcgaggaggaaattaaaggctgcctgcagtttcttcagtccgtgtactctacattcggattttcgttccaattaaatctatcgaccagaccagagaatttccttggggagattgaaatgtggaacgaggctgaaaaacagctgcagaattcgctcatggacttcggagaaccatggaagatgaatcctggtgatggagcgttctacggtccaaaaatagatatcaagatcaaggatgcaatagggagatatcatcagtgcgccactatccagttggactttcagctccctatcaggttcaatctgacatatgtgagcaaggacggtgacgataagaaaagaccggtgataatacatagagcaatactggggtcagtggagagaatgatcgctatcctaagcgagaactatggcggaaaatggccattttggctgagtcccaggcaggttatggtgattcctgtgggaccaacctgcgagaagtacgccttacaggttagtagcgaattcttcgaagaaggattcatggccgacgtagaccttgatcacagctgtacccttaacaagaagattcgcaatgcccagctggctcagtacaattttatcctggtcgttggggagaaggagaaaatcgataatgctgtgaacgttcgtaccagggacaacaaaatacacggggagatcctggtgacgtccgccatcgataagctgaagaacttgcggaagacaagaaccctgaatgctgaagaagcgttctag

SEQ ID NO: 243075 - DNA, 2124 bp, Artificial Sequence
  derived and/or modified sequence
atggccgctgaggcgttagccgcagaggctgtcgcgtcacgattggagcgccaggaagaggatatcagatggctgtggagtgaggtcgagaggctgcgagacgaacagctaaacgccccttacagctgccaagcagaagggccttgtttgacccgtgaagttgcccaactgagggcagaaaactgtgaccttaggcacaggctctgctcgttacggctctgtctcgcggaggaacgctctcggcaggccacactggaaagcgccgaactagaggcagcacaagaagcaggagcccagccccctccctcccagtctcaggataaagacatgaagaagaagaaaatgaaggagagcgaagctgattcggaagtgaagcatcagcctattttcatcaaggagcgcctgaagttgttcgagattctaaaaaaggaccaccagctgctcctcgctatctacggcaaaaagggagacacctcgaatatcattacagtaagggttgcagacggccaaaccgtgcaaggcgaagtatggaaaacaaccccctatcaagtggctgctgagatttctcaagagttagccgagagcactgtgatcgctaaggtaaacggagagctctgggatctagatcgacccctggagggggattccagcctggagcttctgaccttcgataacgagaaggttaacacggccaccacaacagtgtataggtgcgggcctctgatagatctctgcaagggaccacatgtccggcacactggcaaaatcaagactattaagatattcaagaatagctctacgtattgggaggggaatcctgaaatggaaactctgcaaaggatctatgggatttcatttccggacaacaagatgatgagagactgggaaaagttccaggaggaagctaagaatcgggatcaccgtaaaatcgggaaagagcaggaactgtttttttttcacgatctgtccccagggtcatgtttctttttacctcggggtgcatttatatacaatacacttacagattttatccgagaggagtaccataagcgcgactttacagaggttctgtcccccaatatgtataattctaagctgtgggaggctagcggccactggcagcactattccgagaatatgtttacgttcgagatcgaaaaagacacttttgctctcaagcctatgaattgtcccggacattgccttatgtttgcacataggcctcgcagctggagagagatgccaattcgcttcgccgactttggggtgctccaccgcaacgaactatccggaaccctgtccggattaacccgagtccgcagattccagcaggatgacgcgcacatattttgtacagtcgaacagattgaagaggagataaagggctgtctccagtttctgcagtcagtttactcaacattcggctttagctttcagctcaatcttagtacacggccagagaacttcctgggagaaatcgaaatgtggaatgaggcggaaaagcagttacagaattccctcatggattttggcgaaccctggaagatgaatccgggtgacggggctttttacggtcctaaaatagacatcaagattaaagatgccatcggaaggtaccatcagtgtgcgaccattcagctggattttcaactgcctatcaggttcaaccttacctacgtatccaaagatggcgatgataagaaacggccagtgatcattcaccgggctattttgggatccgttgagagaatgattgcaatcctgtcggagaattacggcggaaagtggccattctggctcagtcctcggcaggttatggttattcccgttgggccaacatgcgagaagtacgcactccaggtgagttccgaattctttgaggagggctttatggccgacgttgatctagaccacagctgcaccctgaacaaaaaaatcagaaacgcacaactggcacaatacaacttcatcttagtggttggggagaaggagaagatagataacgcggttaacgtcagaacccgagataacaagatacacggcgagatccttgtgacaagtgcgatcgacaaactgaagaatttgcgcaaaaccagaaccttgaatgctgaagaggccttttag

SEQ ID NO: 243076 - DNA, 2409 bp, Artificial Sequence
  derived and/or modified sequence
atggccgctgaggcactggcggcagaggccgtagcctcccggctggaaagacaggaagaggatataaggtggctatggagtgaagtcgaaaggttgagggatgagcaactgaacgcgccttattcctgccaggctgagggtccttgtctgactcgagaggtcgcgcagttacgcgctgagaattgtgatttgagacaccggctgtgctctctaaggctctgcctggcagaggagcgaagcaggcaggcgaccctggagtccgctgagttggaggcagcccaggaagcaggcgctcagcctcccccatcgcagtctcaggataaagatatgaaaaagaaaaagatgaaggaatccgaggctgactcagaagtgaagcaccaaccgatttttatcaaggaaagattaaagctgttcgaaattctgaagaaagaccaccaactgcttctagctatctacggtaagaagggcgacaccagtaatattattaccgtgcgggtggcagatgggcagacagtgcagggtgaggtttggaagaccaccccttaccaggtagcagcagaaattagtcaggagcttgccgagtccactgtgatcgccaaggtgaatggcgagctttgggacctggacaggccgctggagggagacagttcactggaactcctgactttcgacaacgaggaggcacaggcagtgtactggcattctagcgcccatatcttgggcgaggcaatggaactctactacggcggacacctttgttacgggccaccaatagaaaatggattttattacgacatgttcatagaggacagggccgtgtcctctaccgaactgtctgcactagagaatatctgcaaagccatcattaaagaaaagcagcccttcgagaggctggaggtgtctaaagaaattctactggaaatgtttaaatacaataaattcaaatgccggattctgaatgaaaaggtcaatactgcaaccactacagtgtacaggtgcggaccgttgatcgacctatgcaaaggtccacatgttcggcatacagggaagattaaaaccatcaaaatcttcaaaaactcctctacatattgggaggggaatccagagatggagaccctacagaggatctacggtattagctttccagataataaaatgatgcgtgactgggagaagtttcaggaggaggcgaagaaccgagaccaccgcaaaatcggtaaagaacaggagcttttcttctttcacgacctttcaccaggaagctgcttcttcctgccccgtggggcatttatttacaatacactgacggactttattagagaagagtatcacaagcgagacttcaccgaggtattatcccccaatatgtataactctaaactgtgggaagctagtgggcattggcagcattactccgagaacatgtttaccttcgagatcgaaaaggatacctttgcgctgaagccaatgaactgtccaggacattgtctgatgtttgctcacagacccaggtcctggcgggagatgccaatcaggtttgctgactttggcgttctgcacaggaacgagctaagcggcacactgtccggcttgacccgtgtgcggaggtttcagcaggatgacgcccacatcttttgtactgttgagcagattgaagaagaaatcaaaggctgcctgcagttcctgcaatctgtgtattccacttttgggttcagctttcaactgaacctgagcactcgcccagagaacttcctgggcgagattgaaatgtggaatgaggctgagaaacaactgcagaattcccttatggatttcggggaaccttggaagatgaatccaggcgatggcgctttctatggcccaaagatagatattaagattaaagacgccatcggacgctatcatcagtgcgccacaattcagctggactttcagctccctattcgcttcaatttgacgtacgtgtccaaggacggggacgacaaaaaaagaccagtcatcatccatagagcaattctcggtagcgtggaaagaatgatcgctatcttgtccgagaactacggcggtaaatggcctttttggctgagtccaagacaagtgatggttattccggtcggcccaacttgtgagaagtacgccctgcaggtgtcaagcgagttcttcgaggaaggcttcatggctgatgtggatctggatcatagttgtacgttgaataagaagatcagaaacgcccagttggcgcagtacaacttcatcttagtggtgggggaaaaggaaaaaattgacaatgcagtaaatgtaagaacccgggataacaaaatccacggggaaatcctcgtgacctcagcgatcgacaaactgaagaaccttcgtaaaacgagaacgcttaacgctgaggaggctttttag

SEQ ID NO: 243077 - DNA, 2301 bp, Artificial Sequence
  derived and/or modified sequence
atggccgccgaggccctggccgccgaggccgtggccagcagactggagagacaggaggaggacatcagatggctgtggagcgaggtggagagactgagagacgagcagctgaacgccccctacagctgccaggccgagggcccctgcctgaccagagaggtggcccagctgagagccgagaactgcgacctgagacacagactgtgcagcctgagactgtgcctggccgaggagagaagcagacaggccaccctggagagcgccgagctggaggccgcccaggaggccggcgcccagcccccccccagccagagccaggacaaggacatgaagaagaagaagatgaaggagagcgaggccgacagcgaggtgaagcaccagcccatcttcatcaaggagagactgaagctgttcgagatcctgaagaaggaccaccagctgctgctggccatctacggcaagaagggcgacaccagcaacatcatcaccgtgagagtggccgacggccagaccgtgcagggcgaggtgtggaagaccaccccctaccaggtggccgccgagatcagccaggagctggccgagagcaccgtgatcgccaaggtgaacggcgagctgtgggacctggacagacccctggagggcgacagcagcctggagctgctgaccttcgacaacgaggaggcccaggccgtgtactggcacagcagcgcccacatcctgggcgaggccatggagctgtactacggcggccacctgtgctacggcccccccatcgagaacggcttctactacgacatgttcatcgaggacagagccgtgagcagcaccgagctgagcgccctggagaacatctgcaaggccatcatcaaggagaagcagcccttcgagagactggaggtgagcaaggagatcctgctggagatgttcaagtacaacaagttcaagtgcagaatcctgaacgagaaggtgaacaccgccaccaccaccgtgtacagatgcggccccctgatcgacctgtgcaagggcccccacgtgagacacaccggcaagatcaagaccatcaagatcttcaagaacagcagcacctactgggagggcaaccccgagatggagaccctgcagagaatctacggcatcagcttccccgacaacaagatgatgagagactgggagaagttccaggaggaggccaagaacagagaccacagaaagatcggcaaggagcaggagctgttcttcttccacgacctgagccccggcagctgcttcttcctgcccagaggcgccttcatctacaacaccctgaccgacttcatcagagaggagtaccacaagagagacttcaccgaggtgctgagccccaacatgtacaacagcaagctgtgggaggccagcggccactggcagcactacagcgagaacatgttcaccttcgagatcgagaaggacaccttcgccctgaagcccatgaactgccccggccactgcctgatgttcgcccacagacccagaagctggagagagatgcccatcagattcgccgacttcggcgtgctgcacagaaacgagctgagcggcaccctgagcggcctgaccagagtgagaagattccagcaggacgacgcccacatcttctgcaccgtggagcagatcgaggaggagatcaagggctgcctgcagttcctgcagagcgtgtacagcaccttcggcttcagcttccagctgaacctgagcaccagacccgagaacttcctgggcgagatcgagatgtggaacgaggccgagaagcagctgcagaacagcctgatggacttcggcgagccctggaagatgaaccccggcgacggcgccttctacggccccaagatcgacatcaagatcaaggacgccatcggcagataccaccagtgcgccaccatccagctggacttccagctgcccatcagattcaacctgacctacgtgagcaaggacggcgacgacaagaagagacccgtgatcatccacagagccatcctgggcagcgtggagagaatgatcgccatcctgagcgagaactacggcggcaagtggcccttctggctgagccccagacaggtgatggtgatccccgtgggccccacctgcgagaagtacgccctgcaggtgagcagcgagttcttcgaggagggcttcatggccgacgtggacctggaccacagctgcaccctgaacaagaagatcagaaacgcccagctggcccagtacaacttcatcctggacagattcctgcccagcgtgtggcaggaggcctggctgtag

SEQ ID NO: 243078 - DNA, 2301 bp, Artificial Sequence
  derived and/or modified sequence
atggccgccgaggctcttgcagctgaggcagtggcgtcacggctggagaggcaagaggaggacattagatggttgtggtctgaggtcgagagactgagggatgaacaacttaatgcaccctattcttgccaggcagaagggccgtgcctgaccagagaagttgcccagctaagggctgagaactgtgacctccgacacaggttatgtagtttgcggctctgtctggccgaagaaagaagcaggcaggcgaccctcgaaagtgccgagttggaggctgcccaggaagccggtgcacagccacctccttctcaaagccaggataaagatatgaagaagaaaaaaatgaaggagtcagaggcagatagcgaggttaaacatcagcctatttttatcaaggaaaggttgaagctgtttgaaatcctgaaaaaggaccaccagcttttacttgctatctatgggaaaaagggggacacctccaacatcataacggttagggtagcagacgggcaaacagtgcagggggaagtgtggaagaccaccccctatcaagtcgctgctgaaataagccaggagctggcagagagtaccgtgatcgcaaaagtgaatggcgagctttgggatctcgatagaccattagagggagattcaagtctagaattgctgacatttgataatgaggaggctcaggcagtctattggcactcctctgctcacatcctgggcgaagcaatggagctgtactacggcggccatttgtgctacggaccgcccatcgagaatggtttctattatgacatgtttattgaggatcgggcagtctcatccacggaactctcagcactcgaaaacatctgcaaggctattatcaaagagaaacaaccatttgagcgactggaggttagcaaagagatattattagagatgtttaagtacaataagtttaagtgtcgcatattaaacgagaaagtgaacacagcaactacaacagtgtatcggtgcggcccactgatcgatctctgcaaggggccccacgttcgccacacagggaagattaagaccatcaaaatcttcaaaaactcttcaacttactgggaggggaatccagaaatggagacgttgcagaggatatatggaatctctttccctgataacaagatgatgagagattgggaaaagtttcaggaggaggccaagaacagagaccacaggaagatcggaaaggagcaagagttgtttttctttcacgatttaagtcccgggagttgttttttcctgcctaggggcgcttttatatacaatacgctgaccgactttatccgcgaagagtaccacaagagggactttacagaggttctgtcacccaacatgtacaactcaaagctgtgggaggcttcaggccattggcagcattactcggagaatatgttcaccttcgaaatcgaaaaggacacttttgcactgaagcccatgaactgtccagggcactgcttgatgttcgctcacaggcccagatcctggagagaaatgcctattcggtttgccgattttggcgtgctccaccgtaatgagctgagcggaaccttatctggtctgaccagagtgaggcgattccagcaggacgacgcccacatcttctgtaccgttgaacagatagaggaggaaatcaaagggtgccttcagttccttcaatcagtgtactcgacattcggattttctttccagttgaacctcagtactagaccggaaaacttcttaggcgaaattgagatgtggaacgaggcggagaagcagttacagaactctttgatggatttcggtgagccttggaaaatgaatccaggggacggtgctttttacggtcctaaaattgacatcaaaatcaaggacgctataggacggtaccatcaatgtgcaacaattcagctggactttcagttaccaatcagattcaacctaacctacgttagcaaagatggtgatgacaaaaagagacccgtcattatccatagggcaattctcggatccgtggagcgaatgatagcaatcctgagtgaaaactacgggggcaagtggcctttctggcttagcccaagacaggtgatggttattccggtaggccccacatgtgaaaaatacgcactgcaggtttcttcagagttctttgaagagggttttatggcagacgtggacttagaccattcttgtactcttaataagaagattagaaacgcccaacttgcccagtacaacttcattcttgaccgatttcttccttccgtttggcaggaagcttggctctag

SEQ ID NO: 243079 - DNA, 2301 bp, Artificial Sequence
  derived and/or modified sequence
atggctgctgaggccctggccgctgaggccgtggccagccggctggagcggcaggaggaggacatccgctggctgtggagcgaggtggagcggctgagagatgagcagctgaatgccccctacagctgccaggccgagggcccctgcctgacccgggaggtggcccagctgcgggcagagaactgtgacctgcggcaccggctgtgcagcctgcggctgtgcctggccgaggagaggagccggcaggccaccctggagagcgctgagctggaggccgcccaggaggccggggcccagcccccacccagccagagccaggacaaggacatgaagaagaagaagatgaaggagagcgaggccgacagcgaggtgaagcaccagcccatcttcatcaaggagcggctgaagctgtttgagatcctgaagaaggaccaccagctgctgctggccatctacggcaagaagggggacaccagcaacatcatcaccgtgcgggtggctgatggccagacagtgcagggcgaggtgtggaagaccaccccctaccaggtggccgctgagatcagccaggagctggccgagagcaccgtcatcgccaaggtgaatggagagctgtgggacctggaccggcccctggagggggacagcagcctggagctgctgacctttgacaatgaggaggcccaggccgtgtactggcacagcagcgcccacatcctgggggaggccatggagctgtactacggcggccacctgtgctacggcccccccattgaaaatggcttctactatgacatgtttattgaagatagagctgtgagcagcacagagctgagcgccctggagaacatctgcaaggccatcatcaaggagaagcagccctttgagcggctggaggtgtccaaggagatcctgctggagatgttcaagtacaacaagttcaagtgccgcatcctgaatgagaaggtgaacacagccaccaccaccgtgtaccgctgtggccccctgattgacctgtgcaagggcccccacgtgcgccacacaggcaagatcaagaccatcaagatcttcaagaacagcagcacctactgggagggcaaccctgagatggagaccctgcagaggatctacggcatctccttcccagacaacaagatgatgagggactgggagaagttccaggaggaggccaagaacagagaccacaggaagattggcaaggagcaggagctgttcttcttccatgacctgagccctggcagctgcttcttcctgcccaggggggccttcatctacaacaccctgacagacttcatccgggaggagtaccacaagagggacttcacagaggtgctgagccccaacatgtacaacagcaagctgtgggaggccagcggccactggcagcactacagcgagaacatgttcacctttgaaattgagaaggacacctttgccctgaagcccatgaactgccccggccactgcctgatgtttgcccaccggcccaggtcctggagggagatgcccatccgctttgctgactttggagtgctgcacagaaatgagctgagcggcaccctgagcggcctgaccagggtgcggcgcttccagcaggatgatgcccacatcttctgcaccgtggagcagatcgaggaggagatcaagggctgcctgcagttcctgcagagcgtgtacagcaccttcggcttctccttccagctgaacctgagcaccaggcctgagaacttcctgggggagattgagatgtggaatgaggccgagaagcagctgcagaacagcctgatggactttggagagccctggaagatgaaccctggagatggagccttctacggccccaagattgacatcaagatcaaggatgccatcggccgctaccaccagtgtgccaccatccagctggacttccagctgcccatccgcttcaacctgacctacgtgtccaaggatggagatgacaagaagaggcctgtgatcatccaccgggccatcctgggctctgtggagaggatgattgccatcctgtctgaaaattatggaggcaagtggcccttctggctgagcccccggcaggtgatggtgattcctgtgggccccacctgtgagaagtatgccctgcaggtgagcagcgagttctttgaggagggcttcatggctgatgtggacctggaccacagctgcaccctgaacaagaagatcagaaatgcccagctggcccagtacaacttcatcctggaccgcttcctgcccagcgtgtggcaggaggcctggctgtag

SEQ ID NO: 243080 - DNA, 2301 bp, Artificial Sequence
  derived and/or modified sequence
atggccgccgaggccctggccgccgaggccgtggccagccggctggaacgccaagaggaggacatcagatggctgtggagtgaagttgaacgccttcgggacgagcaactgaatgctccatattcttgtcaggcagaaggcccctgtctcactcgggaggttgcccagctgagagctgagaattgtgacttacgccaccgtctgtgcagtctgcgtttatgcctggccgaggaacgtagtcggcaggcaacactagaaagtgcggaacttgaagccgcccaggaggccggggctcagccaccaccttcccagtcccaagacaaagacatgaagaagaaaaaaatgaaggagtctgaggcagactctgaagtcaaacatcagcctatttttataaaggagagactcaagctgtttgagatactcaaaaaagaccaccagctgttattggcgatctatggcaaaaagggtgatacatccaatatcatcaccgttcgtgtagctgacgggcagacagtacaaggagaagtctggaagacgacgccatatcaggtggccgctgagatcagccaggaattggctgagtcgacagttattgctaaagtgaatggcgaattgtgggatcttgataggccactggaaggggatagtagtttagagctgctcaccttcgataatgaagaggcccaggctgtctactggcattccagcgcccatatcttgggagaggccatggaactgtactacggaggtcacctatgctacggcccccccatcgagaacgggttctactacgatatgttcattgaggatcgggccgtgagttccaccgaactgtctgccctcgagaatatctgcaaggcaatcatcaaggagaaacagccgtttgagagattagaggtgagcaaagagattctcttggagatgttcaaatacaacaagtttaaatgtaggatcctcaacgaaaaagttaataccgcaacaactaccgtttaccggtgcggaccactcattgacctctgtaaggggccccacgtgagacatacaggtaaaatcaagaccatcaagatattcaaaaactcctcaacctactgggaggggaacccagagatggaaactctccagagaatttacggaatcagcttccccgacaacaagatgatgcgagactgggagaagttccaagaggaggcaaagaatagagaccaccgcaagataggtaaagaacaggaactgttttttttccacgatttgagtcccggcagttgcttctttttgccacggggcgcctttatttacaacacactgacagactttattcgcgaggagtaccacaaacgcgatttcacagaggtgctgtcccccaacatgtacaattccaaactttgggaggcctccggtcactggcagcactacagtgagaacatgttcacattcgaaatcgagaaagatacattcgccctgaagcctatgaactgcccagggcactgcttaatgtttgcacaccggccccgtagttggcgcgagatgccaataagatttgctgatttcggcgtgcttcatcgtaacgagctgtccggcacactatcagggctgacccgagttaggcgcttccagcaggacgacgctcatatattctgtaccgtcgagcagattgaggaagagatcaaaggctgtcttcagtttctccagtctgtgtactcaacttttggattcagtttccagctcaatttgagtacacgcccagagaacttcctaggggagattgagatgtggaatgaggctgagaagcagctccaaaactccctcatggacttcggggaaccttggaagatgaaccccggagatggcgctttctatggccccaaaatcgacatcaaaatcaaggacgctataggtagataccaccaatgcgcaactatacagctagatttccagttgccaatccgattcaacttgacatatgtgtctaaagatggtgacgataaaaaacgcccagtgataatacatcgcgccatactgggctctgttgagcgcatgatagccatcctttcagagaactacggcggaaagtggcctttctggctttctccaaggcaggtgatggtcattcccgtcggtccgacttgcgagaaatacgcactccaggtgagcagcgagttttttgaagaagggtttatggccgatgtggacttggatcactcctgcaccctgaataaaaagattcggaacgctcagcttgcccagtacaatttcatcctcgaccgcttcctgcctagcgtctggcaggaagcctggctgtag

SEQ ID NO: 243081 - DNA, 2301 bp, Artificial Sequence
  derived and/or modified sequence
atggcagctgaggccttggcagctgaagccgtggcatctcggctcgagaggcaggaagaagatatacgctggttatggtctgaagtggagagattgagggatgagcagctgaatgcaccatattcatgccaggctgagggaccctgcctcacgagagaggtggcacagcttcgcgctgaaaactgtgatctccgacatagactgtgctcgctccgattgtgtctggccgaggaaagatctaggcaggccactttggaaagtgctgaattggaggccgctcaagaagccggagctcagcctcctcccagccagagccaggataaagacatgaaaaaaaaaaagatgaaggagtccgaagcagacagcgaagtgaagcatcagccaatcttcatcaaggagaggctgaagctgttcgaaattttgaagaaggatcaccagctgctcctggcgatttacggcaagaagggcgacacctctaacattattactgtgagggtcgccgatggtcagaccgtgcagggtgaggtgtggaagaccaccccataccaggttgccgcagagattagccaggagctcgctgagagcactgtaatagcaaaggtgaatggggaactctgggatctggaccgtccccttgaaggggatagttctctcgagttactgacattcgacaatgaggaggcccaagcagtttactggcactcttccgcacacattctgggagaagccatggaactttactacggcggacacctttgctatggccctcccatcgagaacggcttctactatgatatgttcatcgaagatagggctgttagttcaaccgagttgtctgctcttgagaacatatgtaaggccatcatcaaagagaaacagcccttcgaacgtctcgaggtctctaaggagatcctcctggaaatgtttaaatacaataagtttaagtgtaggatccttaatgaaaaagtgaataccgcaacgaccactgtctaccgctgcggtcccctgatcgatctttgtaaagggcctcatgtcagacatactggcaaaattaagaccatcaagatcttcaagaactctagcacctattgggaggggaatcccgagatggaaactctgcagcgcatttacggtataagcttccccgataataaaatgatgcgggactgggagaagttccaggaggaggccaagaaccgagatcacagaaaaatcgggaaagaacaggaactgtttttttttcacgacctaagcccaggaagctgcttctttttaccaaggggcgcattcatttacaacactttaaccgactttatccgagaagagtatcacaaaagggacttcactgaagtcctgtcacccaacatgtacaactcaaagctttgggaagcgtccgggcactggcagcactactccgaaaacatgtttactttcgagatcgaaaaagacacctttgccctgaagcccatgaactgcccaggacattgcctcatgttcgcccatcgtccgaggtcatggagagagatgcctatcaggttcgccgactttggagtcctacaccgaaatgagttatcggggacactgtcaggactcacacgggttcgacggtttcaacaggatgacgcacatatcttctgtacagtggagcagatcgaggaggagattaaaggttgcctccagttcctgcagagcgtatactccacattcggcttctcctttcagctcaacttatctacccgccctgagaatttcctgggcgagattgagatgtggaacgaagccgagaaacagctgcagaattcactaatggattttggcgaaccatggaaaatgaatcccggagatggagcattctacgggccaaaaatcgatataaaaataaaagacgcgataggtcgttatcatcagtgcgccaccattcagctagactttcaacttcccataaggttcaaccttacatacgtgtcgaaagacggggatgataagaaaagacccgttattattcaccgggctatcctgggcagcgtagaacgtatgatcgcgatcttgtccgagaactatggtggaaagtggcccttttggctgtcccccaggcaagtcatggttattcccgtaggaccaacgtgcgagaaatatgcactgcaggtcagtagcgaatttttcgaagaaggctttatggccgatgtcgacctcgaccattcctgtactttgaataagaaaatcagaaacgcacagttggcgcagtacaattttatactggaccggttcctgcctagcgtttggcaggaagcgtggctttag

SEQ ID NO: 243082 - DNA, 2774 bp, Artificial Sequence
  derived and/or modified sequence
gtcggtgcctgagggaggccgcgatggcggccgaggccctggcggcggaggccgtggcgtcgcgcctggagcggcaggaggaggacatccgctggctgtggtcggaggtcgagcgcctgagggacgagcagctgaacgcgccctacagctgccaggcggaggggccgtgcctcacgcgggaggtggcgcagctccgggccgagaactgcgacctgcgccaccgcctgtgcagcctgcggctgtgcctcgccgaggagcggagccgccaggccacgctggagagcgcggagctagaggcggcgcaggaggccggcgcacagcctcctcctagtcaaagccaagacaaggacatgaaaaagaagaaaatgaaggaaagcgaggctgacagcgaggtgaagcatcaaccaattttcataaaagaaagattgaagctttttgaaatactgaagaaagaccatcagctcttacttgccatttatggaaaaaagggggatacaagcaacatcatcacagtaagagtggctgatgggcaaacagtgcaaggggaagtctggaaaacaacgccttaccaagtggctgctgaaattagtcaggaactggctgaaagcacggtaatagccaaagtcaatggtgaactgtgggacctggaccgcccattggaaggggactcttctctagagctgcttacatttgataatgaggaagctcaagctgtgtactggcactccagtgctcacattcttggggaggccatggagctttactatggaggccacctgtgctacggtccgcccattgaaaatggattttattatgacatgttcattgaagacagagcagtgtccagcacagaattgtcagccctggagaatatatgtaaagccatcataaaagaaaagcaaccttttgaaagactagaagtcagcaaggaaatcctcctggaaatgtttaagtacaataaatttaaatgccgcattctgaatgagaaagttaacactgcaactaccaccgtgtacaggtgcggtccattaattgacctttgcaaaggtccacatgtaagacacactggaaaaattaaaaccatcaaaatttttaagaattcctcaacatattgggagggcaatccggaaatggaaacattgcagaggatctatggaatatcctttcctgataacaagatgatgagagactgggaaaagttccaagaggaagcaaagaaccgagatcacaggaagatcgggaaggaacaagaacttttctttttccacgatttgagtcctggaagctgttttttccttcccagaggagccttcatttataatacgcttacagatttcatacgagaggaatatcacaaacgggacttcacggaggtgctctctcccaatatgtacaacagtaaactctgggaagcctcaggccactggcagcattacagcgagaacatgtttacctttgagattgaaaaggacacttttgccctcaaacccatgaattgtccagggcactgtctaatgtttgcccatcgtccacgatcttggagggaaatgcctattagatttgctgattttggagttctgcatagaaatgaactgtcggggactctcagcggcttgaccagagtgaggcgcttccagcaggacgatgctcacattttttgcacagtggagcagattgaagaagaaataaaggggtgtttgcagtttttgcaatctgtttactcaacatttggcttctcctttcaattaaacctgtcaacaaggccggaaaacttcctaggagagattgagatgtggaatgaggctgagaagcaactgcagaacagcttgatggactttggagaaccgtggaaaatgaacccaggagatggagcattttatggccctaaaattgacataaaaatcaaggatgctattggcagataccatcaatgtgctacaattcagctggacttccaactgcctattagatttaatctcacatatgttagtaaggatggggatgataagaagagacctgtgatcattcatcgagccattttgggatcagtggaaagaatgatagccattctttcagaaaactatggcggaaaatggcctttctggctatctcctcgtcaggtgatggtcatccctgtggggccaacttgtgaaaaatatgcacttcaggtatccagtgaattttttgaagaaggatttatggctgacgttgacttggatcacagttgtacactaaataagaaaatacgaaatgcacagctggctcagtataattttattttggaccggtttcttccttctgtgtggcaagaagcatggctgtagattcctgcatcatctcacaatatgggtcactagagagaacaaactttttacccacattccagaaagttctggctggctcgcatgggtctggtgtccactccttggctcatcagtggttggagaaaaggaaaagatagataatgctgtaaacgtgcgaacaagagacaacaaaattcatggagagattttagtaacttctgccattgataaactgaagaatctcaggaagacacggacactcaatgctgaggaggccttttgaagtccttccctgatatttgcttctgtgtaactttgttttgacccttaaaaatgtatttttcttaacatgttagtacttctacgactttggagccactgatgggtccactcatggcctcagctgagaaaggagacgatgaacgtgtagctgacatgcacgaagtttaatttactcatgtccacggggga

SEQ ID NO: 243083 - protein, 793 aa, Artificial Sequence
  derived and/or modified sequence
MGQCYNLEDDDLETDVNKLSSKPGLDRPEEELMQYEVMCLELSYSFEELQSKLGDDLNSEKTQYANHHHIPAAASSKQHCYSKDQSSCGQEREYAVQTSLLCRVKTGRSTVHLGSKKNPGVNLYQNVQSNSLRRDSSESEIPDIQASPKADAWDVDAIFCPRMSASFSNSTRTREVVKVIDKLLQTHLKRVPFHDPYLYMAKARRTSSVVDFKMMAFPDVWGHCPPPTTQPMLERKCGVQRIRIFEDIRRLIQPSDVINKVVFSLDEPWPLQDNASNCLRFFSKFESGNLRKAIQVREFEYDLLVNADVNSTQHQQWFYFKVSGMQAAIPYHFNIINCEKPNSQFNYGMQPTLYSVKEALLGKPTWIRTGHEICYYKNHYRQSTAVAGGASGKCYYTLTFAVTFPHSEDVCYLAYHYPYTYTALMTHLDILEKSVNLKEVYFRQDVLCQTLGGNPCPLVTITAMPESNSDEHLEQFRHRPYQVITARVHPGESNASWVMKGTLEFLVSSDPVARLLRENFIFKIIPMLNPDGVINGNHRCSLSGEDLNRQWLSPSAHLQPTIYHAKGLLYHLSSIGRSPVVFCDFHGHSQKKNVFLYGCSIKETLWQAACTVGTSTILEEVNYRTLPKILDKLAPAFTMSSCSFLVEKSRASTARVVVWREMGVSRSYTMESSYCGCNQGPYQCTQRLLERTKNERAHPVDGLQGLQFGTRELEEMGAMFCLGLLILELKSASCSHQLLAQAATLLSAEEDALDQHLQRLKSSNFLPKHIWFAYHFFAITNFFKMNLLLHVSP

SEQ ID NO: 243084 - protein, 1062 aa, Artificial Sequence
  derived and/or modified sequence
MISKGGSEALLQTLVDTARTAPPDYDILLPLFRLLAKVGLRDKKIGRKALELEALDVTLILARKNLSHGQNLLHCLWALRVFASSVSMGAMLGINGAMELLFKVITPYTRKRTQAIRAATEVLAALLKSKSNGRRAVNRGYVTSLLGLHQDWHSHDTANAYVQIRRGLLLCLRHIAALRSGREAFLAAQGMEILFSTTQNCLDDKSMEPVISVVLQILRQCYPTSPLPLVTASSAYAFPVPGCITTEPPHDLPEEDFEDDGDDEVDKDSDTEDGKVEDDDLETDVNKLSSKPGLDRPEEELMQYEVMCLELSYSFEELQSKLGDDLNSEKTQYANHHHIPAAASSKQHCYSKDQSSCGQEREYAVQTSLLCRVKTGRSTVHLGSKKNPGVNLYQNVQSNSLRRDSSESEIPDIQASPKADAWDVDAIFCPRMSASFSNSTRTREVVKVIDKLLQTHLKRVPFHDPYLYMAKARRTSSVVDFKMMAFPDVWGHCPPPTTQPMLERKCGVQRIRIFEDIRRLIQPSDVINKVVFSLDEPWPLQDNASNCLRFFSKFESGNLRKAIQVREFEYDLLVNADVNSTQHQQWFYFKVSGMQAAIPYHFNIINCEKPNSQFNYGMQPTLYSVKEALLGKPTWIRTGHEICYYKNHYRQSTAVAGGASGKCYYTLTFAVTFPHSEDVCYLAYHYPYTYTALMTHLDILEKSVNLKEVYFRQDVLCQTLGGNPCPLVTITAMPESNSDEHLEQFRHRPYQVITARVHPGESNASWVMKGTLEFLVSSDPVARLLRENFIFKIIPMLNPDGVINGNHRCSLSGEDLNRQWLSPSAHLQPTIYHAKGLLYHLSSIGRSPVVFCDFHGHSQKKNVFLYGCSIKETLWQAACTVGTSTILEEVNYRTLPKILDKLAPAFTMSSCSFLVEKSRASTARVVVWREMGVSRSYTMESSYCGCNQGPYQCTQRLLERTKNERAHPVDGLQGLQFGTRELEEMGAMFCLGLLILELKSASCSHQLLAQAATLLSAEEDALDQHLQRLKSSNFLPKHIWFAYHFFAITNFFKMNLLLHVSP

SEQ ID NO: 243085 - DNA, 2382 bp, Artificial Sequence
  derived and/or modified sequence
atgggccagtgctacaacctggaggacgacgacctggagaccgacgtgaacaagctgagcagcaagcccggcctggacagacccgaggaggagctgatgcagtacgaggtgatgtgcctggagctgagctacagcttcgaggagctgcagagcaagctgggcgacgacctgaacagcgagaagacccagtacgccaaccaccaccacatccccgccgccgccagcagcaagcagcactgctacagcaaggaccagagcagctgcggccaggagagagagtacgccgtgcagaccagcctgctgtgcagagtgaagaccggcagaagcaccgtgcacctgggcagcaagaagaaccccggcgtgaacctgtaccagaacgtgcagagcaacagcctgagaagagacagcagcgagagcgagatccccgacatccaggccagccccaaggccgacgcctgggacgtggacgccatcttctgccccagaatgagcgccagcttcagcaacagcaccagaaccagagaggtggtgaaggtgatcgacaagctgctgcagacccacctgaagagagtgcccttccacgacccctacctgtacatggccaaggccagaagaaccagcagcgtggtggacttcaagatgatggccttccccgacgtgtggggccactgccccccccccaccacccagcccatgctggagagaaagtgcggcgtgcagagaatcagaatcttcgaggacatcagaagactgatccagcccagcgacgtgatcaacaaggtggtgttcagcctggacgagccctggcccctgcaggacaacgccagcaactgcctgagattcttcagcaagttcgagagcggcaacctgagaaaggccatccaggtgagagagttcgagtacgacctgctggtgaacgccgacgtgaacagcacccagcaccagcagtggttctacttcaaggtgagcggcatgcaggccgccatcccctaccacttcaacatcatcaactgcgagaagcccaacagccagttcaactacggcatgcagcccaccctgtacagcgtgaaggaggccctgctgggcaagcccacctggatcagaaccggccacgagatctgctactacaagaaccactacagacagagcaccgccgtggccggcggcgccagcggcaagtgctactacaccctgaccttcgccgtgaccttcccccacagcgaggacgtgtgctacctggcctaccactacccctacacctacaccgccctgatgacccacctggacatcctggagaagagcgtgaacctgaaggaggtgtacttcagacaggacgtgctgtgccagaccctgggcggcaacccctgccccctggtgaccatcaccgccatgcccgagagcaacagcgacgagcacctggagcagttcagacacagaccctaccaggtgatcaccgccagagtgcaccccggcgagagcaacgccagctgggtgatgaagggcaccctggagttcctggtgagcagcgaccccgtggccagactgctgagagagaacttcatcttcaagatcatccccatgctgaaccccgacggcgtgatcaacggcaaccacagatgcagcctgagcggcgaggacctgaacagacagtggctgagccccagcgcccacctgcagcccaccatctaccacgccaagggcctgctgtaccacctgagcagcatcggcagaagccccgtggtgttctgcgacttccacggccacagccagaagaagaacgtgttcctgtacggctgcagcatcaaggagaccctgtggcaggccgcctgcaccgtgggcaccagcaccatcctggaggaggtgaactacagaaccctgcccaagatcctggacaagctggcccccgccttcaccatgagcagctgcagcttcctggtggagaagagcagagccagcaccgccagagtggtggtgtggagagagatgggcgtgagcagaagctacaccatggagagcagctactgcggctgcaaccagggcccctaccagtgcacccagagactgctggagagaaccaagaacgagagagcccaccccgtggacggcctgcagggcctgcagttcggcaccagagagctggaggagatgggcgccatgttctgcctgggcctgctgatcctggagctgaagagcgccagctgcagccaccagctgctggcccaggccgccaccctgctgagcgccgaggaggacgccctggaccagcacctgcagagactgaagagcagcaacttcctgcccaagcacatctggttcgcctaccacttcttcgccatcaccaacttcttcaagatgaacctgctgctgcacgtgagcccctag

SEQ ID NO: 243086 - DNA, 3189 bp, Artificial Sequence
  derived and/or modified sequence
atgatcagcaagggcggcagcgaggccctgctgcagaccctggtggacaccgccagaaccgccccccccgactacgacatcctgctgcccctgttcagactgctggccaaggtgggcctgagagacaagaagatcggcagaaaggccctggagctggaggccctggacgtgaccctgatcctggccagaaagaacctgagccacggccagaacctgctgcactgcctgtgggccctgagagtgttcgccagcagcgtgagcatgggcgccatgctgggcatcaacggcgccatggagctgctgttcaaggtgatcaccccctacaccagaaagagaacccaggccatcagagccgccaccgaggtgctggccgccctgctgaagagcaagagcaacggcagaagagccgtgaacagaggctacgtgaccagcctgctgggcctgcaccaggactggcacagccacgacaccgccaacgcctacgtgcagatcagaagaggcctgctgctgtgcctgagacacatcgccgccctgagaagcggcagagaggccttcctggccgcccagggcatggagatcctgttcagcaccacccagaactgcctggacgacaagagcatggagcccgtgatcagcgtggtgctgcagatcctgagacagtgctaccccaccagccccctgcccctggtgaccgccagcagcgcctacgccttccccgtgcccggctgcatcaccaccgagcccccccacgacctgcccgaggaggacttcgaggacgacggcgacgacgaggtggacaaggacagcgacaccgaggacggcaaggtggaggacgacgacctggagaccgacgtgaacaagctgagcagcaagcccggcctggacagacccgaggaggagctgatgcagtacgaggtgatgtgcctggagctgagctacagcttcgaggagctgcagagcaagctgggcgacgacctgaacagcgagaagacccagtacgccaaccaccaccacatccccgccgccgccagcagcaagcagcactgctacagcaaggaccagagcagctgcggccaggagagagagtacgccgtgcagaccagcctgctgtgcagagtgaagaccggcagaagcaccgtgcacctgggcagcaagaagaaccccggcgtgaacctgtaccagaacgtgcagagcaacagcctgagaagagacagcagcgagagcgagatccccgacatccaggccagccccaaggccgacgcctgggacgtggacgccatcttctgccccagaatgagcgccagcttcagcaacagcaccagaaccagagaggtggtgaaggtgatcgacaagctgctgcagacccacctgaagagagtgcccttccacgacccctacctgtacatggccaaggccagaagaaccagcagcgtggtggacttcaagatgatggccttccccgacgtgtggggccactgccccccccccaccacccagcccatgctggagagaaagtgcggcgtgcagagaatcagaatcttcgaggacatcagaagactgatccagcccagcgacgtgatcaacaaggtggtgttcagcctggacgagccctggcccctgcaggacaacgccagcaactgcctgagattcttcagcaagttcgagagcggcaacctgagaaaggccatccaggtgagagagttcgagtacgacctgctggtgaacgccgacgtgaacagcacccagcaccagcagtggttctacttcaaggtgagcggcatgcaggccgccatcccctaccacttcaacatcatcaactgcgagaagcccaacagccagttcaactacggcatgcagcccaccctgtacagcgtgaaggaggccctgctgggcaagcccacctggatcagaaccggccacgagatctgctactacaagaaccactacagacagagcaccgccgtggccggcggcgccagcggcaagtgctactacaccctgaccttcgccgtgaccttcccccacagcgaggacgtgtgctacctggcctaccactacccctacacctacaccgccctgatgacccacctggacatcctggagaagagcgtgaacctgaaggaggtgtacttcagacaggacgtgctgtgccagaccctgggcggcaacccctgccccctggtgaccatcaccgccatgcccgagagcaacagcgacgagcacctggagcagttcagacacagaccctaccaggtgatcaccgccagagtgcaccccggcgagagcaacgccagctgggtgatgaagggcaccctggagttcctggtgagcagcgaccccgtggccagactgctgagagagaacttcatcttcaagatcatccccatgctgaaccccgacggcgtgatcaacggcaaccacagatgcagcctgagcggcgaggacctgaacagacagtggctgagccccagcgcccacctgcagcccaccatctaccacgccaagggcctgctgtaccacctgagcagcatcggcagaagccccgtggtgttctgcgacttccacggccacagccagaagaagaacgtgttcctgtacggctgcagcatcaaggagaccctgtggcaggccgcctgcaccgtgggcaccagcaccatcctggaggaggtgaactacagaaccctgcccaagatcctggacaagctggcccccgccttcaccatgagcagctgcagcttcctggtggagaagagcagagccagcaccgccagagtggtggtgtggagagagatgggcgtgagcagaagctacaccatggagagcagctactgcggctgcaaccagggcccctaccagtgcacccagagactgctggagagaaccaagaacgagagagcccaccccgtggacggcctgcagggcctgcagttcggcaccagagagctggaggagatgggcgccatgttctgcctgggcctgctgatcctggagctgaagagcgccagctgcagccaccagctgctggcccaggccgccaccctgctgagcgccgaggaggacgccctggaccagcacctgcagagactgaagagcagcaacttcctgcccaagcacatctggttcgcctaccacttcttcgccatcaccaacttcttcaagatgaacctgctgctgcacgtgagcccctag

SEQ ID NO: 243087 - DNA, 2382 bp, Artificial Sequence
  derived and/or modified sequence
atgggtcaatgctataacctggaggacgacgacttggagactgatgtcaacaaacttagctcaaagcccggcctcgacaggccagaagaggagctgatgcagtacgaagtcatgtgtttggagctgtcttactcgtttgaagaattgcagagtaagttaggcgacgacctaaacagcgagaagacacagtacgcaaatcatcaccatattcccgcggctgccagcagcaagcagcactgctatagcaaggaccaatcatcatgcggccaggagagggaatatgctgtccaaacaagtctgttatgcagggtgaagacgggaaggtccaccgtgcatctcggaagtaagaaaaatccaggagtgaatctttaccagaacgtgcagagcaactctctgcgaagagactcttcagaaagcgagattcccgacatccaggcaagcccaaaggcagatgcctgggatgtagatgcgatcttttgtccccgaatgagtgcaagttttagcaatagcactagaactagggaggtagttaaagtcatagacaaactgctgcagactcacctgaagcgagttcctttccatgacccctatctctacatggctaaggctcggaggacctcttcggttgtagacttcaagatgatggcattccccgatgtttggggacactgtcctccgccaaccacccagccaatgctggagaggaagtgcggagttcagaggatcaggatatttgaggatatcagaaggctcatccagcctagcgacgtaatcaacaaagtagtgttttcactcgacgagccctggcctctgcaggacaacgcctctaactgtttacggtttttctcaaagtttgaatcgggtaatctgcggaaagctatccaggtgcgcgaattcgaatatgacctactggtgaacgctgatgttaattcgacgcagcatcagcaatggttttactttaaggtttctgggatgcaagccgccattccctatcattttaatatcatcaactgcgaaaaacctaactcgcagttcaattatggaatgcagcctactctgtacagtgtgaaggaggccctgcttggcaaacctacctggatccggaccggccatgagatttgctactataagaaccactatcggcagagcacggcagtggcaggtggagcttccggcaagtgttactacacacttacattcgccgtgacatttcctcatagtgaagacgtctgctacctggcttaccactacccgtacacctatactgcattaatgacgcacttagacatactggagaaaagcgtgaacttgaaagaagtttacttccggcaagacgttctttgccagaccctcggggggaacccctgtccacttgtgacaataaccgcaatgcctgagagcaattccgatgaacatctggaacagttccgtcatcggccgtaccaagtcattacagcccgtgtgcatccaggagaatccaatgcgtcatgggttatgaagggaactttggagttcctggtttcaagcgatcctgttgcacgattgctccgcgaaaacttcatttttaagattatacccatgctgaacccagatggggtcatcaacggcaaccaccgatgctctttatcaggggaagacctgaacagacagtggttaagcccttctgctcaccttcagcccacaatttaccacgccaagggacttctgtaccacctctccagcatcggacgcagccctgtggtcttctgtgacttccacggccattcacagaagaaaaatgttttcttatacggctgcagtattaaggaaaccctgtggcaggctgcctgcacagtgggaacctccacaatattggaagaagtaaactacagaactctgcctaaaattctggataaactagccccggcattcaccatgtccagttgtagctttctggtcgagaagtctcgcgcctcgaccgcgcgggtggtggtctggcgcgaaatgggcgtgtcgcggtcatacacaatggaaagtagctattgtggctgcaaccagggcccttaccagtgcacacaaaggctattggagaggacaaaaaatgagcgggcccacccagtcgatgggctgcagggactgcagtttggcacgagggagttagaagagatgggagctatgttctgccttggactgctcatccttgagctgaaatctgcaagctgttctcaccagctcctggctcaagctgcaacactgctgagcgcggaggaagatgccctggatcagcaccttcaaagactgaagtcttccaatttcctgcctaagcatatttggtttgcttatcacttttttgcaatcactaactttttcaagatgaatctgctcttgcacgtgagtccatag

SEQ ID NO: 243088 - DNA, 3189 bp, Artificial Sequence
  derived and/or modified sequence
atgatatctaaaggcgggtctgaggcgcttttacagacactcgtggatactgcacgaaccgcacccccggattatgacatcctgctcccgctcttccggttgcttgcaaaagtgggactgagagataaaaaaataggccgaaaagccctggagctggaagcactggacgttaccctgatcttggcgcgtaaaaacctatcacacggccaaaatctgttacactgtttgtgggccctgagagtatttgcgagttctgtgtccatgggggccatgctgggtatcaatggcgccatggagttgctcttcaaggttatcactccatacacacgaaagcgaactcaggccattcgtgctgccacagaagtgctcgctgctctccttaaatctaaaagcaacggtagaagggccgtaaaccgcggttatgtcacatccttgctgggtttgcaccaggattggcacagtcacgacacagcaaatgcctacgtgcagatacggaggggcttgcttctgtgtttgagacatatagcagcactcaggtccggacgtgaagcatttctcgctgcccaggggatggagatcctgttttcaactacccagaactgtctcgacgacaaatccatggaacccgttatttctgtcgtgctacagatactcaggcaatgctacccgacatcccccttacccctcgtgacggcttccagcgcatatgcctttcccgtacccggctgcattacgacggagccaccccatgacctcccagaagaggacttcgaggacgatggagacgacgaggttgacaaagattcagacacagaagacggcaaggtcgaggacgacgacctggaaacagacgtcaataagctgtcatctaaaccaggcttagaccggccggaggaggaactgatgcaatacgaggtgatgtgtctggaattgtcatactcattcgaggaattgcagagtaagctgggcgatgacctgaatagtgagaagacccaatatgccaaccaccatcacattcctgcagctgccagctccaaacagcattgctatagcaaggatcagtcatcctgtggtcaggagcgcgagtacgcagttcagacttcattactctgtcgagtgaaaactggcagatccacagttcacttaggatccaagaagaacccgggagtaaacctgtaccaaaacgtccaatcaaatagtctgagaagagacagtagcgaaagtgagatccctgacatccaagcatcaccgaaggcggatgcttgggacgttgacgccatattttgccctaggatgtccgccagcttcagtaactctaccaggaccagggaggtggtcaaagtaatcgacaaactattacaaacccacctgaagagggtgccatttcacgacccctatctgtatatggccaaggctcggaggacgagctcagtggtggattttaaaatgatggctttcccagatgtgtggggccactgtcccccccccacaacgcaacccatgcttgagaggaaatgtggcgtgcagagaattaggattttcgaagatatccggcgtttaatacaaccatccgacgtcataaacaaggtcgtgttttctctcgatgagccctggcctctgcaggacaatgccagcaattgcctgcgatttttttccaagtttgagagtggaaatctacgcaaggccatccaagtgagggagttcgagtacgatctgctcgttaatgccgacgtcaacagcactcagcatcagcagtggttttacttcaaagtgtctgggatgcaagctgctataccatatcattttaacattatcaactgtgaaaagccgaacagccagttcaattacggcatgcagccgactctctactcagtgaaagaggcactgctggggaagcctacctggatccgtaccggacatgaaatttgttattataagaaccactatagacagagcactgccgtggcaggcggggccagcggaaagtgctactacactctgacttttgccgttaccttccctcactctgaggatgtatgctatcttgcttatcactacccttatacatatacagctctgatgacccatctggacatccttgagaaatcagtgaacctcaaagaggtgtacttccgacaggatgtattatgtcagactctgggtggtaatccctgtcctttagtcactataactgctatgcccgaaagcaactctgatgagcacttagagcagttccggcacaggccttatcaggtcatcaccgctagagtgcatccaggcgagtccaacgctagctgggtgatgaagggcacactcgagtttctggtgagtagcgatcctgtggcgaggctgttgcgcgagaatttcatatttaaaatcatacccatgcttaaccctgacggtgttataaatgggaatcatagatgttccctgtctggagaggacttgaatcgccagtggctctcacccagcgcccatttgcagcccactatttaccacgccaagggtttgctttaccacctcagcagtatcggtcgctcgccagtagtcttctgcgatttccatggtcacagtcagaagaagaatgtcttcttatatggctgtagtattaaggaaactttgtggcaagccgcatgtaccgtaggaacgagtacaatcctggaggaggtgaattataggacactgcctaaaattttagataagttggctccagcattcaccatgagttcttgctcgttcctggtggagaaatcgcgagcctctactgcacgcgtggtggtgtggagagaaatgggcgtgtcccgctcttacaccatggagtcctcctactgcggttgtaatcaggggccctaccaatgcacgcagcgcttgcttgaacggacgaaaaacgaacgtgcccaccccgttgatgggcttcaaggactgcagtttgggacacgagaactagaggaaatgggagccatgttctgtctgggcctgctgatcctagaactcaagagcgcctcctgcagtcaccaactcctggcacaggccgccactctgctcagcgctgaagaagacgcactggaccaacacctgcagcgactgaagtccagcaatttcctgcccaaacacatttggttcgcttaccacttctttgcgataaccaacttcttcaagatgaatctgttgctccacgtgtctccctag

SEQ ID NO: 243089 - DNA, 2382 bp, Artificial Sequence
  derived and/or modified sequence
atgggccagtgctacaacctggaggatgatgacctggagacagatgtgaacaagctgagcagcaagccaggcctggacaggcctgaggaggagctgatgcagtatgaggtgatgtgcctggagctgagctacagctttgaggagctgcagagcaagctgggagatgacctgaacagcgagaagacccagtatgccaaccaccaccacatcccagctgctgccagcagcaagcagcactgctacagcaaggaccagagcagctgtggccaggagcgggagtatgctgtgcagaccagcctgctgtgccgggtgaagacaggccgcagcacagtgcacctgggcagcaagaagaaccctggggtgaacctgtaccagaatgtgcagagcaacagcctgcggcgggacagcagcgagagcgagatcccagacatccaggccagccccaaggcagatgcctgggatgtggatgccatcttctgccccaggatgtctgccagcttcagcaacagcaccaggacccgggaggtggtgaaggtgattgacaagctgctgcagacccacctgaagagggtgcccttccatgacccctacctgtacatggccaaggcccggaggaccagctctgtggtggacttcaagatgatggccttcccagatgtgtggggccactgccccccacccaccacccagcccatgctggagaggaaatgtggggtgcagaggatccgcatctttgaggacatcagaagactcatccagcccagtgatgtgatcaacaaggtggtgttcagcctggatgagccctggcccctgcaggacaatgccagcaactgcctgcgcttcttcagcaagtttgaaagtggcaacctgaggaaggccatccaggtgcgggagtttgaatatgacctgctggtgaatgctgatgtgaacagcacccagcaccagcagtggttctacttcaaggtgtctggcatgcaggccgccatcccctaccacttcaacatcatcaactgtgagaagcccaacagccagttcaactacggcatgcagcccaccctgtacagcgtgaaggaggccctgctgggcaagcccacctggatcagaactggacatgagatctgctactacaagaaccactaccggcagagcacagctgtggccggcggggccagcggcaagtgctactacaccctgacctttgctgtgaccttcccccacagtgaagatgtgtgctacctggcctaccactacccctacacctacacagccctgatgacccacctggacatcctggagaagtctgtgaacctgaaggaggtgtacttccggcaggatgtgctgtgccagaccctgggcggcaacccctgccccctggtgaccatcacagccatgcctgagagcaacagtgatgagcacctggagcagttccgccaccggccctaccaggtgatcacagcccgggtgcaccctggagagagcaatgcctcctgggtgatgaagggcaccctggagttcctggtgtccagtgaccctgtggcccggctgctgcgggagaacttcatcttcaagatcatccccatgctgaacccagatggagtcatcaatggaaaccaccgctgcagcctgtctggagaggacctgaaccggcagtggctgagccccagcgcccacctgcagcccaccatctaccacgccaagggcctgctgtaccacctgagcagcatcggccgcagccctgtggtgttctgtgacttccacggccacagccagaagaagaatgtgttcctgtatggctgcagcatcaaggagaccctgtggcaggccgcctgcaccgtgggcaccagcaccatcctggaggaggtgaactaccgcaccctgcccaagatcctggacaagctggccccagccttcaccatgagcagctgcagcttcctggtggagaagagccgggccagcacagcccgggtggtggtgtggagggagatgggcgtgagccgcagctacaccatggagagcagctactgcggctgcaaccagggcccctaccagtgcacccagaggctgctggagaggaccaagaatgaaagagcccaccctgtggatggcctgcagggcctgcagtttggcacccgggagctggaggagatgggcgccatgttctgcctgggcctgctgatcctggagctgaagagcgccagctgcagccaccagctgctggcccaggccgccaccctgctgtctgctgaggaggatgccctggaccagcacctgcagaggctgaagagcagcaacttcctgcccaagcacatctggtttgcctaccacttctttgccatcaccaacttcttcaagatgaacctgctgctgcacgtgagcccctag

SEQ ID NO: 243090 - DNA, 3189 bp, Artificial Sequence
  derived and/or modified sequence
atgatcagcaagggcggcagcgaggccctgctgcagaccctggtggacacagccaggacagcccccccagactatgacatcctgctgcccctcttccggctgctggccaaggtgggcctgcgggacaagaagattggaaggaaggccctggagctggaggccctggatgtgaccctcatcctggccaggaagaacctgagccacggccagaacctgctgcactgcctgtgggccctgcgggtgtttgccagctctgtgtccatgggcgccatgctgggcatcaatggagccatggagctgctcttcaaggtgatcaccccctacaccaggaagaggacccaggccatccgggccgccacagaggtgctggccgccctgctgaagagcaagagcaatggccggcgggctgtgaacagaggctacgtgaccagcctgctgggcctgcaccaggactggcacagccatgacacagccaatgcctacgtgcagatcagaagaggcctgctgctgtgcctgcggcacatcgccgccctgcggagcggccgggaggccttcctggccgcccagggcatggagatcctcttcagcaccacccagaactgcctggatgacaagtccatggagcctgtgatctctgtggtgctgcagatcctgcggcagtgctaccccaccagccccctgcccctggtgacagccagcagcgcctatgccttccctgtgcccggctgcatcaccacagagccccctcatgacctgcctgaagaagattttgaagatgatggagatgatgaggtggacaaggacagcgacacagaagatggcaaggtggaggatgatgacctggagacagatgtgaacaagctgagcagcaagccaggcctggacaggcctgaggaggagctgatgcagtatgaggtgatgtgcctggagctgagctacagctttgaggagctgcagagcaagctgggagatgacctgaacagcgagaagacccagtatgccaaccaccaccacatcccagctgctgccagcagcaagcagcactgctacagcaaggaccagagcagctgtggccaggagcgggagtatgctgtgcagaccagcctgctgtgccgggtgaagacaggccgcagcacagtgcacctgggcagcaagaagaaccctggggtgaacctgtaccagaatgtgcagagcaacagcctgcggcgggacagcagcgagagcgagatcccagacatccaggccagccccaaggcagatgcctgggatgtggatgccatcttctgccccaggatgtctgccagcttcagcaacagcaccaggacccgggaggtggtgaaggtgattgacaagctgctgcagacccacctgaagagggtgcccttccatgacccctacctgtacatggccaaggcccggaggaccagctctgtggtggacttcaagatgatggccttcccagatgtgtggggccactgccccccacccaccacccagcccatgctggagaggaaatgtggggtgcagaggatccgcatctttgaggacatccggcggctcatccagcccagtgatgtgatcaacaaggtggtgttcagcctggatgagccctggcccctgcaggacaatgccagcaactgcctgcgcttcttcagcaagtttgagagcggcaacctgaggaaggccatccaggtgcgggagtttgaatatgacctgctggtgaatgctgatgtgaacagcacccagcaccagcagtggttctacttcaaggtgtctggcatgcaggccgccatcccctaccacttcaacatcatcaactgtgagaagcccaacagccagttcaactacggcatgcagcccaccctgtacagcgtgaaggaggccctgctgggcaagcccacctggatcagaacaggccacgagatctgctactacaagaaccactaccggcagagcacagctgtggccggcggggccagcggcaagtgctactacaccctgacctttgctgtgaccttcccccacagtgaagatgtgtgctacctggcctaccactacccctacacctacacagccctgatgacccacctggacatcctggagaagtctgtgaacctgaaggaggtgtacttccggcaggatgtgctgtgccagaccctgggcggcaacccctgccccctggtgaccatcacagccatgcctgagagcaacagtgatgagcacctggagcagttccgccaccggccctaccaggtgatcacagcccgggtgcaccctggagagagcaatgcctcctgggtgatgaagggcaccctggagttcctggtgtccagtgaccctgtggcccggctgctgcgggagaacttcatcttcaagatcatccccatgctgaacccagatggagtcatcaatggaaaccaccgctgcagcctgagcggggaggacctgaaccggcagtggctgagccccagcgcccacctgcagcccaccatctaccacgccaagggcctgctgtaccacctgagcagcatcggccgcagccctgtggtgttctgtgacttccacggccacagccagaagaagaatgtgttcctgtatggctgcagcatcaaggagaccctgtggcaggccgcctgcaccgtgggcaccagcaccatcctggaggaggtgaactaccgcaccctgcccaagatcctggacaagctggccccagccttcaccatgagcagctgcagcttcctggtggagaagagccgggccagcacagcccgggtggtggtgtggagggagatgggcgtgagccgcagctacaccatggagagcagctactgcggctgcaaccagggcccctaccagtgcacccagaggctgctggagaggaccaagaatgaaagagcccaccctgtggatggcctgcagggcctgcagtttggcacccgggagctggaggagatgggcgccatgttctgcctgggcctgctgatcctggagctgaagagcgccagctgcagccaccagctgctggcccaggccgccaccctgctgtctgcagaagaagatgccctggaccagcacctgcagaggctgaagagcagcaacttcctgcccaagcacatctggtttgcctaccacttctttgccatcaccaacttcttcaagatgaacctgctgctgcacgtgagcccctag

SEQ ID NO: 243091 - DNA, 2382 bp, Artificial Sequence
  derived and/or modified sequence
atgggccagtgctataatttggaggatgatgacttggaaacagacgtgaacaagctgagttccaaacctggtcttgaccgacctgaagaggaactgatgcaatatgaggtgatgtgtcttgagctctcctatagctttgaggaactgcagtccaaacttggagatgatttgaactctgaaaagactcagtatgccaatcaccaccacattccagccgctgcctcctcaaaacagcattgctacagcaaggaccaaagctcctgtgggcaagaaagagaatatgctgtccagacttcccttctgtgcagggtgaagacgggaaggtccactgtgcatctaggctccaaaaaaaatcctggagtgaacctgtaccaaaatgtgcaatccaatagtctcaggagagattcttctgaaagtgaaatccctgacattcaggcttccccgaaagcagatgcctgggacgtagatgcaattttctgcccaaggatgagtgcctccttttctaattccactaggactagagaagttgtcaaagtaatagataagcttctgcagacacatctgaagcgtgtccctttccacgatccctatctttatatggccaaagccagaagaaccagctctgtggtggacttcaagatgatggcatttcctgatgtctggggacactgtccccctcccaccacccagcctatgttggaacgaaaatgtggagtccaaaggatcaggatatttgaggatattcggaggctcatccagccaagtgatgttataaataaagttgtcttcagtttagatgagccttggcctttgcaagacaatgcttccaattgtttacggttcttctccaaatttgagtcaggaaatcttcgcaaagccatccaagtgcgtgagttcgagtatgacttgctggtcaacgcagatgtgaatagcacccagcaccagcagtggttctatttcaaagtgagcggtatgcaggcggccatcccttaccacttcaacatcatcaactgtgagaagcccaacagccagtttaattatgggatgcagcccaccctatattctgtgaaggaggctcttcttggcaaacccacctggataaggacaggccatgaaatatgttattacaaaaatcattatcgccagagtacagctgttgcaggcggagcatctgggaagtgctactataccctcacctttgctgtcaccttcccacacagtgaggatgtctgctacctggcctaccactatccctatacctacacagccctcatgactcatcttgacatcctggaaaagagtgtcaacctcaaagaggtctacttccggcaagatgttctctgccagacgctgggagggaatccgtgtcccttggtgaccatcacggccatgcctgagtccaacagtgatgagcatctagagcagttccgacatcgtccatatcaggtgatcactgctcgagttcatccaggagagagcaatgccagttgggtgatgaagggtaccttggagttcctggtcagcagtgaccctgtggctaggctcttgagggaaaacttcatcttcaagatcatacccatgctcaacccagatggtgtcatcaacggcaaccacagatgctcactgagcggggaagatttgaacagacaatggctttctcccagtgctcatctgcagccaaccatttaccatgccaaaggcctcctctaccacctgagcagcattggccgaagtcccgtggttttctgtgacttccatggccactcccaaaagaagaatgtgttcctttatggctgtagcatcaaggaaaccttgtggcaagcagcatgcactgtgggcacatctactatcctagaggaggtcaactacaggactcttcccaaaatccttgataagctagcaccagcattcacaatgagcagctgcagctttctcgtggagaaatctcgagcttccacggcccgggtggtggtgtggagagagatgggggtgtccagaagctacaccatggaaagcagctactgtggctgcaaccagggcccttatcagtgtacacagaggctgttggagaggacaaagaatgaaagggctcacccagtggatggccttcagggtctacagtttggtaccagagaactggaggagatgggagccatgttctgtttgggcctcctcatcctggagctcaaatctgccagctgcagccatcagctcctggctcaagctgcaactctgctgagtgctgaggaggacgctctggaccagcacctccaacgattaaaatcatccaatttcctgccaaagcatatttggtttgcttaccacttttttgccattacaaactttttcaagatgaaccttcttctgcatgtctccccgtga

SEQ ID NO: 243092 - DNA, 2382 bp, Artificial Sequence
  derived and/or modified sequence
atgggccagtgctacaacctggaggacgacgacctggagaccgacgtgaacaagctgtccagtaagcctggcctggacagacccgaggaggagctgatgcagtacgaggtgatgtgcctcgaactgtcctatagcttcgaagaactgcagagtaaactgggcgacgacctaaattcggagaaaacacagtatgctaatcaccatcatattccagctgccgcgagctccaaacagcattgctattccaaagatcaaagttcatgcggccaggagcgcgaatatgccgtgcagactagcctgctgtgcagagtgaaaaccgggaggagtaccgtccatctggggtcaaagaaaaatcccggggtgaacctgtatcagaacgtccagtcgaattctcttaggagagattcctccgagagcgaaatccccgacatccaggcatcgcctaaggccgacgcttgggacgtggacgctatcttttgccctagaatgtcggcctcattttctaattctactaggacacgcgaagtggttaaagtgatcgacaagctgttacagacgcacttgaaaagggttcccttccatgatccatatctgtatatggctaaggcccgacgaacttccagtgttgtggatttcaagatgatggcgtttcccgatgtttggggtcactgccccccaccaaccacgcagcctatgctggaacgcaagtgcggcgtgcaacgaatccggatatttgaggacattcggagactgattcagccatccgacgtgatcaataaggtggtcttcagtctggatgagccatggcccttgcaggataatgccagcaactgccttcgcttcttttccaagttcgagagcgggaatctgagaaaggcaattcaggtgagggaattcgagtacgatctgttggttaatgccgatgtgaactccacccagcatcaacaatggttttactttaaagtttcaggcatgcaggctgctattccatatcacttcaacattattaactgcgaaaagccaaacagtcaattcaattacggcatgcagcccacactgtatagtgttaaagaagcactgctggggaagcccacttggatcaggactggacacgagatttgctattataagaatcactacagacagtcaactgccgtggctggtggagcatcaggcaagtgttattacaccctgaccttcgcagtcaccttccctcattccgaggacgtctgctatctggcctaccactacccatatacctacactgcactcatgacacacctcgacattctggaaaaaagtgtcaaccttaaggaggtgtattttaggcaggacgtcctttgccagacactcggtggcaatccatgtcctctcgtgacaattactgcaatgcctgagagtaatagtgatgagcatctggaacagttcaggcaccgcccctaccaggtgatcacagcccgggtccaccccggtgagtccaatgcctcctgggtaatgaaaggcacacttgagtttctagtgtccagtgatccggttgcccgtttacttagagaaaacttcattttcaagataatcccgatgctgaaccctgacggcgttataaatggcaaccacagatgttccctgtctggcgaagacctcaaccgccagtggctaagcccttcagctcacctgcagcctacaatctatcatgccaaaggcctcctgtatcacttatcctcaatcggccgcagccctgttgtgttctgtgacttccatgggcattcccaaaaaaaaaacgtgtttctctacggttgctcaatcaaagagacactgtggcaggctgcctgcacagtggggacctctacgatcctggaagaagtaaactaccggaccttacctaagattctcgataagctggctcctgcgttcactatgagctcctgttctttcctagttgagaaatcaagagccagtactgcgcgagtggtggtctggagggagatgggcgtgtctcggtcatacactatggaatcaagttactgcggctgcaatcaaggaccctaccagtgcactcagagactgcttgagcgaaccaaaaacgaacgggcccacccagttgacggcctccagggactccaatttgggactagagaacttgaggaaatgggcgctatgttctgcctgggacttctgattctggaattaaaatcggcatcctgcagtcaccagctgctggcccaggcggctaccctcctctctgctgaggaggacgcgctggaccagcacctgcagcgcctgaagtccagtaacttcctccccaagcatatttggtttgcctaccacttctttgctattaccaatttctttaaaatgaatctactccttcacgtgtcaccttag

SEQ ID NO: 243093 - DNA, 3189 bp, Artificial Sequence
  derived and/or modified sequence
atgatcagcaagggcggcagcgaggccctgctgcagaccctggtggataccgcacggactgcaccccctgattatgatatcttgctcccactgtttagactcctggccaaggtgggacttagagacaagaaaatcgggaggaaggcacttgagttagaggcacttgatgtgaccctaatccttgcgcgtaagaacctgtcccacggtcagaatctgttacactgcctgtgggccctacgcgttttcgctagcagcgttagtatgggcgcgatgcttggcatcaatggagcgatggaactgctgtttaaagtgattactccatacactagaaaacgaacacaggcgattagagccgctacggaggtcctggccgcactgctgaagagcaagtcaaatgggcgtagagcggtgaatcggggttatgtgacctcgctgctgggcttacaccaggactggcacagccatgacacggccaacgcgtatgttcaaatcaggagaggcttgctcctctgcctgagacacatcgccgcactgagaagcggaagggaggcttttttggctgcgcaaggtatggagattctattcagcacaacacagaattgccttgatgataagtctatggagcccgttatcagcgtggtgctacagatccttcggcaatgctaccctacaagtccactgccacttgtgactgctagttcggcctacgcgttcccggtgcccgggtgcataactacggagcctcctcacgatctccctgaagaggatttcgaggacgatggtgatgatgaagtcgacaaggacagcgacaccgaagacggaaaagttgaagatgacgatctggagaccgacgttaataagttgtcttcgaagcccgggctcgaccgcccagaagaggagttaatgcaatacgaggtgatgtgtttggaactttcttattcttttgaagaactgcagagtaaactgggagacgatctcaattccgagaaaacacagtacgccaatcaccaccacattccggcagccgcgtcgagtaagcagcattgctatagcaaggatcagagtagttgcggccaggagagagagtatgccgttcagacatctctgctttgtagggtcaaaacagggcgctctaccgtgcatctgggatccaagaagaatccaggggtcaacctctaccagaacgtgcagagtaactccctgagaagggattcatcagagtctgaaataccagacatacaggcttccccaaaagccgatgcatgggacgtggatgcaattttttgtcctcgcatgagcgcgtccttctccaacagcacacggactcgcgaagtcgtgaaagttatcgacaaattgttgcagactcatctaaagcgggtcccatttcatgacccttacctgtacatggctaaagcgcggaggacctccagtgttgtcgactttaagatgatggctttcccagacgtatggggacattgcccgccgccaacaacccagccaatgcttgagcgtaaatgcggcgttcagagaatacggatatttgaagacataagaaggctaattcagcctagcgacgtcatcaataaggtggtgttctctctggacgaaccttggcctctgcaagacaatgccagcaattgcctgcgttttttttctaaattcgagtccgggaacttacggaaggcgatccaggtcagggagtttgagtatgatctcctggttaatgcagacgtgaactcgacccagcaccagcagtggttctatttcaaagtgtccggcatgcaggctgctattccttaccacttcaacataatcaattgtgagaagcccaacagccagttcaattacggcatgcagccgacactgtattctgtaaaggaggcacttttaggaaagcccacctggataaggacaggacatgagatttgttactacaagaatcattaccgccagagcacagccgttgccgggggggcatctggaaagtgttactacactttaaccttcgccgtgacctttccccattccgaagatgtatgttatctcgcatatcattacccgtatacctacaccgccctgatgacgcatctcgacatcttagaaaaatcagtgaacctgaaggaggtctactttcgacaggatgtgctgtgtcaaacgctgggcgggaacccctgcccgctggtgactattaccgctatgcccgagagcaactccgatgaacatctggaacagtttcgccacagaccctaccaggtgatcactgcacgggtacatcccggagagtcaaatgcgtcctgggtgatgaagggcacgctggagttcctggtgtcttctgacccagttgccagactgctgcgtgagaatttcatatttaagataatacctatgctaaatcccgatggagtaatcaacgggaaccatcggtgttcactctccggcgaagatctcaacaggcaatggctgtccccatctgcacacctacagccaacgatctaccatgctaaaggcttgttgtaccacctgtcgtcgattggccggagccccgtagttttttgcgattttcacggccactctcaaaagaagaatgttttcctatacggatgctctatcaaagagacactgtggcaagcagcctgcaccgtcgggacatccacaatactggaagaggtgaattaccgtactctgccaaagatcttagacaagctcgcgcccgccttcacaatgtcctcttgctcttttctagtggagaaatcacgtgcctctacagcccgcgtcgtggtgtggcgagagatgggcgtatccagatcctatacaatggagagtagctattgtggctgcaatcaaggcccataccagtgcacacagagattgcttgaaagaaccaagaatgagcgagctcatcccgtggacggcctgcaggggctgcagtttggaacgcgcgagcttgaggagatgggcgcgatgttctgtttgggactactgatcctggaactcaaatctgcgtcatgctcccatcagctcctcgctcaggctgcaaccctgctcagtgctgaagaagacgctctggatcagcacctccagcggctcaagtcctcgaatttcctgcccaagcatatctggttcgcatatcattttttcgctattactaattttttcaagatgaatctactgctccacgtatctccctag

SEQ ID NO: 243094 - DNA, 3189 bp, Artificial Sequence
  derived and/or modified sequence
atgatcagcaagggtggcagtgaagctcttctgcagaccctggtagacacagcgaggacagctcctccagactatgacatcctcctgcctctcttccggctgctggccaaagttggcctaagagataaaaagattggacggaaggccctagaattggaagcacttgatgtgacattgattctggccaggaagaacctatcccatggccagaatctcctccactgtctctgggctctgcgtgtgtttgcctccagtgtctccatgggagccatgctgggaattaatggagccatggaactgcttttcaaggttattactccttacacccgaaagcgcacccaagcaatcagggcagccactgaagttttggcagcattgctgaaatccaagtcgaacggccgcagagcagtgaaccgaggctacgtcaccagcctgctcgggctgcaccaggactggcacagccatgacacagccaacgcctacgtgcagatccgacggggcttgctgctctgcctcaggcacattgctgccctccggtccggcagggaggccttcctggcagcacagggcatggagatcctcttcagcaccacacagaactgcctggatgacaagagcatggagcccgtcatctctgtggtgcttcagatcctgaggcagtgctaccctacgagtccacttcccttggtcacagccagcagtgcctatgccttcccggtccccgggtgcatcaccactgaacctccacatgatctacctgaagaggattttgaagatgatggcgatgatgaagtggacaaagactctgatactgaagatgggaaagtggaagatgatgacttggaaacagacgtgaacaagctgagttccaaacctggtcttgaccgacctgaagaggaactgatgcaatatgaggtgatgtgtcttgagctctcctatagctttgaggaactgcagtccaaacttggagatgatttgaactctgaaaagactcagtatgccaatcaccaccacattccagccgctgcctcctcaaaacagcattgctacagcaaggaccaaagctcctgtgggcaagaaagagaatatgctgtccagacttcccttctgtgcagggtgaagacgggaaggtccactgtgcatctaggctccaaaaaaaatcctggagtgaacctgtaccaaaatgtgcaatccaatagtctcaggagagattcttctgaaagtgaaatccctgacattcaggcttccccgaaagcagatgcctgggacgtagatgcaattttctgcccaaggatgagtgcctccttttctaattccactaggactagagaagttgtcaaagtaatagataagcttctgcagacacatctgaagcgtgtccctttccacgatccctatctttatatggccaaagccagaagaaccagctctgtggtggacttcaagatgatggcatttcctgatgtctggggacactgtccccctcccaccacccagcctatgttggaacgaaaatgtggagtccaaaggatcaggatatttgaggatattcggaggctcatccagccaagtgatgttataaataaagttgtcttcagtttagatgagccttggcctttgcaagacaatgcttccaattgtttacggttcttctccaaatttgagtcaggaaatcttcgcaaagccatccaagtgcgtgagttcgagtatgacttgctggtcaacgcagatgtgaatagcacccagcaccagcagtggttctatttcaaagtgagcggtatgcaggcggccatcccttaccacttcaacatcatcaactgtgagaagcccaacagccagtttaattatgggatgcagcccaccctatattctgtgaaggaggctcttcttggcaaacccacctggataaggacaggccatgaaatatgttattacaaaaatcattatcgccagagtacagctgttgcaggcggagcatctgggaagtgctactataccctcacctttgctgtcaccttcccacacagtgaggatgtctgctacctggcctaccactatccctatacctacacagccctcatgactcatcttgacatcctggaaaagagtgtcaacctcaaagaggtctacttccggcaagatgttctctgccagacgctgggagggaatccgtgtcccttggtgaccatcacggccatgcctgagtccaacagtgatgagcatctagagcagttccgacatcgtccatatcaggtgatcactgctcgagttcatccaggagagagcaatgccagttgggtgatgaagggtaccttggagttcctggtcagcagtgaccctgtggctaggctcttgagggaaaacttcatcttcaagatcatacccatgctcaacccagatggtgtcatcaacggcaaccacagatgctcactgagcggggaagatttgaacagacaatggctttctcccagtgctcatctgcagccaaccatttaccatgccaaaggcctcctctaccacctgagcagcattggccgaagtcccgtggttttctgtgacttccatggccactcccaaaagaagaatgtgttcctttatggctgtagcatcaaggaaaccttgtggcaagcagcatgcactgtgggcacatctactatcctagaggaggtcaactacaggactcttcccaaaatccttgataagctagcaccagcattcacaatgagcagctgcagctttctcgtggagaaatctcgagcttccacggcccgggtggtggtgtggagagagatgggggtgtccagaagctacaccatggaaagcagctactgtggctgcaaccagggcccttatcagtgtacacagaggctgttggagaggacaaagaatgaaagggctcacccagtggatggccttcagggtctacagtttggtaccagagaactggaggagatgggagccatgttctgtttgggcctcctcatcctggagctcaaatctgccagctgcagccatcagctcctggctcaagctgcaactctgctgagtgctgaggaggacgctctggaccagcacctccaacgattaaaatcatccaatttcctgccaaagcatatttggtttgcttaccacttttttgccattacaaactttttcaagatgaaccttcttctgcatgtctccccgtga

SEQ ID NO: 243095 - DNA, 2382 bp, Artificial Sequence
  derived and/or modified sequence
atggggcagtgttacaacctggaggacgacgacctggagacggacgtaaacaagctctctagtaaacctggcctggatcgacccgaggaagaactgatgcagtatgaagtcatgtgtctcgagttgtcctactctttcgaggaactgcagtcgaagttaggagatgatcttaactctgagaagacccagtacgccaaccaccaccacatcccagcagcagcttcgagcaaacaacactgctattcgaaggatcaatcaagctgcggacaagaacgagagtacgcggtccagacttccttgctgtgcagggttaaaactggacggtcgaccgttcatctgggctccaagaaaaatcccggagtgaacttataccagaatgtccagagcaatagcctgaggcgcgatagtagcgagtccgagattccggacatccaggcttcacctaaagccgatgcctgggacgtagatgccatcttctgcccacgcatgagcgcctcgttttcaaactcgacccgaacaagagaagtggtcaaggtcattgataaacttcttcaaactcacctcaaaagagtaccattccatgacccatacttgtacatggcaaaggctaggcgtacctcctcagtggttgactttaaaatgatggcattccccgacgtgtggggacactgcccaccgccaactacacagccaatgctcgagagaaagtgcggtgtgcagagaatccgcatattcgaggacattcggagattgatacaaccaagcgacgtcattaacaaggttgtcttctcattggacgaaccctggcccctgcaggataatgctagcaattgtctgcgattcttctctaaatttgaatccgggaacctgcggaaagcgatccaggttagagagtttgagtatgacttgctggtgaacgcagatgttaattccacccaacaccagcagtggttctattttaaggtcagcggtatgcaggccgctatcccgtatcattttaatatcataaattgcgagaagcctaatagccagtttaactacgggatgcaacccaccctgtatagtgtaaaagaggcattgctggggaagcccacatggatccggaccggacacgaaatttgttactacaaaaatcattacagacagtctactgccgtcgccggtggcgcttctggaaagtgttactatacattaacttttgctgtgacatttccccattcagaagatgtgtgttacctcgcgtatcactacccttatacttataccgcactcatgacccacctcgatatccttgagaaatccgtcaacctaaaggaagtgtatttccggcaggacgtactgtgccagacgctcgggggtaatccttgtcctcttgtgaccatcaccgctatgcccgaaagcaacagcgatgaacacctggaacagtttcggcataggccgtatcaggtaattaccgcacgggtacacccaggtgagtccaatgctagctgggtcatgaagggtactctggagtttctggtgagtagtgacccggtggccagactcctccgcgagaatttcattttcaagataattcctatgttgaatcctgacggtgtgattaacggcaatcaccgatgctctctatccggcgaagacttaaacagacagtggctttctcctagcgcccatttgcagcctactatttatcatgccaagggattgttgtaccacctgtcctctatcggaagatctcccgttgttttctgcgactttcacggccatagccagaaaaagaacgttttcctgtatggttgttccattaaggaaactctgtggcaggccgcttgcaccgttgggacatcaaccatcctagaagaggtcaactaccggaccctaccaaagatccttgacaaactggcacctgccttcacaatgagcagctgctccttcctggtggaaaagtcccgtgcttccaccgctagggtggtcgtgtggcgcgagatgggagtctccagatcttataccatggagtccagttactgcggttgtaaccaggggccataccaatgtactcagcgcctactggaacggactaagaatgagcgggctcaccctgtggacggactacagggattgcaattcggaacccgagagctcgaggagatgggggcaatgttctgcctcggactcctcatactcgagctgaagtcagctagctgttcacatcagctgttggcacaggctgcgacgctcttatccgcagaagaggatgctctggaccaacaccttcaacggttgaagtcgagtaatttcctcccaaaacatatttggttcgcataccacttcttcgcgatcacaaattttttcaaaatgaacctattacttcatgtttcaccctag

SEQ ID NO: 243096 - DNA, 3189 bp, Artificial Sequence
  derived and/or modified sequence
atgatctccaaaggcggatcggaagccctgctgcagaccctcgtcgacacggccagaaccgctcccccagattacgacattcttctgccactgttcagactcttggcgaaagtcggactgcgcgacaagaagataggacggaaggctttggagttagaggcgctagacgtcactttgatcctggctaggaaaaatctctcccacggtcaaaatctgctacattgtctctgggcactcagagttttcgcctcatccgttagtatgggcgcaatgctgggcatcaacggcgctatggagcttttatttaaagtaattacaccctatactcggaaaagaacacaggcgattagggctgcgacggaggtgctggcggcacttctgaaatccaagtccaatggtcggagagcagtaaatcgtggttatgtaacgagcctactgggactgcatcaggattggcattcacacgacacagcgaatgcatacgtgcagattagaaggggccttttgttgtgtcttcgccatatcgccgcacttcgatcaggcagagaagccttcttggcagctcaagggatggaaatcctcttctcgaccacacaaaactgcctcgatgataaatcgatggaaccggtcattagcgtcgttctgcagattttacggcagtgttatcctacatcacctctgcccctagtaacggccagcagtgcctatgctttccctgtgccaggctgcatcaccacggaaccacctcacgacctccccgaggaggattttgaagacgatggtgacgacgaagttgacaaggatagtgataccgaagacggaaaggtcgaggacgatgatctggagaccgacgtcaataaactgtcaagtaagccaggactggaccggccagaggaagaattaatgcagtatgaggtcatgtgcttggaactctcctattccttcgaggagctccagtccaagctgggagatgatctcaatagtgaaaagactcaatacgccaaccaccaccacatccctgcggcagcctctagcaaacagcattgctatagcaaagatcagagctcctgtggccaggaacgtgagtacgccgttcagacatctttgctgtgtagagtgaaaaccggcagatccactgtccaccttggaagcaaaaaaaatcctggcgtgaacctctatcagaacgtccagtcaaacagccttcgtcgagattcttccgaatccgaaatccctgatattcaagcgtcgcccaaggccgatgcgtgggacgtcgatgcaatcttctgtcctcggatgtcagcttctttcagcaactcgactaggacccgggaagtggttaaggtgattgacaagctgctgcaaacccacctcaaacgggtgccttttcacgacccgtatctctacatggcgaaggctcgaaggacttcaagcgtagtggacttcaaaatgatggcgtttccagatgtctggggacattgccctccaccaacaacacagcccatgctggaacgcaagtgcggagtgcagagaattcgcattttcgaggacattcggagactcatacagccaagcgatgtgattaataaggtagtgttctcccttgatgaaccctggcccttgcaggacaacgcctccaattgtctcagatttttcagcaaatttgaatctggaaatttgcggaaggccatccaggtacgagagttcgagtatgaccttctagtgaacgctgacgtcaattctacccaacaccagcagtggttttatttcaaagtgtccggtatgcaggctgccataccttatcactttaacataattaattgtgagaagccaaacagccaatttaactatgggatgcaacccactctgtacagcgtgaaagaggccttgcttgggaagcccacatggattcgaactgggcatgagatctgttactataagaatcattacaggcagtctactgctgttgctggaggggcttcagggaagtgctactatactctgacgttcgccgtaactttccctcacagcgaagacgtgtgctatctggcctaccactacccttatacctacacagccttaatgacgcacctagacattctcgagaagagtgttaacctaaaagaggtgtattttagacaagatgttctgtgccaaactctgggcggaaatccgtgtcctttagtgaccatcactgctatgccagagtccaacagcgacgaacacttagagcagtttcggcacaggccatatcaggtaataaccgccagggtgcaccccggagaaagcaacgcgagctgggtgatgaagggaacccttgagtttctcgttagttccgatcccgtcgctaggctcctccgggaaaacttcatatttaaaatcattcccatgctgaaccccgatggcgtgattaatggcaaccaccggtgtagcctctcaggcgaagacttgaaccgtcagtggctcagccccagtgcccaccttcagcctaccatatatcatgccaagggcctgctgtaccacctgagctccataggtcgatcccctgttgtgttttgcgactttcacggccactcccagaaaaaaaacgtgtttctttacggctgttccataaaggaaacgctgtggcaggccgcatgcacggttggcacctctaccatactggaggaagtgaactatagaacgctgccaaaaattcttgacaaattagcgccagccttcactatgagctcctgctcattccttgtcgaaaaatccagggcctcaactgccagggtggtcgtctggcgggaaatgggagtatccagatcatataccatggagagcagttattgtggctgtaaccagggtccgtaccaatgtactcagaggttgctggagcgaaccaaaaatgaaagggcccatcccgtggacggactgcagggtttacaattcgggacaagagaactggaggagatgggtgctatgttttgcctgggtctcctcatcctggagctgaaatcggcctcgtgttcacatcagctcctggcccaggcagcgacactgctctccgcagaggaggacgcattggaccagcatctgcagcgactgaaaagttcaaatttcctgcccaagcacatctggttcgcataccactttttcgcaatcacaaattttttcaagatgaatcttttgcttcatgtcagtccatag

SEQ ID NO: 243097 - protein, 506 aa, Artificial Sequence
  derived and/or modified sequence
MASGDLYEVERIVDKRKNKKGKWEYLIRWKGYGSTEDTWEPEHHLLHCEEFIDEFNGLHMSKDKRIKSGKQSSTSKLLRDSRGPSVEKLSHRPSDPGKSKGTSHKRKRINPPLAKPKKGYSGKPSSGGDRATKTVSYRTTPSGLQIMPLKKSQNGMENGDAGSEKDERHFGNGSHQPGLDLNDHVGEQDMGECDVNHATLAENGLGSALTNGGLNLHSPVKRKLEAEKDYVFDKRLRYSVRQNESNCRFRDIVVRKEEGFTHILLSSQTSDNNALTPEIMKEVRRALCNAATDDSKLLLLSAVGSVFCSGLDYSYLIGRLSSDRRKESTRIAEAIRDFVKAFIQFKKPIVVAINGPALGLGASILPLCDIVWASEKAWFQTPYATIRLTPAGCSSYTFPQILGVALANEMLFCGRKLTAQEACSRGLVSQVFWPTTFSQEVMLRVKEMASCSAVVLEESKCLVRSFLKSVLEDVNEKECLMLKQLWSSSKGLDSLFSYLQDKIYEV

SEQ ID NO: 243098 - DNA, 1521 bp, Artificial Sequence
  derived and/or modified sequence
atggcctcaggcgacctgtatgaggtggagaggatcgtggacaaacggaagaataaaaaagggaaatgggagtatctgatacggtggaagggctatggaagtaccgaggatacctgggaacccgagcaccacctgctgcactgcgaggagttcattgatgagtttaatggcttacacatgtctaaggacaagcgtatcaagagcggaaaacaatctagcacctcgaaacttcttcgggactcccgaggtccgagcgtggaaaaactcagccacagaccatccgatcccggaaaaagcaaaggtacctcccataaacgaaaacgcattaatcctccgctggctaaacctaagaaaggctattctggaaaaccatccagcgggggggatagggcaaccaagacggtcagctacagaacaaccccgagcggtctccaaatcatgcccttgaaaaaaagtcaaaatggcatggagaacggcgatgctggctcagaaaaggatgagagacactttggaaacggctcccaccagcctggattagatctaaacgaccacgtgggcgaacaggacatgggcgagtgcgacgtgaaccacgcgacactagccgaaaacggactgggaagcgctttgactaacggcggactcaatttgcattcccctgtgaagaggaaattagaggccgaaaaggattacgtctttgacaagaggctgagatattcagtacggcaaaacgaaagtaactgtcggtttcgggacattgtggttcggaaggaagaggggttcactcacattctgttgagttctcagaccagtgataacaacgcattgaccccggaaattatgaaggaagtcaggcgggcactgtgcaacgcagccacagatgatagcaagctcctgctgttaagtgctgtgggatccgtgttctgttcaggattagattatagctacctcatagggcggctatcctccgatagacgcaaggaaagcactcggatcgcggaagccatcagagactttgtgaaggcttttattcagttcaaaaaaccaatagtcgtcgctattaatgggccagctttaggactcggtgcttccattctgcctctgtgtgacattgtgtgggcctctgaaaaggcttggttccaaactccttatgccacaattaggctgacaccagccggttgtagtagttacacgttcccacagattctcggagtggctctggccaacgagatgttgttctgcggccgcaaattaacagcgcaagaggcatgctcaagagggctggtgagccaggtgttttggccaacaacattttcacaggaagtgatgttaagagtaaaggaaatggcttcttgttccgcagttgtgctggaagagtccaagtgcctggtcagatccttcctgaagtctgtgctggaggacgtgaacgagaaagaatgcctcatgctgaaacagctgtggtcatcatctaaagggctcgacagcctgttcagctaccttcaggacaaaatatatgaagtctag

SEQ ID NO: 243099 - DNA, 1521 bp, Artificial Sequence
  derived and/or modified sequence
atggccagcggggacctgtatgaggtggagcgcatcgtggacaagaggaagaacaagaagggcaagtgggagtacctgatccgctggaagggctacggcagcacagaggacacctgggagcctgagcaccacctgctgcactgtgaggagttcattgatgagttcaacggcctgcacatgagcaaggacaagaggatcaagagcggcaagcagagcagcaccagcaagctgctgcgggacagccggggccccagcgtggagaagctgagccaccggcccagcgaccccgggaagagcaagggcaccagccacaagaggaagaggatcaacccccccctggccaagcccaagaagggctacagcggcaagcccagcagcggcggggaccgggccaccaagacagtgtcctaccgcaccacccccagcggcctgcagatcatgcccctgaagaagagccagaatggcatggagaatggagatgctggcagcgagaaggatgagcggcactttggaaatggcagccaccagcccggcctggacctgaatgaccacgtgggggagcaggacatgggagaatgtgatgtgaaccacgccaccctggccgagaatggcctgggcagcgccctgaccaatggaggcctgaacctgcacagccctgtgaagaggaagctggaggccgagaaggactatgtgtttgacaagaggctgcgctacagcgtgcggcagaatgaaagcaactgccgcttccgggacatcgtggtgaggaaggaggagggcttcacccacatcctgctgagcagccagaccagtgacaacaatgccctgaccccagagatcatgaaggaggtgcggcgggccctgtgcaatgctgccacagatgacagcaagctgctgctgctgtctgctgtgggctctgtgttctgcagcggcctggactacagctacctgattggccgcctgagcagtgacaggaggaaggagagcaccagaattgctgaggccatccgggactttgtgaaggccttcatccagttcaagaagcccatcgtggtggccatcaatggacctgccctgggcctgggcgccagcatcctgcccctgtgtgacatcgtgtgggccagcgagaaggcctggttccagaccccctatgccaccatccggctgaccccagctggctgcagcagctacaccttcccccagatcctgggcgtggccctggccaatgagatgctgttctgtggcaggaagctgacagcccaggaggcctgcagccggggcctggtgtcccaggtgttctggcccaccaccttcagccaggaggtgatgctgcgggtgaaggagatggccagctgcagcgctgtggtgctggaggagagcaagtgcctggtgcgctccttcctgaagtctgtgctggaggatgtgaatgagaaggagtgcctgatgctgaagcagctgtggagcagcagcaagggcctggacagcctcttctcctacctgcaggacaagatctatgaggtgtag

SEQ ID NO: 243100 - DNA, 1521 bp, Artificial Sequence
  derived and/or modified sequence
atggccagcggcgacctgtacgaggtggagcggatcgtggacaagagaaaaaacaaaaagggcaagtgggagtaccttattaggtggaaaggttacggatcgacagaagacacctgggaacccgagcaccatctactgcattgtgaggaattcattgatgaattcaacggcctgcacatgtctaaggataagcggatcaaaagtgggaagcaatcatcaaccagtaagctcctccgggactcgcgcggcccaagcgtggaaaaactgagtcaccgaccctctgaccccggcaagtcaaaaggaacttcccacaagcggaagcgtattaacccaccactggccaagcccaagaaggggtatagtgggaaaccgagctccggcggcgaccgggctacgaaaactgtaagctaccgaactactccttctggcctccaaatcatgcccttgaagaaatcccagaatgggatggagaatggggacgctggttcggagaaggatgaacgccattttgggaatggctcccaccagcccggtctcgacttgaacgaccatgtgggggaacaggatatgggggaatgtgacgtgaatcatgctaccctcgccgagaatggcttaggctctgcactgacaaacggcggcctgaaccttcatagtccagtaaagcggaaactggaggctgagaaggactacgtttttgataagagactgcggtatagcgtgcgacagaacgagagcaattgtcgcttcagagacattgtggtaaggaaggaggagggtttcacacatattcttttgtcttctcaaacgtctgacaacaacgctctgacacccgagatcatgaaggaagtccggagggctttgtgcaatgccgctacagacgactccaagctgctactactctccgccgtgggctcagtattttgttcggggctggattactcctatctgataggccgcctgtcttccgatcgccggaaagaaagtactcggatagcagaagctatcagggactttgttaaagctttcatccaattcaaaaaaccaatcgtggtggctattaatggaccagccctcggcctgggagccagtatcctgcctctgtgcgacattgtctgggcctcagaaaaagcctggttccagactccttatgccaccatccggctgacacccgcagggtgttcctcttatacgtttccccagatcctcggcgttgccctggccaacgaaatgttgttctgcggacgcaagctaaccgcccaggaggcttgcagtcggggtttggtgtcgcaggttttttggccaaccaccttctctcaggaggtcatgcttagggtaaaggagatggcctcctgtagcgcggtcgtcctggaggagtcaaaatgtctggtaagatcattccttaagagcgtcttagaggacgtgaatgagaaagagtgcctgatgctgaaacagctgtggtcctcttccaagggcttagattcactcttctcctacctgcaggataaaatttatgaggtgtag

SEQ ID NO: 243101 - DNA, 1521 bp, Artificial Sequence
  derived and/or modified sequence
atggcctccggtgacctttacgaagtggaacggatcgtggacaaaaggaagaacaagaagggcaagtgggagtatctcattcgctggaaagggtatggttctactgaggacacgtgggaacctgaacaccaccttctacactgtgaagagttcatcgacgaattcaatggactccacatgagcaaggataaacgcatcaaaagtggaaaacaaagcagcactagcaaattgctgcgcgatagtagaggacctagcgttgagaagctttcccacaggccaagcgaccctggaaaaagcaaaggaacaagtcataagagaaagcgcatcaatcctcctctcgctaagccgaagaagggctactccgggaaaccctcatccgggggtgacagagcaaccaagaccgtttcttacagaacaacgcctagtgggctgcagatcatgcctctgaagaagtcacaaaacgggatggagaatggagatgctggatctgagaaagatgagcgccacttcgggaacggaagtcatcagcccggactggatttgaacgaccacgtgggcgagcaggatatgggcgaatgcgatgtgaaccatgcgacgctcgccgaaaatggccttggatcagcccttaccaacggcggattgaacctgcactctccagtgaagagaaagctggaggctgaaaaggactacgttttcgataagagactccgttattccgtccgccagaacgagagtaattgtcgctttcgtgatattgtcgtgcggaaggaggagggattcacgcatatcctcctgtcaagtcaaacctctgataacaacgcgctgacaccagagataatgaaggaagtgcgtagggccctgtgtaatgccgctacagacgattccaagttactgcttctatctgcggtcggatcagtgttctgcagtggcctggactatagctatctgattggacgattgagctctgataggcgaaaggagagtacccggattgctgaggcgattagagactttgtgaaagcttttatccagtttaaaaagccaatcgtcgtagctattaacggccctgctctgggactgggagcctcaatcctgcccctgtgtgatattgtctgggccagtgagaaggcctggttccagaccccctacgccaccattaggctgacgccagccggatgtagctcgtatacattcccccagattttgggtgtggctctagccaacgagatgttgttctgcggaagaaagctgacggcccaggaggcctgtagtcgcggattggtaagtcaggtcttttggcccacaacattctctcaggaggtgatgctgagagtgaaagagatggcctcctgtagtgccgtggtactcgaggaatccaagtgcctcgtgcggagcttcctgaagagtgtgttagaggacgtgaacgagaaagaatgcctcatgctaaagcaactttggagctcctctaaaggcctggacagcctgttcagctacctgcaggacaaaatctacgaggtgtag

SEQ ID NO: 243102 - DNA, 2236 bp, Artificial Sequence
  derived and/or modified sequence
acacacgcgcgcacacacacgcgcacaccggaccccgcgcgcacacgcacggagggcgcgagcgagcagacgcgcacaccggcgagccaagttccgcagcctggcatggcttctggggacctttacgaggttgaaaggattgtagacaagaggaagaacaagaaaggaaaatgggagtatcttatccgatggaaaggctacgggagcaccgaggacacgtgggagccggagcaccacctcttgcactgtgaggagtttattgatgaattcaatgggttgcacatgtccaaggacaagaggatcaagtcagggaagcagtccagtacctccaagctgctgcgtgacagtcgaggcccgtcggttgagaaactgtcccacagaccttcagatcctggaaagagcaaggggacctcccataaacggaagcgaattaaccctcccctggccaagccaaaaaaagggtattcaggcaagccctcttcaggaggtgacagggccaccaagacggtgtcttacaggactacccccagtggtttgcaaataatgcccctgaaaaagtctcagaacgggatggaaaatggggacgccggctctgagaaggatgagaggcactttggaaatgggtcccatcagcctggcttggatttgaatgatcatgttggagagcaagatatgggtgaatgtgacgtgaatcacgctacactggcggagaacgggctcggctctgctctgaccaacgggggattgaacctgcacagtccagtgaagaggaagctggaagcggagaaggactacgtctttgacaaaaggctcagatacagtgtccgccagaatgaaagcaactgtcggtttcgagacatcgttgtgcggaaggaagaagggttcacgcacatcctgctgtccagtcagacctcggataacaatgccctgacacctgagatcatgaaagaagtccggcgagcgctctgcaacgcagccacagacgacagcaaactgctgctcctcagcgcagtggggagcgtgttctgcagcggcctggattattcctacctaattggccggttgtccagcgaccggcgaaaggagagcactcggattgcagaagccatcagggactttgtgaaggcctttatccagtttaagaagcctatcgtggtggccatcaatgggccggccctgggcctgggtgcctccatcctgcccctctgtgacatcgtgtgggccagtgagaaggcctggttccagacgccctacgccaccatccgcctcacgcctgctggctgctcctcctacaccttcccccagatcctgggcgtcgcgctggccaatgagatgctgttctgtgggcggaagctcaccgcccaggaggcctgcagcagggggctggtgtcgcaggtcttctggcccaccacgttcagccaggaggtcatgctgcgggtcaaggagatggcatcctgcagtgccgtggtgttagaggagtccaaatgcctcgtgcggagcttcctgaaatcagtgctggaagacgtgaacgagaaggaatgcctcatgctcaagcagctctggagctcctccaaaggccttgactcccttttcagctacctgcaggacaaaatttatgaagtctgaggggccccagctcacgggcccccaacttccagctctgccctgtgtttcggaaaccagagcacagtgtctgccccggccaaggagtttgtcaaggtgtctctttatacgtagggttgtgtccatttcctcgtgtcctttggttgctcctccttggtttgattttgtgtaatggatggaaaacgcagcatacttggcctcccccacctccctgcccttcctggccagagagctgtccaaggctgtatcttcccagggctccgccaagcaccgctgtcctttccccacttgctgaaatgcaccatgacggtccaggaaggggaagaccactttcacattcttctgactcaggctgtgtctacacagtgcctctgacttggagacttggccatcatggctctctctggttgtatttagatcgggtgtcagaggacgaccaatcttagggaatttccagaccaatgagcaaaatgattgtgcacacctggcctcagtctcctttccgacgcaaatctgtgtgactattagggcttggtcttaaaacccaattgagtgatttgcaaacccagatattgtacatttagaaatgttttgttaaatatatatttttaaa

SEQ ID NO: 243103 - DNA, 1521 bp, Artificial Sequence
  derived and/or modified sequence
atggccagcggcgacctgtacgaggtggagagaatcgtggacaagagaaagaacaagaagggcaagtgggagtacctgatcagatggaagggctacggcagcaccgaggacacctgggagcccgagcaccacctgctgcactgcgaggagttcatcgacgagttcaacggcctgcacatgagcaaggacaagagaatcaagagcggcaagcagagcagcaccagcaagctgctgagagacagcagaggccccagcgtggagaagctgagccacagacccagcgaccccggcaagagcaagggcaccagccacaagagaaagagaatcaacccccccctggccaagcccaagaagggctacagcggcaagcccagcagcggcggcgacagagccaccaagaccgtgagctacagaaccacccccagcggcctgcagatcatgcccctgaagaagagccagaacggcatggagaacggcgacgccggcagcgagaaggacgagagacacttcggcaacggcagccaccagcccggcctggacctgaacgaccacgtgggcgagcaggacatgggcgagtgcgacgtgaaccacgccaccctggccgagaacggcctgggcagcgccctgaccaacggcggcctgaacctgcacagccccgtgaagagaaagctggaggccgagaaggactacgtgttcgacaagagactgagatacagcgtgagacagaacgagagcaactgcagattcagagacatcgtggtgagaaaggaggagggcttcacccacatcctgctgagcagccagaccagcgacaacaacgccctgacccccgagatcatgaaggaggtgagaagagccctgtgcaacgccgccaccgacgacagcaagctgctgctgctgagcgccgtgggcagcgtgttctgcagcggcctggactacagctacctgatcggcagactgagcagcgacagaagaaaggagagcaccagaatcgccgaggccatcagagacttcgtgaaggccttcatccagttcaagaagcccatcgtggtggccatcaacggccccgccctgggcctgggcgccagcatcctgcccctgtgcgacatcgtgtgggccagcgagaaggcctggttccagaccccctacgccaccatcagactgacccccgccggctgcagcagctacaccttcccccagatcctgggcgtggccctggccaacgagatgctgttctgcggcagaaagctgaccgcccaggaggcctgcagcagaggcctggtgagccaggtgttctggcccaccaccttcagccaggaggtgatgctgagagtgaaggagatggccagctgcagcgccgtggtgctggaggagagcaagtgcctggtgagaagcttcctgaagagcgtgctggaggacgtgaacgagaaggagtgcctgatgctgaagcagctgtggagcagcagcaagggcctggacagcctgttcagctacctgcaggacaagatctacgaggtgtag

SEQ ID NO: 243104 - protein, 569 aa, Artificial Sequence
  derived and/or modified sequence
MAPTLATAHRRRWWMACTAVLENLLFSAVLLGWGSLLIMLKSEGFYSYLCTEPENVTNGTVGGTAEPGHEEVSWMNGWLSCQAQDEMLNLAFTVGSFLLSAITLPLGIVMDKYGPRKLRLLGSACFAVSCLLIAYGASKPNALSVLIFIALALNGFGGMCMTFTSLTLPNMFGDLRSTFIALMIGSYASSAVTFPGIKLIYDAGVSFIVVLVVWAGCSGLVFLNCFFNWPLEPFPGPEDMDYSVKIKFSWLGFDHKITGKQFYKQVTTVGRRLSVGSSMRSAKEQVALQEGHKLCLSTVDLEVKCQPDAAVAPSFMHSVFSPILLLSLVTMCVTQLRLIFYMGAMNNILKFLVSGDQKTVGLYTSIFGVLQLLCLLTAPVIGYIMDWRLKECEDASEEPEEKDANQGEKKKKKRDRQIQKITNAMRAFAFTNLLLVGFGVTCLIPNLPLQILSFILHTIVRGFIHSAVGGLYAAVYPSTQFGSLTGLQSLISALFALLQQPLFLAMMGPLQGDPLWVNVGLLLLSLLGFCLPLYLICYRRQLERQLQQRQEDDKLFLKINGSSNQEAFV

SEQ ID NO: 243105 - DNA, 1710 bp, Artificial Sequence
  derived and/or modified sequence
atggcccccaccctggccaccgcccacagaagaagatggtggatggcctgcaccgccgtgctggagaacctgctgttcagcgccgtgctgctgggctggggcagcctgctgatcatgctgaagagcgagggcttctacagctacctgtgcaccgagcccgagaacgtgaccaacggcaccgtgggcggcaccgccgagcccggccacgaggaggtgagctggatgaacggctggctgagctgccaggcccaggacgagatgctgaacctggccttcaccgtgggcagcttcctgctgagcgccatcaccctgcccctgggcatcgtgatggacaagtacggccccagaaagctgagactgctgggcagcgcctgcttcgccgtgagctgcctgctgatcgcctacggcgccagcaagcccaacgccctgagcgtgctgatcttcatcgccctggccctgaacggcttcggcggcatgtgcatgaccttcaccagcctgaccctgcccaacatgttcggcgacctgagaagcaccttcatcgccctgatgatcggcagctacgccagcagcgccgtgaccttccccggcatcaagctgatctacgacgccggcgtgagcttcatcgtggtgctggtggtgtgggccggctgcagcggcctggtgttcctgaactgcttcttcaactggcccctggagcccttccccggccccgaggacatggactacagcgtgaagatcaagttcagctggctgggcttcgaccacaagatcaccggcaagcagttctacaagcaggtgaccaccgtgggcagaagactgagcgtgggcagcagcatgagaagcgccaaggagcaggtggccctgcaggagggccacaagctgtgcctgagcaccgtggacctggaggtgaagtgccagcccgacgccgccgtggcccccagcttcatgcacagcgtgttcagccccatcctgctgctgagcctggtgaccatgtgcgtgacccagctgagactgatcttctacatgggcgccatgaacaacatcctgaagttcctggtgagcggcgaccagaagaccgtgggcctgtacaccagcatcttcggcgtgctgcagctgctgtgcctgctgaccgcccccgtgatcggctacatcatggactggagactgaaggagtgcgaggacgccagcgaggagcccgaggagaaggacgccaaccagggcgagaagaagaagaagaagagagacagacagatccagaagatcaccaacgccatgagagccttcgccttcaccaacctgctgctggtgggcttcggcgtgacctgcctgatccccaacctgcccctgcagatcctgagcttcatcctgcacaccatcgtgagaggcttcatccacagcgccgtgggcggcctgtacgccgccgtgtaccccagcacccagttcggcagcctgaccggcctgcagagcctgatcagcgccctgttcgccctgctgcagcagcccctgttcctggccatgatgggccccctgcagggcgaccccctgtgggtgaacgtgggcctgctgctgctgagcctgctgggcttctgcctgcccctgtacctgatctgctacagaagacagctggagagacagctgcagcagagacaggaggacgacaagctgttcctgaagatcaacggcagcagcaaccaggaggccttcgtgtag

SEQ ID NO: 243106 - DNA, 1710 bp, Artificial Sequence
  derived and/or modified sequence
atggcccccaccctagccaccgctcaccggcgccgatggtggatggcttgcaccgcagtactggaaaatctgttgttcagtgcggtgctgctcggttggggttcacttctcattatgctcaagtcggagggtttctacagctacctgtgtacagagcccgagaatgtcacaaatgggacagtgggcgggaccgctgagcctggccacgaagaggtgtcatggatgaatggatggctctcatgccaagctcaggatgaaatgttgaacttggcctttactgtcggatccttcctgctcagcgccatcacccttccacttggaatcgttatggataaatacggccctagaaagctgaggctcctgggctcagcatgttttgccgtgtcttgtctcctcattgcttacggagccagcaaacccaacgctctctctgttctgattttcattgcactggcactgaatggctttgggggtatgtgcatgacgttcacgagcctgacgctgcccaacatgttcggcgatctacggagcaccttcattgccctgatgatcgggtcttatgcgtccagtgccgtcaccttcccaggtatcaaactcatttacgacgctggcgtctccttcatcgttgttctggtggtgtgggccggctgttccggtctggtctttctgaactgtttcttcaactggcctcttgaaccatttccaggcccggaagatatggactacagtgtcaaaattaagtttagctggttgggctttgaccacaagattacaggtaaacagttctacaaacaagtaaccaccgttggccgaaggctgtccgtgggtagttccatgagatctgctaaggagcaagtagccttacaagagggccacaagctgtgccttagcactgtggacctggaagtgaaatgccaacccgacgccgcggtagctccttccttcatgcattcggtattcagccccatcctcctgcttagccttgtgaccatgtgcgtgacccagctgagattaatcttctacatgggcgcgatgaataatattctgaagttcctggtgtccggtgatcaaaaaacagttggactgtatacttccattttcggggtcctgcaactcctttgcttattgactgcccccgtgattggatatataatggattggaggttgaaggaatgcgaggacgcaagcgaagaaccagaggagaaagatgccaatcagggagagaaaaaaaaaaagaaacgcgacaggcagatccaaaagatcacaaacgccatgcgagcattcgcattcactaacctgctgctcgtcggattcggcgtaacctgtctgattccaaacctgccccttcagatcctctctttcatcctgcacacaattgtccgaggattcattcattcagctgtggggggcctgtacgccgcagtgtacccatcaacccagtttggttctctgactgggcttcagtccttgatcagcgctcttttcgcactgctgcaacagccgttgtttctggccatgatgggtccactgcagggcgatccgctgtgggtgaacgtgggccttttgttactgtcgctcctcggcttctgcctgcctctctatttaatctgttaccgcaggcagttggaacgccagctgcaacaaaggcaggaggacgataagctgttcctgaaaattaacggatcctcaaaccaggaggctttcgtgtag

SEQ ID NO: 243107 - DNA, 1710 bp, Artificial Sequence
  derived and/or modified sequence
atggcccccaccctggccacagcccacagaagacgctggtggatggcctgcacagctgtgctggagaacctgctcttctctgctgtgctgctgggctggggcagcctgctgatcatgctgaagtctgagggcttctacagctacctgtgcacagagccagaaaatgtgaccaacggcaccgtgggcggcacagctgagcccggccacgaggaggtgtcctggatgaatggctggctgagctgccaggcccaggatgagatgctgaacctggccttcaccgtgggcagcttcctgctgagcgccatcaccctgcccctgggcatcgtgatggacaagtatggccccaggaagctgcggctgctgggcagcgcctgctttgctgtgtcctgcctgctgattgcctatggagccagcaagcccaatgccctgtctgtgctgatcttcatcgccctggccctgaatggatttggaggcatgtgcatgaccttcaccagcctgaccctgcccaacatgtttggagacctgcggagcaccttcatcgccctgatgattggcagctatgccagcagcgctgtgaccttccctggcatcaagctgatctatgatgctggggtgtccttcatcgtggtgctggtggtgtgggccggctgcagcggcctggtgttcctgaactgcttcttcaactggcccctggagcccttccctggccctgaggacatggactacagcgtgaagatcaagttctcctggctgggctttgaccacaagatcaccgggaagcagttctacaagcaggtgaccaccgtgggccgccgcctgtctgtgggcagctccatgaggtctgccaaggagcaggtggccctgcaggagggccacaagctgtgcctgagcacagtggacctggaggtgaagtgccagccagatgctgctgtggcccccagcttcatgcacagcgtcttcagccccatcctgctgctgagcctggtgaccatgtgtgtgacccagctgcggctcatcttctacatgggcgccatgaacaacatcctgaagttcctggtgtctggggaccagaagacagtgggcctgtacaccagcatctttggagtgctgcagctgctgtgcctgctgacagcccctgtgattggctacatcatggactggaggctgaaggaatgtgaagatgccagcgaggagcctgaggagaaggatgccaaccagggcgagaagaagaagaagaagagggaccggcagatccagaagatcaccaatgccatgagggcctttgccttcaccaacctgctgctggtgggcttcggcgtgacctgcctgatccccaacctgcccctgcagatcctgtccttcatcctgcacaccatcgtgcggggcttcatccacagcgctgtgggcggcctgtatgctgctgtgtaccccagcacccagtttggcagcctgaccggcctgcagagcctcatcagcgccctgtttgccctgctgcagcagcccctcttcctggccatgatgggccccctgcagggcgaccccctgtgggtgaatgtgggcctgctgctgctgagcctgctgggcttctgcctgcccctgtacctgatctgctaccgccggcagctggagcggcagctgcagcagaggcaggaggatgacaagctgttcctgaagatcaatggcagcagcaaccaggaggcctttgtgtag

SEQ ID NO: 243108 - DNA, 1710 bp, Artificial Sequence
  derived and/or modified sequence
atggcccccaccctggccaccgcccaccggcggcggtggtggatggcttgtaccgctgtgctggagaacttattgttctctgccgttttactagggtggggctctttgttgattatgctgaaatcagagggattttactcttatctgtgtacggaacctgaaaacgtgacaaatggaacggtcggcggcactgcagaaccaggccacgaggaggtgtcatggatgaacgggtggctgtcctgtcaggcacaagatgagatgctcaacctggcgttcaccgtcggctcattcctcctatcagccatcactctgccactggggattgttatggacaagtatggcccccgaaagctgcgtctcttgggatccgcttgttttgcagtatcatgcctcctgattgcatatggcgcttcaaaacccaatgccttgtcagtactgatttttatcgctctggcactgaatggcttcggtggaatgtgtatgaccttcaccagcttgacgcttccaaatatgtttggagacttgcgcagtacattcattgctctgatgatcggctcatacgctagcagcgcggttacgtttcctggaatcaagctaatctacgacgccggggtgtcctttatcgtcgtgttggtggtatgggcaggctgcagtggtctggtttttttgaactgcttcttcaactggccacttgaacctttcccagggccagaggacatggactatagcgtcaaaataaaatttagctggttgggatttgatcacaagatcacaggaaaacagttttacaaacaggtaaccactgtcggtaggaggctgtccgttggaagttcaatgagatccgccaaggagcaggtcgctctgcaggaggggcataaactatgcttgtccacggttgatcttgaggtgaagtgccagcctgacgctgctgtggccccatccttcatgcatagcgtgttttcacccattctgctgttgtctctcgtcacaatgtgcgtaacccagctaaggctgatattctatatgggagctatgaataatatcctgaagttcctcgtgtcgggtgaccagaaaacagtcggcctatacacatcaattttcggggtcctccagttattatgcctattaaccgccccagtgatcggatacatcatggattggagacttaaggagtgtgaggatgcgtccgaggaaccagaagaaaaggatgccaaccaaggagagaagaagaagaaaaagagggatagacagatccagaagatcacaaacgccatgagggcttttgccttcacaaacctgttgttggtgggttttggggtgacctgcctgatccctaaccttccactacagatactttcctttattctccacaccatcgtacgaggctttatccactccgcggtaggtggcctgtatgctgcagtttatccttcgacccagttcggcagtctgacaggtttgcaatctctgatttctgccctcttcgccttgttgcaacagcccctgtttttagcgatgatgggcccactccagggagacccgctgtgggtgaacgttggtctccttctacttagccttctcggcttttgtctgcctctgtaccttatatgttacagacgtcagcttgaacgccagctccagcagcggcaagaagatgataaattgttcctgaagataaacggaagctctaatcaggaggctttcgtctag

SEQ ID NO: 243109 - DNA, 1710 bp, Artificial Sequence
  derived and/or modified sequence
atggcccctaccctggccactgcccataggaggagatggtggatggcctgcaccgccgttttggagaacctcctgttctcagcagtccttttagggtgggggtcactgttaataatgctgaaaagcgaaggcttttactcgtacctttgcaccgaacctgagaacgttaccaatggaaccgtaggtggaaccgcggagcctggacacgaggaagtctcctggatgaatggctggctatcttgccaggcacaggatgagatgctgaacctcgcatttactgtgggctcctttctgctgagcgcgattaccctgccccttggcatcgttatggacaaatatggacccagaaagttgaggctgctcggaagcgcctgttttgctgtgagctgtctcttgatcgcctacggggcttctaagcccaatgctttgtccgtgcttatcttcattgctctggccctgaacggcttcggaggtatgtgtatgaccttcacctctctgaccctgcccaatatgttcggagatctcaggagcacatttatcgccctcatgattggctcttatgccagctccgcagtgaccttccctggcatcaagttaatttacgacgccggtgtgtcttttatcgtcgttctagttgtttgggcaggctgttcaggcctcgtgtttttaaattgtttctttaattggccgctcgaacccttccctggaccagaggacatggactactccgtgaaaatcaagttttcttggctgggctttgaccacaaaattacgggaaagcagttctacaaacaggtgaccaccgttggacggagactgagtgtgggcagctctatgcgatccgccaaagaacaggtggcactccaggaaggccacaaactttgcttatccaccgtagatctggaggtcaaatgtcaacctgatgctgccgtcgccccaagttttatgcatagcgtgttcagtcccatcttgctgctttcactcgtgacgatgtgtgtgacacaactgagactaatcttctatatgggcgcaatgaataatattctgaagtttctcgtgagcggggatcaaaagactgtgggcctctatacaagcatctttggtgttcttcagcttctgtgtctgttgactgccccagtgattggctatatcatggactggaggttaaaagaatgcgaggacgcctctgaggaaccagaagagaaagatgccaaccagggcgaaaagaaaaaaaagaagagagacagacaaatccagaagatcaccaacgccatgagagccttcgccttcactaacctgttgctggtgggcttcggtgtgacctgcttgattcctaatctcccacttcagatcttatctttcattctccacacaatcgtccggggatttattcactcggctgtcggcggtctctatgctgctgtctacccatccactcaattcggatctctgaccggactccagtccctcataagcgcactgttcgctttgctgcagcaacctctcttcctggccatgatgggacccttgcagggggatcctctttgggttaatgtgggtctgctgcttctttctctgctggggttctgtttgccactgtaccttatttgttatagaaggcagctcgaaaggcagctccagcagcgccaggaagacgacaagttgttcctgaagataaatggttcttcaaaccaggaggcatttgtttag

SEQ ID NO: 243110 - DNA, 3081 bp, Artificial Sequence
  derived and/or modified sequence
cagtgttttcttcttggggtcggaataaaagggctggaataaaagagggcagaaaaggcgccgggcgggcccgacacacgccggaggagccgggtggtgcagagccggagccggagccggagccgcgccgcgccgcaccatggcgcccaccctggccactgcccatcggcgccgctggtggatggcctgcacggccgtgctggagaacctcctcttctcggcagtcctcctgggctggggctcgctgctcatcatgctcaagtcagagggcttttactcctacctgtgtaccgagccagagaatgtcaccaatggcacagtgggcggcacagcagagccggggcacgaggaggtgagctggatgaacggctggctcagctgccaggcccaggacgagatgctaaatttggccttcactgtgggctcctttctgctcagtgccatcaccctgcccctgggtatcgtcatggacaagtatggcccgaggaagctcaggctgctgggcagcgcctgcttcgcggtttcctgcttgctgattgcgtacggagcaagtaaaccaaacgctctctccgtgctcatcttcatcgccctggctctgaatggctttggtgggatgtgtatgaccttcacctcattaacactgcccaacatgttcggcgaccttcggtccacgtttattgccttgatgattgggtcctacgcctcctcggcagtcacctttccaggaatcaagctcatctatgatgctggtgtctccttcatcgtcgtcctcgtggtctgggccggctgctccgggctggttttcctcaactgcttctttaactggccccttgagcccttcccggggccggaggacatggactactcggtgaagatcaagttcagctggctgggctttgaccacaagatcacagggaagcagttctacaagcaggtgaccacggtgggccggcgcctgagtgtgggcagctccatgaggagtgccaaggagcaggtggcgctgcaggagggccacaagctgtgcctgtccaccgtcgacctggaggtgaagtgccagccggatgccgcagtggccccctccttcatgcacagcgtgttcagccccatcctgctgctcagcctggtcaccatgtgcgtcacgcagctgcggctcatcttctacatgggggctatgaacaacatcctcaagttcctggtcagcggcgaccagaagacagttggcctctacacctccatcttcggcgtgctccagctgctgtgcctgctgacggcccccgtcattggctacatcatggactggaggctgaaggagtgtgaagacgcctccgaggagcccgaggagaaagacgccaaccaaggcgagaagaaaaagaagaagcgggaccggcagatccagaagatcactaatgccatgcgggccttcgccttcaccaacctgctgctcgtgggctttggggtgacctgcctcattcccaacctgcctctccagatcctctccttcatcctgcacacaatcgtgcgaggattcatccactccgctgtcgggggcctgtacgctgccgtgtacccctccacccagttcggcagcctcacgggactgcagtctctgatcagcgcgctcttcgcccttctgcagcagccgctgtttctggccatgatgggtcctctccagggagaccctctgtgggtgaacgtggggctgctccttctcagcctgctgggcttctgcctcccgctctacctgatctgctaccggcgccagctggagcggcagctgcagcagaggcaggaggatgacaaactcttcctcaaaatcaacggctcgtccaaccaggaggccttcgtgtagtggctgccgcctcggaactgcggtctcctgcctgtgcttcagtgactgacccctgtcctgcccctccagagtaccccacgcacccccaggaccttcgccgtctccgtgccagcgttcacgctccctcccggggccctgcctcggagctctgtggtggaaggacgggagagggccccggacacgcgcgttttctcctgccgaacgcaggggctgccctgactttgctctgccgccccccggggacccggggcctggggtctctgtggtgcctgcagcaggagccaggaacgcccggcaggcaggcgctctcccgccagtgtctggattctgcctcttgccaaagcagagggggctgccatcccctgcctgccacctgcccctcggctgcatgcccacagccgtacctgcctgaggacaaaggcttgcactgtctcgcccgcgcctggcccccaccccctccccggccagcctgaggctgcctgaggaaggaaggacccgcttcctgttgtcggtgctaattcctttgtaattccagccccctgtcgcctgtccagggcctgcccacccgttggaggccggtggagaagccccacctggcttatgccctggagagggtttagcgggctgggtggacccctcgcctcctccccgagggccaatgccgcggacacgttttcactgtcaccctcgttctgtctgccacctgaagggaatttgaggaccgccgccagggcaccccgtacatacacacagctgcttttgtggaggtggacgaaaggctgtggccggcagacgtggaggtccaggccggggtggggacgtgggtgggtccgaggtgtgtgtggggtcggggtgggctctaggagttagcccttatccccactgaccaggcgggagccgccaggcctgcagctgggccagtgcccaggagccatcctggcgtggggccaggagcttgtccaaggccacaggcccacagcaccccctgccggcgggctccgtggggccctggagctgatgacgggggaggcccgtccgcctggcccaccaacccgcccaccttgactgcccccagaagtgtgtcttgagacctcctgggcgtgcttagaggggtgagttgtgtttggatttttagttattttctcttcagttttattagacttcttttttataaagcaataaatccattttcctccgggtaagggatgccccttctggcatatcagttaata

SEQ ID NO: 243111 - protein, 615 aa, Artificial Sequence
  derived and/or modified sequence
MCSEARLARRLRDALREEEPWAVEELLRCGADPNLVLEDGAAAVHLAAGARHPRGLRCLGALLRQGGDPNARSVEALTPLHVAAAWGCRRGLELLLSQGADPALRDQDGLRPLDLALQQGHLECARVLQDLDTRTRTRTRIGAETQEPEPAPGTPGLSGPTDETLDSIALQKQPCRGDNRDIGLEADPGPPSLPVPLETVDKHGSSASPPGHWDYSSDASFVTAVEVSGAEDPASDTPPWAGSLPPTRQGLLHVVHANQRVPRSQGTEAELNARLQALTLTPPNAAGFQSSPSSMPLLDRSPAHSPPRTPTPGASDCHCLWEHQTSIDSDMATLWLTEDEASSTGGREPVGPCRHLPVSTVSDLELLKGLRALGENPHPITPFTRQLYHQQLEEAQIAPGPEFSGHSLELAAALRTGCIPDVQADEDALAQQFEQPDPARRWREGVVKSSFTYLLLDPRETQDLPARAFSLTPAERLQTFIRAIFYVGKGTRARPYVHLWEALGHHGRSRKQPHQACPKVRQILDIWASGCGVVSLHCFQHVVAVEAYTREACIVEALGIQTLTNQKQGHCYGVVAGWPPARRRRLGVHLLHRALLVFLAEGERQLHPQDIQARG

SEQ ID NO: 243112 - protein, 439 aa, Artificial Sequence
  derived and/or modified sequence
MWTPVRRGAAWLGTLLGPGEGPPEPRGGAAHAHKPPAGSRKSTDQAVRFGPSQGMCSEARLARRLRDALREEEPWAVEELLRCGADPNLVLEDGAAAVHLAAGARHPRGLRCLGALLRQGGDPNARSVEALTPLHVAAAWGCRRGLELLLSQGADPALRDQDGLRPLDLALQQGHLECARVLQDLDTRTRTRTRIGAETQEPEPAPGTPGLSGPTDETLDSIALQKQPCRGDNRDIGLEADPGPPSLPVPLETVDKHGSSASPPGHWDYSSDASFVTAVEVSGAEDPASDTPPWAGSLPPTRQGLLHVVHANQRVPRSQGTEAELNARLQALTLTPPNAAGFQSSPSSMPLLDRSPAHSPPRTPTPGASDCHCLWEHQTSIDSDMATLWLTEDEASSTGGREPVGPCRHLPVSTVSDLELLKGLRALGRLRTCQPEPSH

SEQ ID NO: 243113 - DNA, 1848 bp, Artificial Sequence
  derived and/or modified sequence
atgtgttccgaagcgcgcctcgctcggcgcctccgtgacgccttacgcgaggaggaaccgtgggcagtggaagaactgctgaggtgcggagctgaccccaacttggtactagaagacggcgccgcagccgtgcaccttgcagcaggtgcccgtcatccacggggattgagatgtctgggagctttacttcggcaggggggggaccccaatgcccgtagcgtcgaggctcttactccactgcacgttgccgccgcatggggctgtaggagagggctggaactccttctaagccagggggcagacccagcactccgggaccaggatgggctgcggccccttgacttggccctgcaacagggccacctagaatgtgccagggtgctgcaggacctggatactagaacacgtacacgaacacgtatcggagctgaaactcaggagccagagcctgctccaggcactcccggattgagtggtccaacagacgaaacgttagactctatcgctcttcagaagcagccgtgccggggggacaatagggacatcgggcttgaagccgaccccggtcccccatccttgcccgtgcctctggagaccgtagacaaacacgggtcttctgcgagccccccgggacactgggactactcttccgatgcgagctttgtgaccgctgtggaggtgtccggggcagaggacccagcttccgacacaccgccatgggcaggctctctgcccccaacgaggcagggactgctgcacgtagtgcacgccaatcagagggtccctcgcagtcagggtactgaggcggaactgaatgccaggctgcaggcactgaccctaactccgcctaatgcggctggtttccaatcaagtccttcatccatgcctcttctcgatcgatcgcccgcgcacagtccccccaggacacccacacccggagcttccgattgtcactgcctgtgggagcaccagacttctatcgactccgatatggccactttgtggctcacggaggatgaagcaagctcgacgggagggcgcgagcccgtggggccatgcaggcatttaccggtgtctacggtgagcgatctcgaactgttaaaagggctccgggccctgggagagaaccctcacccaatcaccccgttcaccagacagctataccatcaacagctggaagaggctcaaatcgctcctgggccagaattctccggccactcgctggaactggcagccgcgcttcgcactggatgtattcctgacgtgcaggccgacgaggatgccctcgcacagcaatttgaacagccagatcctgcacgtcgatggcgtgaaggcgtagtcaagtctagttttacctacttgctgctggatcctagggagactcaggacctgccagcacgcgccttctctcttaccccggcagaaagactgcaaactttcatcagggcaatattctatgtcggcaaaggaactcgcgctcgcccgtacgtgcacctctgggaggcgttggggcaccacggtagatcaaggaagcaaccccaccaggcatgtcccaaagttcggcagattctagatatttgggctagtggatgcggcgtagtaagtctgcattgcttccagcacgtggtagctgtcgaagcctatacacgtgaagcctgcattgtagaggccttgggaattcaaacactcaccaaccagaaacagggccactgctacggcgtcgtggcaggctggcctccagcacggcgcaggcggcttggcgtgcatctgctgcacagagcgctgctagttttccttgctgaaggcgaacgccagttgcatccccaagacattcaggcacgcggttag

SEQ ID NO: 243114 - DNA, 1848 bp, Artificial Sequence
  derived and/or modified sequence
atgtgcagtgaggcccgactggcccggagactaagagacgccttgcgcgaggaggagccatgggcggtcgaggagttgctgcgatgcggggctgatcccaacctcgtcttagaggacggcgctgccgctgtgcatcttgccgctggggcgaggcacccccgaggattgaggtgtctaggagccctgcttaggcaaggcggtgacccaaatgcgcgtagcgtagaagccttgactcccctccatgtggccgcagcatggggatgccggaggggtctggagcttctgctgtcccagggagctgatcccgcactgagagatcaggacggactgcgaccccttgatctggcactgcaacagggccatttagagtgtgcccgggttcttcaggacctcgacactcgcacccgcactcgtacacgaataggcgccgagacacaagaaccagagcccgccccgggcaccccaggcctgtctgggccgaccgatgagaccctggacagtatcgccctgcagaaacaaccatgtaggggggacaaccgcgacattggtctggaagctgaccctggaccaccctcacttccggtaccattggagacagttgataagcatggtagtagtgcgtccccccctggacactgggattactcttctgatgcaagtttcgtcaccgcagtcgaggtgtcaggggcagaagacccagcttcggacacgcctccttgggctggaagcctcccacctactcggcagggcttgcttcacgtagttcacgccaaccagagagtgccccgctcgcaggggaccgaagccgagttgaacgcccgtctgcaggcgctgacccttactccccccaacgctgctggattccagagttcacccagctccatgcctctactcgaccggagcccggcgcatagcccacctagaacacctaccccgggcgctagtgattgccactgcctatgggaacaccagacgtccattgacagcgatatggccaccttgtggctaactgaggacgaagcctccagcaccggaggcagagagcccgtggggccatgccggcacctccctgtgtcgactgtgtcagacctagagctgctcaaaggactgcgggccctgggggagaacccccaccccatcacacctttcacaaggcagctctaccaccaacagcttgaagaagcgcagatcgctcccggtccggagttctctggccattcgctggagctggctgccgcgcttcgcacgggatgtatccccgacgttcaagctgacgaagacgcgctcgcacagcagttcgagcagcccgatcccgctcgtaggtggcgtgaaggcgtggttaagtcatcattcacctaccttctcctcgaccctagggagacccaggacctccctgctagggcctttagcttaactcctgcagaacgcctacagactttcatccgagccatcttctatgtcgggaaaggcactcgggctaggccctacgtgcacttatgggaggctctcgggcaccacggacggtcaagaaagcaacctcaccaggcctgtccaaaagttcgacagatcctagatatctgggccagtgggtgcggcgtggtgagtctacattgttttcagcacgtcgtggctgtggaagcctatacgagggaggcatgcattgtagaggctttgggcatccagactctgactaaccaaaaacagggccattgttacggcgtggtagcaggatggcctccggctaggagacgaaggctgggggtgcaccttctacacagagctttgctcgtcttcctcgccgaaggcgaacgccaactccacccccaagacatccaggctcggggttag

SEQ ID NO: 243115 - DNA, 1848 bp, Artificial Sequence
  derived and/or modified sequence
atgtgcagcgaggcccggctggcccggcggctgagagatgccctgcgggaggaggagccctgggccgtggaggagctgctgcgctgtggggctgaccccaacctggtgctggaggatggagctgctgctgtgcacctggccgccggggcccggcacccccggggcctgcgctgcctgggcgccctgctgcggcagggcggggaccccaatgcccggtctgtggaggccctgacccccctgcacgtggccgccgcctggggctgcagaagaggcctggagctgctgctgagccagggcgctgaccctgccctgcgggaccaggacggcctgcggcccctggacctggccctgcagcagggccacctggagtgtgcccgggtgctgcaggacctggacaccaggaccaggaccaggaccagaattggagctgagacccaggagcctgagcccgcccctggcaccccaggcctgagcggccccacagatgagaccctggacagcatcgccctgcagaagcagccctgccgcggggacaacagagacatcggcctggaggccgaccccggcccccccagcctgcctgtgcccctggagaccgtggacaagcacggcagcagcgccagccccccaggccactgggactacagcagtgatgccagctttgtgacagctgtggaggtgtctggagcagaagatcctgccagtgacaccccaccctgggccggcagcctgccccccacccggcagggcctgctgcacgtggtgcacgccaaccagagggtgcccaggagccagggcacagaagctgagctgaatgcccggctgcaggccctgaccctgaccccaccaaatgctgctggcttccagagcagccccagctccatgcccctgctggacaggagccctgcccacagcccccccaggacccccacccctggggccagtgactgccactgcctgtgggagcaccagaccagcattgacagcgacatggccaccctgtggctgacagaagatgaggccagcagcactggaggccgggagcctgtgggcccctgccgccacctgcctgtgtccacagtgtctgacctggagctgctgaagggcctgcgggccctgggggagaacccccaccccatcacccccttcacccggcagctgtaccaccagcagctggaggaggcccagatcgcccctggccctgagttcagcggccacagcctggagctggccgccgccctgaggacaggctgcatcccagatgtgcaggctgatgaagatgccctggcccagcagtttgagcagcctgaccctgcccggcgctggagggagggcgtggtgaagagcagcttcacctacctgctgctggacccccgggagacccaggacctgcctgcccgggccttcagcctgaccccagctgagcggctgcagaccttcatccgggccatcttctacgtgggcaagggcacccgggcccggccctacgtgcacctgtgggaggccctgggccaccacggccgcagcaggaagcagccccaccaggcctgccccaaggtgcggcagatcctggacatctgggccagcggctgcggcgtggtgtccctgcactgcttccagcacgtggtggccgtggaggcctacacccgggaggcctgcatcgtggaggccctgggcatccagaccctgaccaaccagaagcagggccactgctacggcgtggtggccggctggcccccagccaggagaagaaggctgggcgtgcacctgctgcaccgggccctgctggtgttcctggccgagggggagcggcagctgcacccccaggacatccaggcccggggctag

SEQ ID NO: 243116 - DNA, 1848 bp, Artificial Sequence
  derived and/or modified sequence
atgtgcagcgaggcccggctggcccggcggctgcgggacgccctgagagaagaagagccctgggccgtagaggaactccttcggtgtggcgccgaccccaacttggttcttgaggacggggctgcggctgtccatttagcagcaggtgcacggcacccccgggggctcaggtgcttgggcgcactcctgcgacaagggggtgaccctaatgctcggagcgtggaagctctgacccctcttcacgtggccgccgcctggggatgcagacgcggactcgagctgctgctttcgcagggcgctgaccctgcactcagagatcaagatggcctgaggccactcgacctggctctgcagcaggggcaccttgagtgcgctcgcgtgctgcaggacctcgatacgagaacgcggacgaggacaagaattggtgcggagacacaggagcccgaacctgcccctggcactccgggcctgagcggaccaaccgatgaaactcttgactccattgccctgcagaaacagccctgccggggggataacagggacatcggccttgaggccgatccaggaccccccagcctgccggttcctctggagacagtcgataagcatggttcttccgcgtctccccctgggcactgggattactctagcgacgcctccttcgtgaccgccgtagaagttagtggcgcagaggatcctgcctccgacacccccccctgggctgggagcctgcccccgacacgccagggactgctgcatgtggttcacgctaatcagcgggtgccccgcagtcaggggacggaggcagaactgaacgcaagattgcaagccctaaccctgacaccacctaatgccgccggatttcagtcctctccaagcagcatgccactgctggaccggtcacctgcacactcaccccctcgtacaccaacgccaggggcgtctgactgccactgcctatgggagcaccaaacatccattgattcagacatggcaactttatggctcaccgaagacgaagcatcatccacagggggacgggagcctgtggggccttgccggcaccttcccgtctccaccgtgagcgatctcgagttgctgaaaggtctgcgcgcacttggtgagaacccccacccgatcaccccatttactcgccagctctatcatcagcaattagaggaagcccagatagcccctggcccagagttttccggtcactcgctggaactcgcagccgctctacgtacaggttgtatcccagatgtccaggcagatgaggatgcgctggctcaacagttcgagcagcctgatccagccagacgctggcgcgaaggcgttgtgaagagtagcttcacctatttgctgcttgaccctagagagacccaggacttgccagctcgagccttttccttgaccccagctgaacgacttcaaacatttatccgggccatcttttacgtaggcaaaggcaccagagcccggccgtacgtgcacctttgggaggcactcggccaccatggtagaagtcgaaagcagccccatcaggcttgcccaaaggttcggcaaatactggacatttgggcctccgggtgcggtgtggttagcctgcactgtttccagcacgtggtggctgttgaagcctacaccagagaagcctgcattgtggaagctctgggaatacagactctgacgaaccagaaacaggggcattgttacggcgtcgtggctggctggcccccagctcggcgtagacgtctgggtgtacacctgctgcatagggctctgctggtatttctcgccgagggggaaaggcagctgcaccctcaggacatccaggcaagggggtag

SEQ ID NO: 243117 - DNA, 1848 bp, Artificial Sequence
  derived and/or modified sequence
atgtgcagcgaggcccggctggcccggcggctgcgggacgccctgcgtgaggaggaaccctgggcagtcgaggagctgttaaggtgtggcgctgatccgaatcttgtcttggaggacggagctgctgccgtccatttggccgccggagctcgacacccgaggggcctcagatgtctgggcgcacttctgcgccagggcggggaccccaacgctcgtagtgtggaggcactgactcctttgcatgtggcagctgcttggggctgcagacgtggcctcgagctcctgctgagtcagggtgccgaccctgctctacgcgaccaagacggcctccgtccactggacctggcccttcagcagggacacttggaatgtgccagagttcttcaggacctggatacccggacacgcacacgcacaaggatcggagctgaaacgcaggaacctgagcccgctcctggcacgccgggtttaagcgggccaaccgacgagactttggatagcatcgccttgcagaaacaaccctgccggggagataatcgggatatcggcctggaagccgaccccggccccccatctttgccagtacctctggagaccgtggacaagcacggctcctctgcgtccccgcccggtcattgggactattccagtgacgctagctttgtcactgcagtggaggtttccggcgcagaagacccagcctctgacactcccccgtgggcaggatccctgccccctaccaggcagggcctcctgcacgtggttcacgccaaccagagagtacccagaagccaaggaacagaggctgaactcaacgccaggcttcaggctctcaccctgactccacctaatgccgctggtttccagagctcccctagttccatgcccctcctcgacagaagccccgcccactccccacccaggactccgacccctggcgcttctgactgccactgtttgtgggagcaccagacgagtattgacagcgatatggccacattgtggctgaccgaggatgaggccagtagcacaggcggaagggagcctgttggaccttgtcgacaccttccggtcagtactgtctctgacttggagctgttaaaggggctcagagcccttggagagaatcctcatcccatcacgcctttcactagacagttataccaccagcagctggaggaagcgcagatcgcacccggacctgagttctcagggcactccttggaactggctgcagccctcaggaccgggtgtattccggacgtgcaggctgacgaggatgcactcgcccaacaattcgaacaacccgaccccgcacgcaggtggcgggagggagtcgtcaagagttctttcacttatttgttactggaccctagagagactcaagacctgccagctcgtgctttctccctcactccagccgaaaggctccagaccttcatccgtgccatcttctacgtgggcaaaggcactagggcacggccctatgtgcatctctgggaagcacttgggcatcatggacgctctcggaagcagccccaccaagcgtgtcccaaggtgcgccagattctggacatctgggctagcggatgcggtgttgtaagcttgcactgttttcagcacgtggttgctgtggaagcttatacacgtgaggcgtgcatcgtggaagcgctcggaattcaaacactgacaaatcagaaacagggccattgctacggggtcgtggcggggtggccacctgcacgcagaagacgactgggagtgcacctgctgcatcgagccctccttgtttttcttgctgaaggagaaaggcaactgcatcctcaggacatacaggcaagaggctag

SEQ ID NO: 243118 - DNA, 2124 bp, Artificial Sequence
  derived and/or modified sequence
agtggcacacccggtggcatcctcccacccgggctcttatcggcggtcccagaccctgcttgagcgcctccgggtgtcaagggcccctgaggacactaaagctctcgaaccccgatgtggacccccgtgcggcgcggggcagcctggctgggaaccctgctcggccctggagaggggccccccgagccgaggggaggagcggcgcatgcccacaagccccccgcgggaagtaggaaatcgaccgaccaggcggtgcgcttcggacccagccagggcatgtgctcggaggcccgcctggctcgcaggttgcgggatgcgctgcgggaggaggagccgtgggcagtagaggagctgctgcgctgcggcgcggaccctaatttggtgctagaggacggcgcagcggctgtgcacttggcggccggagcccggcacccgcgcggcctgcgttgcctcggggccctactgcgccaaggcggggaccccaacgctcgatctgtcgaggcactgacgccgctgcatgtggccgccgcgtggggctgccgccgcggcctggagctgctgctgagccaaggagcggacccggcgctgcgcgaccaggacggactccggccgctggacctggccctgcagcagggacacctggagtgcgcgcgagtcctgcaggatctcgacacgcggaccaggacccggacccggatcggggcagagactcaggagcccgagcctgcacctggcaccccaggcctctctggacctaccgatgagacgctggactccatagcactccaaaagcagccatgcagaggtgacaacagggacattggcttggaggctgacccaggaccccccagcctccctgttccccttgaaactgtggacaaacatgggagctcggcgtcccctccagggcactgggattacagctcagacgcctctttcgtcacagcggttgaggtctctggagctgaggacccagcctcggacactcccccctgggctgggtcattgccaccgaccaggcagggacttctgcatgttgtccatgccaaccagagggtacctaggtctcagggcacggaggcagaactgaatgcccgtctgcaggccctgactctgaccccaccaaatgctgctggcttccagtcctccccttcctccatgcctctcctggacaggagtccagctcatagccccccacggacaccaacccctggagcttctgactgccactgcctgtgggagcaccagacatccattgatagtgacatggccacgctctggctgacagaggatgaggcaagctctacaggtggcagggaacctgtcggcccttgccggcacctgccagtctccactgtgtctgacttggagttgctgaagggactccgagcacttggtgagaatcctcaccccatcacacccttcaccaggcagttgtaccaccagcagctggaagaagcccagattgctcctggcccagagttttcagggcacagcctagaactggctgcagccctgcggacgggctgtattccagatgtccaggcagatgaagacgcgctggcccagcagtttgagcagccagatcctgccaggaggtggcgggagggggtcgtgaagtctagcttcacctatctgctgctggaccccagggagactcaggacctgccagcccgagccttctcactgaccccagctgagcgccttcagactttcatccgtgccatcttctacgtgggcaaagggacgagggcccggccatatgtccacctctgggaggcccttggtcaccatgggcggtcaagaaaacagccccaccaggcctgccccaaggtgcgtcagatcttggacatctgggccagtggttgcggtgttgtgtccctacattgcttccagcacgtggtcgctgtggaggcttatacacgggaggcgtgtattgtggaagccctagggatccagacgctcaccaaccagaagcaagggcactgctatggagtggtggcaggctggccacctgctcgtcgccggcgcttgggggtgcacctgctgcaccgtgccctccttgtcttcctggctgaaggcgagcgacagcttcatccccaggacatccaggcccggggctga

SEQ ID NO: 243119 - DNA, 3218 bp, Artificial Sequence
  derived and/or modified sequence
agtggcacacccggtggcatcctcccacccgggctcttatcggcggtcccagaccctgcttgagcgcctccgggtgtcaagggcccctgaggacactaaagctctcgaaccccgatgtggacccccgtgcggcgcggggcagcctggctgggaaccctgctcggccctggagaggggccccccgagccgaggggaggagcggcgcatgcccacaagccccccgcgggaagtaggaaatcgaccgaccaggcggtgcgcttcggacccagccagggcatgtgctcggaggcccgcctggctcgcaggttgcgggatgcgctgcgggaggaggagccgtgggcagtagaggagctgctgcgctgcggcgcggaccctaatttggtgctagaggacggcgcagcggctgtgcacttggcggccggagcccggcacccgcgcggcctgcgttgcctcggggccctactgcgccaaggcggggaccccaacgctcgatctgtcgaggcactgacgccgctgcatgtggccgccgcgtggggctgccgccgcggcctggagctgctgctgagccaaggagcggacccggcgctgcgcgaccaggacggactccggccgctggacctggccctgcagcagggacacctggagtgcgcgcgagtcctgcaggatctcgacacgcggaccaggacccggacccggatcggggcagagactcaggagcccgagcctgcacctggcaccccaggcctctctggacctaccgatgagacgctggactccatagcactccaaaagcagccatgcagaggtgacaacagggacattggcttggaggctgacccaggaccccccagcctccctgttccccttgaaactgtggacaaacatgggagctcggcgtcccctccagggcactgggattacagctcagacgcctctttcgtcacagcggttgaggtctctggagctgaggacccagcctcggacactcccccctgggctgggtcattgccaccgaccaggcagggacttctgcatgttgtccatgccaaccagagggtacctaggtctcagggcacggaggcagaactgaatgcccgtctgcaggccctgactctgaccccaccaaatgctgctggcttccagtcctccccttcctccatgcctctcctggacaggagtccagctcatagccccccacggacaccaacccctggagcttctgactgccactgcctgtgggagcaccagacatccattgatagtgacatggccacgctctggctgacagaggatgaggcaagctctacaggtggcagggaacctgtcggcccttgccggcacctgccagtctccactgtgtctgacttggagttgctgaagggactccgagcacttggtgagaatcctcaccccatcacacccttcaccaggcagttgtaccaccagcagctggaagaagcccagattgctcctggcccagagttttcagggcacagcctagaactggctgcagccctgcggacgggctgtattccagatgtccaggcagatgaagacgcgctggcccagcagtttgagcagccagatcctgccaggaggtggcgggagggggtcgtgaagtctagcttcacctatctgctgctggaccccagggagactcaggacctgccagcccgagccttctcactgaccccagctgagcgccttcagactttcatccgtgccatcttctacgtgggcaaagggacgagggcccggccatatgtccacctctgggaggcccttggtcaccatgggcggtcaagaaaacagccccaccaggcctgccccaaggtgcgtcagatcttggacatctgggccagtggttgcggtgttgtgtccctacattgcttccagcacgtggtcgctgtggaggcttatacacgggaggcgtgtattgtggaagccctagggatccagacgctcaccaaccagaagcaagggcactgctatggagtggtggcaggctggccacctgctcgtcgccggcgcttgggggtgcacctgctgcaccgtgccctccttgtcttcctggctgaaggcgagcgacagcttcatccccaggacatccaggcccggggctgagtgctggggagttggccatccagcctggggagaaatgtttgaatgttccagctgccccatgctgacagcagcccccatctctggtttcagaaggggtgtgtgtgtgtgtgtgtgtgtgtgtgtgtgtgtgtgtgtgtgtttgtgtgtgtgtgtgtgtgtgtagggagcacccaggcagatctcccccaggctgagagaggactttgttacagatggtactgctggagaggtagtaagtagtgagctccccatcgtgggaggaggacaagaagggaagcagaaggtgctttggaacagtccggtgcttctgtaagaggcgtttgaacctgggcaactccacctggaataggagctgggtaaaatgaggctgaaacctactgggctgcattcccagatggttaaagcattctaagtcacgggatcaggtaggaggtcagcacaagataacgggtcataaagaacctgctgataaaacaggttgcagtaaagaagccggccaaaacccaccaataccaagatggcgacaagagtgacctctggtcgtcctcattgctacactcccaccagcgccatgacagtttacaaatgccatggctggccaggcgcggtggctcacgcctgtaatcctagcattttgggaggccaaggagggcagatcacctaaggtcaggagttcaagaccagcgtggccaacgtggcgaaaccctatctctactaaaaataccaaaattagctgggcatggtggcgcgtgcctgtaatcccagctactaggggggctgaggcaggaggatcgcttgaacccaggaggtggaggttgcagtgagctgagattgtaccattgcactccagcctgggcaacagagcgagagtctgtctcaaacaaacaaacaaaaaaacaaatgccacatcaacatcaggacgttaacctttagaccctatatggtctaaaaaggggaggcatgaataatccaccccttgtttagcatatcatcaagaaataaccataaaaatgggcaaccagcagccctgccctgtctatggagtagccattcttttattcctttagtttcttaataaatttgctttcactgta

SEQ ID NO: 243120 - DNA, 1848 bp, Artificial Sequence
  derived and/or modified sequence
atgtgttctgaagcacgcctcgctaggagactgagagacgccctgagagaagaagaaccgtgggcggtggaagagctgctacgctgcggagcggacccgaaccttgtattggaagatggcgcagcagccgtacacctggccgcaggtgcccgacaccctcggggtctgagatgcctgggtgctttactgcgccagggtggcgatccaaacgctcgatctgtcgaggctcttacccctttacatgtggcagccgcttggggctgcaggcgaggcttagagctgttactgtctcagggagcagacccagctttgagggaccaggacggtctgaggccactcgatctggccctgcaacaaggtcaccttgagtgcgccagggtactgcaagacctagataccagaacgcgcacacgcactagaataggtgctgaaactcaggagcccgagcccgctcccggtacccccggtctctcaggcccaacagacgaaacactggactccatcgctctgcagaaacagccttgtagaggcgacaacagagatattggtttggaggccgacccagggccaccatccctgcccgtgccactggagactgtggataaacacggatcctccgccagcccccctggccactgggactactcatccgacgcatcgttcgtcacggccgttgaggtgtctggagcagaggatcctgcatctgacacccctccctgggctggctcactaccacccaccagacagggtctcctacatgtcgtgcacgccaatcagcgtgtgcctagaagtcagggtacggaggctgagctgaatgcacgcttgcaagcactgacactgactccccctaatgcagcgggatttcagagtagcccatctagcatgcccctgcttgaccggtcccctgcacattcacctcctagaactccaactccaggcgcaagcgactgtcactgtttgtgggaacatcagacttcaattgattccgacatggccaccctgtggttgacagaggatgaagcaagcagtactgggggtagagaacctgttggaccctgccgacacctcccagtgagcaccgtcagtgatttagaactgctcaagggcttgagggctctgggcgaaaatcctcaccctatcactcccttcacaaggcaactctaccaccagcagctggaagaggcacagatcgctcctggcccagagttttccggccactcccttgagcttgccgctgcccttcggacaggttgcattcccgatgtgcaggcggatgaggacgctctggcccaacaatttgagcagcccgaccccgcacgccgatggcgcgagggggtggtgaagagtagcttcacttatctgttgcttgacccccgagagacccaggatctgccagcccgagccttttctctcacgccagccgaaagattgcagaccttcatccgggctatattctatgtgggcaagggaactagggccagaccctatgtgcatctgtgggaagctctaggtcaccatggtaggagcaggaaacagccccatcaagcttgcccaaaggtaaggcagatcctggacatctgggcttcaggctgtggagtcgtatctcttcattgtttccagcacgtggtggctgtggaggcctataccagggaagcttgtattgtcgaggccctgggcattcagaccctaaccaaccagaagcagggtcattgctacggcgttgtagcgggttggccccctgcccgaaggaggagactgggcgtgcatctgctgcatcgcgctctgctggtgttcctggcggaaggagaacgacaactgcacccacaagatattcaggctcgcggatag

SEQ ID NO: 243121 - DNA, 1848 bp, Artificial Sequence
  derived and/or modified sequence
atgtgctcggaagccaggctggcaagacggctcagggatgccctccgggaagaagagccttgggctgtggaggaactgcttaggtgtggggcagatcccaatctggtgctcgaggacggtgccgctgcagtccatctggccgcaggagcacgtcacccaaggggacttagatgcctcggtgctctccttcgacagggcggtgaccccaacgctcgcagcgtggaagctctcacaccactacacgtggcggctgcctggggctgccgcagaggcctagagctgctgctaagtcagggggctgaccccgcattgagagaccaggacgggttgcggccactcgatctggccctgcaacaaggacacttggaatgtgcaagagtcctgcaggatctggacacccgaacacggactcggactagaattggtgcagaaacacaggagcctgagccagcgccaggaacgccagggctgtctggtcccaccgatgaaacacttgactctatcgcgctgcagaaacagccttgcagaggggataatagagacataggactggaggcagacccgggacctccgtctctccccgttcccctggagacagttgacaagcacggatccagtgctagccctcccggacattgggattatagctctgatgcctctttcgtgacagcagtcgaagtgtcaggcgcagaagatcctgcttcagatactcctccctgggccggttcactgcccccaacacggcaagggctgctgcatgtggtccatgccaatcaacgagttcctagatctcaggggactgaagctgaattaaacgctcggctccaagccctgacattgaccccgcctaacgcagctggcttccagagttcaccatcatccatgcctttgttggaccggtctccagctcacagtccaccacgcactcctactcctggcgcttcagactgccactgtctgtgggaacatcaaacttccatcgattctgacatggccacgctgtggcttacggaggatgaagcttccagtacggggggtcgagagcccgttggcccttgccgacacctcccagtttctaccgtgtctgacctggagttgcttaaaggccttcgcgctcttggggagaacccccacccgataactccttttaccaggcaactttatcatcaacaactagaggaggcccaaattgccccaggaccggaattttccgggcacagccttgaactagcggcagcccttcgtacaggatgcattccagatgttcaagcagacgaggatgcccttgcccagcagtttgagcagcccgatccggctcggaggtggcgtgagggagttgttaagtcatcatttacgtatctgctactcgatccacgagaaactcaggacctgccagcaagggcgttttctctgacccctgcggagaggcttcaaacatttatccgcgctatcttctatgtgggaaaagggacccgcgctaggccatacgtgcacttgtgggaggccctgggccatcacgggaggtctagaaaacagccccatcaggcttgtccaaaagtacgtcagattctggacatctgggcctcaggatgcggcgtcgtcagcctccattgcttccagcatgtggtcgctgtcgaagcgtacacacgggaggcctgcatcgtggaggctctgggaattcagacactaacaaaccagaagcagggacactgttatggcgtggtcgcaggttggccacccgctcggaggcgaaggcttggggttcacctgttacaccgggcactgctcgtctttctcgcagaaggagagagacaactccacccccaggacattcaggccagaggatag

SEQ ID NO: 243122 - DNA, 1848 bp, Artificial Sequence
  derived and/or modified sequence
atgtgcagcgaggccagactggccagaagactgagagacgccctgagagaggaggagccctgggccgtggaggagctgctgagatgcggcgccgaccccaacctggtgctggaggacggcgccgccgccgtgcacctggccgccggcgccagacaccccagaggcctgagatgcctgggcgccctgctgagacagggcggcgaccccaacgccagaagcgtggaggccctgacccccctgcacgtggccgccgcctggggctgcagaagaggcctggagctgctgctgagccagggcgccgaccccgccctgagagaccaggacggcctgagacccctggacctggccctgcagcagggccacctggagtgcgccagagtgctgcaggacctggacaccagaaccagaaccagaaccagaatcggcgccgagacccaggagcccgagcccgcccccggcacccccggcctgagcggccccaccgacgagaccctggacagcatcgccctgcagaagcagccctgcagaggcgacaacagagacatcggcctggaggccgaccccggcccccccagcctgcccgtgcccctggagaccgtggacaagcacggcagcagcgccagcccccccggccactgggactacagcagcgacgccagcttcgtgaccgccgtggaggtgagcggcgccgaggaccccgccagcgacacccccccctgggccggcagcctgccccccaccagacagggcctgctgcacgtggtgcacgccaaccagagagtgcccagaagccagggcaccgaggccgagctgaacgccagactgcaggccctgaccctgaccccccccaacgccgccggcttccagagcagccccagcagcatgcccctgctggacagaagccccgcccacagcccccccagaacccccacccccggcgccagcgactgccactgcctgtgggagcaccagaccagcatcgacagcgacatggccaccctgtggctgaccgaggacgaggccagcagcaccggcggcagagagcccgtgggcccctgcagacacctgcccgtgagcaccgtgagcgacctggagctgctgaagggcctgagagccctgggcgagaacccccaccccatcacccccttcaccagacagctgtaccaccagcagctggaggaggcccagatcgcccccggccccgagttcagcggccacagcctggagctggccgccgccctgagaaccggctgcatccccgacgtgcaggccgacgaggacgccctggcccagcagttcgagcagcccgaccccgccagaagatggagagagggcgtggtgaagagcagcttcacctacctgctgctggaccccagagagacccaggacctgcccgccagagccttcagcctgacccccgccgagagactgcagaccttcatcagagccatcttctacgtgggcaagggcaccagagccagaccctacgtgcacctgtgggaggccctgggccaccacggcagaagcagaaagcagccccaccaggcctgccccaaggtgagacagatcctggacatctgggccagcggctgcggcgtggtgagcctgcactgcttccagcacgtggtggccgtggaggcctacaccagagaggcctgcatcgtggaggccctgggcatccagaccctgaccaaccagaagcagggccactgctacggcgtggtggccggctggccccccgccagaagaagaagactgggcgtgcacctgctgcacagagccctgctggtgttcctggccgagggcgagagacagctgcacccccaggacatccaggccagaggctag

SEQ ID NO: 243123 - protein, 3549 aa, Artificial Sequence
  derived and/or modified sequence
MFPMQKGSLNLLRQKWESCDYQRSECHPRDSHCTIFQPQESKLLAPEGEVVSAPQSLDPTSLPYSTGEEMWSSKPEEKDSVDKSNNTREYGRPEVLKEDSLSSRRRIERFSIALDELRSVFEAPKSGNKPAEYGGKEVEIERSLCSPAFKSHPGSQLEDSVKDSDKKGKETSFDKMSPESGHSRIFEATAGPNKPESGFAEDSAARGEGVSDLHEVVSLKERMARYQAAVSRGDCRSFSANMMEESEMCAVPGGLAKVKKQFEDEITSSRNTFAQYQYQHQNRSEQEAIHSSQVGTSRSSQEMARNEQEGSKVQKIDVHGTEMVSHLEKHTEEVNQASQFHQYVQETVIDTPEDEEIPKVSTKLLKEQFEKSAQEKILYSDKEMTTPAKQIKTESEYEETFKPSSVVSTSSTSCVSTSQRKETSTTRYSDHSVTSSTLAQINATSSGMTEEFPPPPPDVLQTSVDVTAFSQSPELPSPPRRLPVPKDVYSKQRNLYELNRLYKHIHPELRKNLEKDYISEVSEIVSSQMNSGSSVSADVQQARYVFENTNDSSQKDLNSEREYLEWDEILKGEVQSIRWIFENQPLDSINNGSPDEGDISRGIADQEIIAGGDVKYTTWMFETQPIDTLGAYSSDTVENAEKIPELARGDVCTARWMFETRPLDSMNKMHQSQEESAVTISKDITGGDVKTVRYMFETQHLDQLGQLHSVDEVHLLQLRSELKEIKGNVKRSIKCFETQPLYVIRDGSGQMLEIKTVHREDVEKGDVRTARWMFETQPLDTINKDITEIKVVRGISMEENVKGGVSKAKWLFETQPLEKIKESEEVIIEKEKIIGTDVSRKCWMFETQPLDILKEVPDADSLQREEIIGGDVQTTKHLFETLPIEALKDSPDIGKLQKITASEEEKGDVRHQKWIFETQPLEDIRKDKKEYTRTVKLEEVDRGDVKNYTHIFESNNLIKFDASHKIEVEGVTRGAVELNKSLFETTPLYAIQDPLGKYHQVKTVQQEEIVRGDVRSCRWLFETRPIDQFDESIHKFQIIRGISAQEIQTGNVKSAKWLFETQPLDSIKYFSDVEETESKTEQTRDIVKGDVKTCKWLFETQPMESLYEKVSLMTSSEEIHKGDVKTCTWLFETQPLDTIKDDSETAVKLQTVKQEEIQGGDVRTACFLFETENLDSIQGEEVKEIKPVEMDIQAGDVSSMRYKFENQSLDSISSSSEEVLKKIKTLKTEDIQKGNVLNCRWLFENQPIDKIKESQEGDECVKTVTDIQGGDVRKGCFIFETFSLDEIKEESDYISTKKTITEEVIQGDVKSYRMLFETQPLYAIQDREGSYHEVTTVKKEEVIHGDVRGTRWLFETKPLDSINKSETVYVIKSVTQEDIQKGDVSSVRYRFETQPLDQISEESHNIMPSIDHIQGGNVKTSRQFFESENFDKNNYIRTVSVNEIQKGNVKTSTWLFETHTMDELRGEGLEYENIKTVTQEDVQKGDVKQAVWLFENRTFDSIMEAHKGITKMTKEEIPPSDVKTTTWLFETTPLHEFNETRVEKIEIIGKSIKETLEDLYSQKVIQAPGIIIEADEIGDVRMAKYKLMNQASPEIQKEEIIRADLRNIMVNLLSKRDCTEREILISEEEKGNVNLTKTQLLNRSTEFHAEKEEIVKGDVQQAIKNLFSEERSVKKGILIQEDEKGDINMTIYCLLHENDGDTIEREEVIGGDVKRTIHNLLSSTSNNKISERAKIDASERGNVQFFTTCIEAGALDYLKQLHTESNETLTAKKQEGEKEIIGGDVEGTKLLLKKRQSLVERTVSETDIIPGDVHNTVKVFMTEPQSTFGKIPKEEIIKGDLTSTLNSLSQAVNQKTVTKTEEIIKGNMLATLKSLKESSHRWKESKQPDAIPGDIEKAIECLEKATNTKTEILKKELLKDDLETSLRSLKEAQRSFKEVHKEGVIKKDAKAVMAGSSGEQKTDIHQVAVQRNKNSLLQPKPGPFEPAAKWQGGADTLSQTMGKSCHGNLVEERTEVNLPKAPKGTVKIVIDREQNNDALEKSLRRLSNSHHKSNVLESGDKTGVWTDTTGEQHLRDEYMSRQLTSTVSVKNNLTTKESDRAVRELKKDDVFNSIQSAGKTVGKQQTYELRNDHQKMEGFHIKSPKKTKNIKILTDTQSSKPSPTQHPVSMPVGGTYDLSGDFQKQTLLKQETKYSNKDIKKKNINLQPMWQLLPVEQDTSNVTEMKVSEKSHNTFKATNKKRETDVHLKSQDFLMKTNTSTGLKMAMERSLNPINFNPENNVKESECPLPPPSPPPPPPSNASSEIEFPLPPPPPLMMFPEKNGFLPSLSTEKIKAEFESFPGLPLPPPPVDEKSERESSSMFLPPPPPPTPSQKPAHLLSSSAPEKHSGDFMQQYSQKEASNSQNSQAKIITGKTGVLPPPTLPKPKLPKHIKDNKNDFSPKVELATSLSDMECKITTSKDQKKVMVMTSSEHTETKQNVISKSLDERKQLSIDSANCLSHTVPGTSAPRKKQIAPLIKSHSFPESSGQQNPKPYMRKFKTPLMIAEEKYRQQKEEIEKQKQESSYYNIVKTQSQNQHITEVEKEMPLQKTNEEVSLSGIDSECTVVQPSPGSQSNARILGVCSDNQLSTTSPETVAAKRLHHVLAASEDKDKMKKEVLQSSRDIMQSKSACEIKQSHQECSTQQTQQKKYLEQLHLPQSKPISPNFKVKTIKLPTLDHTLNETDHSYESHKQQSEIDVQTFTKKQYLKTKKTEASTECSHKQSLAERHYQLPKKEKRVTVQLPTESIQKNQEDKLKMVPRKQREFSGSDRGKLPGSEEKNQGPSMIGRKEERLITERKHEHLKNKSAPKVVKQKVIDAHLDSQTQNFQQTQIQTAESKAEHKKLPQPYNSLQEEKCLEVKGIQEKQVFSNTKDSKQEITQNKSFFSSVKESQRDDGKGALNIVEFLRKREELQQILSRVKQFEAEPNKSGLKTFQTLLNTIPGWLISEDKREYAVHIAMENNLEKVKEEITHIKTQAEDMLVSYENIIQTAMMSSKTGKPGNKPTSLDETSSKVSNVHVSNNKNSEQKENKIAKEKTVQHQVAAHHEATVRSHVKTHQEIKLDDSNIPPPSLKTRPPSPTFITIESTARRTENPTKNELSQSPKKDSYVEPPPRRPMSQKSEIHRANTSPSPPRSRSEQLVRLKDTTAKLSKGAIPCPAATPVPIVEKRSEIIMSPATLRRQIKIETRGRDSPPTITIPVNINHAASGSFRESVDAQEEIRKVEKRATYVHKDGLNSTDHMVPDTESYDAVEIIRKVAVPPRLSEHTQRYEAANRTVQMAENFVNDPENEINRWFREFEHGPVSEAKSNRRVYAKGETNHNIQQESRTFCKEEFGLTSLGNTSFTDFSCKHPRELREKIPVKQPRICSETRSLSEHFSGMDAFESQIVESKMKTSSSHSSEAGKSGCDFKHAPPTYEDVIAGHILDISDSPKEVRKNFQKTWQESGRVFKGLGYATADASATEMRTTFQEESAFISEAAAPRQGNMYTLSKDSLSNGVPSGRQAEFS

SEQ ID NO: 243124 - DNA, 10650 bp, Artificial Sequence
  derived and/or modified sequence
atgttccccatgcagaagggcagcctgaacctgctgagacagaagtgggagagctgcgactaccagagaagcgagtgccaccccagagacagccactgcaccatcttccagccccaggagagcaagctgctggcccccgagggcgaggtggtgagcgccccccagagcctggaccccaccagcctgccctacagcaccggcgaggagatgtggagcagcaagcccgaggagaaggacagcgtggacaagagcaacaacaccagagagtacggcagacccgaggtgctgaaggaggacagcctgagcagcagaagaagaatcgagagattcagcatcgccctggacgagctgagaagcgtgttcgaggcccccaagagcggcaacaagcccgccgagtacggcggcaaggaggtggagatcgagagaagcctgtgcagccccgccttcaagagccaccccggcagccagctggaggacagcgtgaaggacagcgacaagaagggcaaggagaccagcttcgacaagatgagccccgagagcggccacagcagaatcttcgaggccaccgccggccccaacaagcccgagagcggcttcgccgaggacagcgccgccagaggcgagggcgtgagcgacctgcacgaggtggtgagcctgaaggagagaatggccagataccaggccgccgtgagcagaggcgactgcagaagcttcagcgccaacatgatggaggagagcgagatgtgcgccgtgcccggcggcctggccaaggtgaagaagcagttcgaggacgagatcaccagcagcagaaacaccttcgcccagtaccagtaccagcaccagaacagaagcgagcaggaggccatccacagcagccaggtgggcaccagcagaagcagccaggagatggccagaaacgagcaggagggcagcaaggtgcagaagatcgacgtgcacggcaccgagatggtgagccacctggagaagcacaccgaggaggtgaaccaggccagccagttccaccagtacgtgcaggagaccgtgatcgacacccccgaggacgaggagatccccaaggtgagcaccaagctgctgaaggagcagttcgagaagagcgcccaggagaagatcctgtacagcgacaaggagatgaccacccccgccaagcagatcaagaccgagagcgagtacgaggagaccttcaagcccagcagcgtggtgagcaccagcagcaccagctgcgtgagcaccagccagagaaaggagaccagcaccaccagatacagcgaccacagcgtgaccagcagcaccctggcccagatcaacgccaccagcagcggcatgaccgaggagttccccccccccccccccgacgtgctgcagaccagcgtggacgtgaccgccttcagccagagccccgagctgcccagcccccccagaagactgcccgtgcccaaggacgtgtacagcaagcagagaaacctgtacgagctgaacagactgtacaagcacatccaccccgagctgagaaagaacctggagaaggactacatcagcgaggtgagcgagatcgtgagcagccagatgaacagcggcagcagcgtgagcgccgacgtgcagcaggccagatacgtgttcgagaacaccaacgacagcagccagaaggacctgaacagcgagagagagtacctggagtgggacgagatcctgaagggcgaggtgcagagcatcagatggatcttcgagaaccagcccctggacagcatcaacaacggcagccccgacgagggcgacatcagcagaggcatcgccgaccaggagatcatcgccggcggcgacgtgaagtacaccacctggatgttcgagacccagcccatcgacaccctgggcgcctacagcagcgacaccgtggagaacgccgagaagatccccgagctggccagaggcgacgtgtgcaccgccagatggatgttcgagaccagacccctggacagcatgaacaagatgcaccagagccaggaggagagcgccgtgaccatcagcaaggacatcaccggcggcgacgtgaagaccgtgagatacatgttcgagacccagcacctggaccagctgggccagctgcacagcgtggacgaggtgcacctgctgcagctgagaagcgagctgaaggagatcaagggcaacgtgaagagaagcatcaagtgcttcgagacccagcccctgtacgtgatcagagacggcagcggccagatgctggagatcaagaccgtgcacagagaggacgtggagaagggcgacgtgagaaccgccagatggatgttcgagacccagcccctggacaccatcaacaaggacatcaccgagatcaaggtggtgagaggcatcagcatggaggagaacgtgaagggcggcgtgagcaaggccaagtggctgttcgagacccagcccctggagaagatcaaggagagcgaggaggtgatcatcgagaaggagaagatcatcggcaccgacgtgagcagaaagtgctggatgttcgagacccagcccctggacatcctgaaggaggtgcccgacgccgacagcctgcagagagaggagatcatcggcggcgacgtgcagaccaccaagcacctgttcgagaccctgcccatcgaggccctgaaggacagccccgacatcggcaagctgcagaagatcaccgccagcgaggaggagaagggcgacgtgagacaccagaagtggatcttcgagacccagcccctggaggacatcagaaaggacaagaaggagtacaccagaaccgtgaagctggaggaggtggacagaggcgacgtgaagaactacacccacatcttcgagagcaacaacctgatcaagttcgacgccagccacaagatcgaggtggagggcgtgaccagaggcgccgtggagctgaacaagagcctgttcgagaccacccccctgtacgccatccaggaccccctgggcaagtaccaccaggtgaagaccgtgcagcaggaggagatcgtgagaggcgacgtgagaagctgcagatggctgttcgagaccagacccatcgaccagttcgacgagagcatccacaagttccagatcatcagaggcatcagcgcccaggagatccagaccggcaacgtgaagagcgccaagtggctgttcgagacccagcccctggacagcatcaagtacttcagcgacgtggaggagaccgagagcaagaccgagcagaccagagacatcgtgaagggcgacgtgaagacctgcaagtggctgttcgagacccagcccatggagagcctgtacgagaaggtgagcctgatgaccagcagcgaggagatccacaagggcgacgtgaagacctgcacctggctgttcgagacccagcccctggacaccatcaaggacgacagcgagaccgccgtgaagctgcagaccgtgaagcaggaggagatccagggcggcgacgtgagaaccgcctgcttcctgttcgagaccgagaacctggacagcatccagggcgaggaggtgaaggagatcaagcccgtggagatggacatccaggccggcgacgtgagcagcatgagatacaagttcgagaaccagagcctggacagcatcagcagcagcagcgaggaggtgctgaagaagatcaagaccctgaagaccgaggacatccagaagggcaacgtgctgaactgcagatggctgttcgagaaccagcccatcgacaagatcaaggagagccaggagggcgacgagtgcgtgaagaccgtgaccgacatccagggcggcgacgtgagaaagggctgcttcatcttcgagaccttcagcctggacgagatcaaggaggagagcgactacatcagcaccaagaagaccatcaccgaggaggtgatccagggcgacgtgaagagctacagaatgctgttcgagacccagcccctgtacgccatccaggacagagagggcagctaccacgaggtgaccaccgtgaagaaggaggaggtgatccacggcgacgtgagaggcaccagatggctgttcgagaccaagcccctggacagcatcaacaagagcgagaccgtgtacgtgatcaagagcgtgacccaggaggacatccagaagggcgacgtgagcagcgtgagatacagattcgagacccagcccctggaccagatcagcgaggagagccacaacatcatgcccagcatcgaccacatccagggcggcaacgtgaagaccagcagacagttcttcgagagcgagaacttcgacaagaacaactacatcagaaccgtgagcgtgaacgagatccagaagggcaacgtgaagaccagcacctggctgttcgagacccacaccatggacgagctgagaggcgagggcctggagtacgagaacatcaagaccgtgacccaggaggacgtgcagaagggcgacgtgaagcaggccgtgtggctgttcgagaacagaaccttcgacagcatcatggaggcccacaagggcatcaccaagatgaccaaggaggagatcccccccagcgacgtgaagaccaccacctggctgttcgagaccacccccctgcacgagttcaacgagaccagagtggagaagatcgagatcatcggcaagagcatcaaggagaccctggaggacctgtacagccagaaggtgatccaggcccccggcatcatcatcgaggccgacgagatcggcgacgtgagaatggccaagtacaagctgatgaaccaggccagccccgagatccagaaggaggagatcatcagagccgacctgagaaacatcatggtgaacctgctgagcaagagagactgcaccgagagagagatcctgatcagcgaggaggagaagggcaacgtgaacctgaccaagacccagctgctgaacagaagcaccgagttccacgccgagaaggaggagatcgtgaagggcgacgtgcagcaggccatcaagaacctgttcagcgaggagagaagcgtgaagaagggcatcctgatccaggaggacgagaagggcgacatcaacatgaccatctactgcctgctgcacgagaacgacggcgacaccatcgagagagaggaggtgatcggcggcgacgtgaagagaaccatccacaacctgctgagcagcaccagcaacaacaagatcagcgagagagccaagatcgacgccagcgagagaggcaacgtgcagttcttcaccacctgcatcgaggccggcgccctggactacctgaagcagctgcacaccgagagcaacgagaccctgaccgccaagaagcaggagggcgagaaggagatcatcggcggcgacgtggagggcaccaagctgctgctgaagaagagacagagcctggtggagagaaccgtgagcgagaccgacatcatccccggcgacgtgcacaacaccgtgaaggtgttcatgaccgagccccagagcaccttcggcaagatccccaaggaggagatcatcaagggcgacctgaccagcaccctgaacagcctgagccaggccgtgaaccagaagaccgtgaccaagaccgaggagatcatcaagggcaacatgctggccaccctgaagagcctgaaggagagcagccacagatggaaggagagcaagcagcccgacgccatccccggcgacatcgagaaggccatcgagtgcctggagaaggccaccaacaccaagaccgagatcctgaagaaggagctgctgaaggacgacctggagaccagcctgagaagcctgaaggaggcccagagaagcttcaaggaggtgcacaaggagggcgtgatcaagaaggacgccaaggccgtgatggccggcagcagcggcgagcagaagaccgacatccaccaggtggccgtgcagagaaacaagaacagcctgctgcagcccaagcccggccccttcgagcccgccgccaagtggcagggcggcgccgacaccctgagccagaccatgggcaagagctgccacggcaacctggtggaggagagaaccgaggtgaacctgcccaaggcccccaagggcaccgtgaagatcgtgatcgacagagagcagaacaacgacgccctggagaagagcctgagaagactgagcaacagccaccacaagagcaacgtgctggagagcggcgacaagaccggcgtgtggaccgacaccaccggcgagcagcacctgagagacgagtacatgagcagacagctgaccagcaccgtgagcgtgaagaacaacctgaccaccaaggagagcgacagagccgtgagagagctgaagaaggacgacgtgttcaacagcatccagagcgccggcaagaccgtgggcaagcagcagacctacgagctgagaaacgaccaccagaagatggagggcttccacatcaagagccccaagaagaccaagaacatcaagatcctgaccgacacccagagcagcaagcccagccccacccagcaccccgtgagcatgcccgtgggcggcacctacgacctgagcggcgacttccagaagcagaccctgctgaagcaggagaccaagtacagcaacaaggacatcaagaagaagaacatcaacctgcagcccatgtggcagctgctgcccgtggagcaggacaccagcaacgtgaccgagatgaaggtgagcgagaagagccacaacaccttcaaggccaccaacaagaagagagagaccgacgtgcacctgaagagccaggacttcctgatgaagaccaacaccagcaccggcctgaagatggccatggagagaagcctgaaccccatcaacttcaaccccgagaacaacgtgaaggagagcgagtgccccctgcccccccccagcccccccccccccccccccagcaacgccagcagcgagatcgagttccccctgcccccccccccccccctgatgatgttccccgagaagaacggcttcctgcccagcctgagcaccgagaagatcaaggccgagttcgagagcttccccggcctgcccctgccccccccccccgtggacgagaagagcgagagagagagcagcagcatgttcctgccccccccccccccccccacccccagccagaagcccgcccacctgctgagcagcagcgcccccgagaagcacagcggcgacttcatgcagcagtacagccagaaggaggccagcaacagccagaacagccaggccaagatcatcaccggcaagaccggcgtgctgcccccccccaccctgcccaagcccaagctgcccaagcacatcaaggacaacaagaacgacttcagccccaaggtggagctggccaccagcctgagcgacatggagtgcaagatcaccaccagcaaggaccagaagaaggtgatggtgatgaccagcagcgagcacaccgagaccaagcagaacgtgatcagcaagagcctggacgagagaaagcagctgagcatcgacagcgccaactgcctgagccacaccgtgcccggcaccagcgcccccagaaagaagcagatcgcccccctgatcaagagccacagcttccccgagagcagcggccagcagaaccccaagccctacatgagaaagttcaagacccccctgatgatcgccgaggagaagtacagacagcagaaggaggagatcgagaagcagaagcaggagagcagctactacaacatcgtgaagacccagagccagaaccagcacatcaccgaggtggagaaggagatgcccctgcagaagaccaacgaggaggtgagcctgagcggcatcgacagcgagtgcaccgtggtgcagcccagccccggcagccagagcaacgccagaatcctgggcgtgtgcagcgacaaccagctgagcaccaccagccccgagaccgtggccgccaagagactgcaccacgtgctggccgccagcgaggacaaggacaagatgaagaaggaggtgctgcagagcagcagagacatcatgcagagcaagagcgcctgcgagatcaagcagagccaccaggagtgcagcacccagcagacccagcagaagaagtacctggagcagctgcacctgccccagagcaagcccatcagccccaacttcaaggtgaagaccatcaagctgcccaccctggaccacaccctgaacgagaccgaccacagctacgagagccacaagcagcagagcgagatcgacgtgcagaccttcaccaagaagcagtacctgaagaccaagaagaccgaggccagcaccgagtgcagccacaagcagagcctggccgagagacactaccagctgcccaagaaggagaagagagtgaccgtgcagctgcccaccgagagcatccagaagaaccaggaggacaagctgaagatggtgcccagaaagcagagagagttcagcggcagcgacagaggcaagctgcccggcagcgaggagaagaaccagggccccagcatgatcggcagaaaggaggagagactgatcaccgagagaaagcacgagcacctgaagaacaagagcgcccccaaggtggtgaagcagaaggtgatcgacgcccacctggacagccagacccagaacttccagcagacccagatccagaccgccgagagcaaggccgagcacaagaagctgccccagccctacaacagcctgcaggaggagaagtgcctggaggtgaagggcatccaggagaagcaggtgttcagcaacaccaaggacagcaagcaggagatcacccagaacaagagcttcttcagcagcgtgaaggagagccagagagacgacggcaagggcgccctgaacatcgtggagttcctgagaaagagagaggagctgcagcagatcctgagcagagtgaagcagttcgaggccgagcccaacaagagcggcctgaagaccttccagaccctgctgaacaccatccccggctggctgatcagcgaggacaagagagagtacgccgtgcacatcgccatggagaacaacctggagaaggtgaaggaggagatcacccacatcaagacccaggccgaggacatgctggtgagctacgagaacatcatccagaccgccatgatgagcagcaagaccggcaagcccggcaacaagcccaccagcctggacgagaccagcagcaaggtgagcaacgtgcacgtgagcaacaacaagaacagcgagcagaaggagaacaagatcgccaaggagaagaccgtgcagcaccaggtggccgcccaccacgaggccaccgtgagaagccacgtgaagacccaccaggagatcaagctggacgacagcaacatccccccccccagcctgaagaccagaccccccagccccaccttcatcaccatcgagagcaccgccagaagaaccgagaaccccaccaagaacgagctgagccagagccccaagaaggacagctacgtggagcccccccccagaagacccatgagccagaagagcgagatccacagagccaacaccagccccagcccccccagaagcagaagcgagcagctggtgagactgaaggacaccaccgccaagctgagcaagggcgccatcccctgccccgccgccacccccgtgcccatcgtggagaagagaagcgagatcatcatgagccccgccaccctgagaagacagatcaagatcgagaccagaggcagagacagcccccccaccatcaccatccccgtgaacatcaaccacgccgccagcggcagcttcagagagagcgtggacgcccaggaggagatcagaaaggtggagaagagagccacctacgtgcacaaggacggcctgaacagcaccgaccacatggtgcccgacaccgagagctacgacgccgtggagatcatcagaaaggtggccgtgccccccagactgagcgagcacacccagagatacgaggccgccaacagaaccgtgcagatggccgagaacttcgtgaacgaccccgagaacgagatcaacagatggttcagagagttcgagcacggccccgtgagcgaggccaagagcaacagaagagtgtacgccaagggcgagaccaaccacaacatccagcaggagagcagaaccttctgcaaggaggagttcggcctgaccagcctgggcaacaccagcttcaccgacttcagctgcaagcaccccagagagctgagagagaagatccccgtgaagcagcccagaatctgcagcgagaccagaagcctgagcgagcacttcagcggcatggacgccttcgagagccagatcgtggagagcaagatgaagaccagcagcagccacagcagcgaggccggcaagagcggctgcgacttcaagcacgccccccccacctacgaggacgtgatcgccggccacatcctggacatcagcgacagccccaaggaggtgagaaagaacttccagaagacctggcaggagagcggcagagtgttcaagggcctgggctacgccaccgccgacgccagcgccaccgagatgagaaccaccttccaggaggagagcgccttcatcagcgaggccgccgcccccagacagggcaacatgtacaccctgagcaaggacagcctgagcaacggcgtgcccagcggcagacaggccgagttcagctag

SEQ ID NO: 243125 - DNA, 10650 bp, Artificial Sequence
  derived and/or modified sequence
atgtttcctatgcaaaaggggagtctgaacctgctccgtcagaagtgggagtcctgcgattatcagcgctctgaatgccatccccgcgactcccactgcactatttttcagcctcaggaaagtaagcttttggctcccgagggagaagttgtgtccgcaccccaaagtttggacccgacgtctctgccatattcgaccggagaagaaatgtggtcgagcaaacccgaggagaaggattctgttgacaagtccaataatacccgggagtatggacgtcccgaagtcctcaaggaggactctctgtcttcaaggcgcaggattgagagattttctatagccctggacgagcttcgatccgtcttcgaggctcctaagtctggcaataagcccgccgagtacggagggaaggaagtggagatcgagcgcagtctctgttcgcctgctttcaaatcccaccccggctctcagctcgaggactccgtcaaggattccgacaagaaaggcaaagagacttcatttgataaaatgtcccctgaatctggccactcccgaatattcgaggctacggccggacccaataagccggagtcaggctttgcggaggactccgcggcaagaggggagggcgtctcagacctgcatgaggtcgtaagtcttaaagagcgcatggccagatatcaggccgcagtgagtcgcggagattgccgctcattttcagccaatatgatggaggaatcggagatgtgtgccgttcctggcggactggcgaaggtgaaaaagcagtttgaagatgaaatcacatcttctcgcaatacttttgcccagtaccagtaccagcaccaaaataggagcgagcaggaagcgattcactcttctcaggtgggcacttccagaagtagccaagaaatggctcgcaacgagcaggagggcagtaaggtccagaagatcgatgtccatggaacagaaatggtctctcacctcgagaagcacacagaggaggtaaaccaggcctcgcagttccaccagtacgttcaggaaacggtgatcgacacgccagaagatgaggaaattcctaaagttagcacaaagttactgaaggagcagttcgagaagtccgcccaggagaaaattttgtactctgacaaagagatgactactccggccaaacagattaagacggagagcgagtatgaggagacttttaaaccatcttcagttgtgtccacatcatccactagttgcgtatctacatcgcagcgcaaggagacatctactacccggtacagcgatcattccgtgacgagcagcacactggctcagattaacgcgacctctagcgggatgacggaagagtttccaccacccccacccgatgtgctgcaaacctcagtggatgtgacggctttctctcagtcacccgaactgccttcccctcctaggcggcttccagtcccaaaggatgtgtattctaaacagcgaaacctgtacgaactgaaccgtctctataaacatatacatccggagcttcgcaaaaacctggagaaggactacatctccgaggtatctgagattgtaagttcacagatgaattctggaagttctgtctccgctgacgttcagcaggctaggtacgtatttgaaaataccaatgattcctctcagaaagacttgaacagcgagcgcgagtatctggagtgggacgagatactgaagggagaggtacagagtattcggtggatcttcgaaaaccaacccctagatagtataaacaacggatctcctgacgaaggcgacatttcccgcggaattgctgaccaggagatcatcgcgggaggcgacgtgaagtataccacgtggatgttcgaaacccagcccattgacaccttaggcgcatatagttctgacacagtggaaaacgcagaaaagattcctgaactggccaggggagatgtgtgcaccgctcgctggatgtttgagacgcgcccactggactccatgaataaaatgcaccagagtcaagaggaatccgccgtgaccatttcgaaggacattacaggcggagatgtgaagactgtacgttatatgtttgaaacccagcaccttgatcagttaggtcagctacactccgtggatgaggtgcatcttctgcaactgaggtccgaactgaaggaaattaaagggaacgtgaaacgttctatcaaatgctttgagacacaaccactatatgttattagagatggctctggccagatgctggagatcaagaccgtgcaccgtgaggacgtagagaagggagacgtccgaactgcacgctggatgtttgaaacacagccattggacacaataaacaaggacatcaccgaaatcaaagttgtgaggggaataagcatggaagaaaatgttaagggtggtgtgagtaaggccaagtggctgtttgagacacagccgctggagaagattaaggaatcagaagaagtgattatagaaaaagagaagatcataggcactgatgttagtaggaagtgctggatgttcgagacgcagcctttggatatcctgaaagaggtgcctgacgctgactctttgcagagggaggaaatcattggcggagacgtacaaaccaccaaacacctgtttgagacactacctattgaggctctgaaggattcccccgatattggtaaactgcagaagatcacggcgtccgaagaggaaaaaggggacgtacgtcatcagaagtggatttttgaaacgcagcccctcgaagatattcgtaaagataagaaggagtatacacgcaccgtcaaactggaggaggtcgaccgaggggatgtaaaaaactacacgcacatttttgagagcaacaacctgatcaagttcgatgcttctcacaagatcgaggtggaaggcgtgactagaggcgctgtggaactcaacaagagtctgttcgaaacaaccccgttgtacgctatccaggacccactgggaaagtatcatcaggttaagaccgttcagcaggaggagatcgtgcgaggggacgtgcgcagctgccggtggctttttgagactcgaccaatcgatcagtttgatgagtcgatccacaagtttcaaattatacggggcatcagcgcacaagaaatccaaacaggcaacgtgaaaagcgcaaaatggttgttcgagacgcagcccctggacagcataaaatatttcagcgatgtcgaggaaaccgaaagcaaaaccgaacagacccgggacattgttaaaggggacgtaaaaacctgtaagtggttgttcgaaactcaacccatggagagcctgtatgagaaggtgtcactgatgacatcttcagaggagattcacaaaggcgacgttaagacctgtacctggctcttcgagacccagcctcttgataccatcaaagacgattccgaaactgcggtgaaattgcagacagttaaacaggaggagatacagggcggagatgtcaggactgcctgtttcttgttcgaaacggagaacttagattcgattcaaggggaggaggtcaaggagatcaaacccgtcgaaatggacattcaggccggcgatgtgagctccatgcgttataagttcgagaatcagtctctggatagcatttcatcatcaagcgaggaagtgctgaagaagattaagactctgaagacagaagacattcaaaaggggaatgttctgaactgtcggtggttgtttgagaaccaacccatcgataagatcaaggaatcacaggagggcgacgaatgtgtgaagacggtgaccgatatccagggtggagacgtcagaaagggctgcttcatttttgaaaccttcagcctggatgaaataaaagaagagagtgattatatctccacaaaaaaaactataaccgaggaggtcattcagggcgacgttaagagttatcggatgctctttgagacacaacctctctacgcgattcaggacagagagggaagctatcatgaggtgaccactgtcaaaaaggaggaagtaatacatggcgacgtgagggggactcggtggttgttcgagacgaaaccattagatagtatcaacaagtcagagacagtatatgtaattaagagcgtcacgcaggaggatattcagaagggtgatgtgtcaagcgtgagatatcgctttgaaacacagccactagaccaaatctccgaggaaagccacaatatcatgccctctatagaccatatccaaggagggaatgtgaaaacgagccggcagttttttgaatctgagaattttgacaaaaacaattatatccgaactgtgtccgtcaatgagattcagaagggcaatgtgaagacatccacttggttatttgaaacccacacgatggatgaactgcgaggcgagggcctggaatacgagaacatcaagaccgtgactcaggaggacgttcagaagggcgatgtgaaacaagccgtctggttgttcgagaacagaactttcgacagcatcatggaagctcacaaaggaatcactaaaatgacgaaggaagaaatccctccttcagacgtgaagaccaccacctggctcttcgaaaccacacccctccacgagtttaatgagacaagagtggagaagattgaaatcataggcaagtcaatcaaggagacactcgaggacctgtattctcaaaaggtaatccaggccccaggcatcataattgaagctgacgagatcggcgacgtccgcatggctaagtacaagcttatgaaccaggcaagtcctgagatccagaaagaagagattatacgtgccgatctgagaaatattatggtcaacctgctgtcaaaaagggactgtactgaaagggagatcctcatatcggaggaagagaaaggcaatgtcaacctgaccaagactcaactgcttaatagatctacggagttccatgcagagaaggaggagattgtgaagggcgatgtccagcaggccatcaagaatctcttcagtgaagagcggagtgtcaagaagggcatcctcatccaggaggatgagaaaggcgacattaacatgaccatttactgcctgctccatgaaaacgatggcgatacgattgagcgggaggaagtgataggcggcgacgtgaagcgtactatccacaacctactgagcagtacctctaacaacaagatttccgagcgtgccaagattgacgcatcagaaagggggaacgtccagttttttactacatgcatcgaggctggcgcactggactacctgaagcagctacatactgaatccaatgaaacacttactgcgaagaaacaagagggggagaaagaaatcataggcggcgacgtcgagggcacaaaactactgctcaagaagcggcaaagcctcgtagaacgcacagtttctgagacagatattattcctggcgacgtgcacaacaccgtgaaggttttcatgaccgaaccgcagtccacattcggcaagatccccaaagaggagatcataaagggtgatttaacctcaacattaaacagcctctcacaggctgtcaaccagaagacagtaacaaagactgaggagattataaagggaaacatgctggccacactgaaaagcctgaaggagtctagtcaccggtggaaggaatctaaacagccagacgccattccaggagatattgaaaaggccatcgagtgcctggagaaggccaccaacacaaagaccgagattttaaaaaaggaactgctcaaggatgacttggagacttctctgagaagcctgaaagaagcccagagatctttcaaagaagtccataaagagggcgtaatcaaaaaagatgctaaagccgtaatggcaggctcctcaggagagcagaagaccgatattcatcaggttgcggtccagagaaataagaattctcttctccagccgaaacccggtccatttgagcctgcggccaagtggcagggtggggcagataccctgagccagaccatgggcaagagttgccacggcaacttggtggaggagagaacagaagtcaatctgcctaaagccccgaaaggcaccgtaaagatcgtcatagatcgagagcaaaacaacgacgcattagagaaaagtctgagaaggttaagcaacagtcatcataaatccaacgtgctggagagtggagataaaacaggcgtgtggacagatacaaccggggaacagcatttgcgagacgaatacatgagccgacagctcactagcacggtatccgtgaagaataatctgactacaaaagagtctgatcgggccgtgcgcgagctgaagaaagatgatgtgttcaatagtatccagtccgctggaaagaccgtgggcaaacagcaaacctatgagctgagaaatgatcatcaaaaaatggaaggcttccacatcaagtctcctaagaagactaagaacatcaaaatccttactgacacccaaagttccaagccaagccccacccaacaccctgtctcaatgcccgtaggcggtacctacgacctgagcggggactttcagaagcagacacttctcaaacaggaaacaaaatactcaaataaggatatcaagaaaaagaatattaatctacagcctatgtggcagcttttaccggtcgaacaggacacctccaacgtgacagagatgaaagtgagtgagaaatcgcataatacctttaaggccacgaacaagaaaagggaaaccgatgttcatctcaaaagccaggattttctcatgaaaaccaacacttcaacaggactcaaaatggccatggaacgcagcctgaatcctattaatttcaatcccgaaaacaacgtgaaggagtcagaatgccctctgcctccaccctcccctccccctccacccccatcaaatgccagctccgaaatagaatttcccctgcctcccccgccaccgctaatgatgtttccagagaagaatggctttttaccatccctcagtacagagaagattaaggcagaatttgagtcctttcctggcctacccctaccaccgccccctgtggatgaaaaatcggaacgcgaaagttctagtatgttcctacctccgccgccaccgcccactccatcgcaaaaaccagcacacctgctatctagttcagcccctgagaaacattctggggatttcatgcagcagtactcccagaaggaagcgtccaacagccagaactctcaagcaaagatcatcactggtaagacgggtgttctgccacccccaacacttcccaagccaaagttgcccaaacatattaaagataacaagaacgacttttctccaaaggttgaactggccacatctcttagcgacatggagtgcaagatcactaccagcaaggaccagaagaaggtcatggtgatgactagtagtgagcacactgaaactaagcagaacgttatttccaagagcctggatgaacgtaaacagctgtccatcgatagcgctaactgcctaagtcatacagtcccaggaactagcgcaccaaggaagaaacagatagcgcccttaatcaagtcccatagcttccccgaaagttcagggcagcagaacccaaaaccctacatgaggaagtttaaaacacccttaatgatcgccgaggagaaataccgccagcagaaggaagagattgagaaacagaagcaagaatcttcctattataatatcgttaagacacagtctcagaaccagcacatcacagaggtggaaaaggaaatgcccctgcagaaaactaatgaagaagtctctctcagtgggatcgattcggagtgcactgtagtccagccgtcgcccggcagccaaagcaacgccaggatcctgggagtgtgtagcgacaaccagctgagcaccacatcgcctgagacggtggccgctaaacggctacatcacgtgctggccgccagcgaggacaaagacaaaatgaagaaagaggtgctgcagtcttctcgggacatcatgcagagcaaatctgcctgtgagatcaagcaatctcatcaggagtgttccacacagcagacacaacagaaaaagtacctggagcaactacacctaccccaaagcaaacctatttccccaaatttcaaggttaaaacgatcaaactgcctacattggatcacactttgaatgaaaccgaccactcatatgagagtcacaagcagcaaagtgagatcgacgtgcagacattcaccaagaagcagtatctaaagactaagaagaccgaggcctccacagagtgcagccataaacaaagtcttgcggagcgacattaccaactgccaaagaaagagaaaagggtgacagttcaacttcctacagaatctattcagaaaaatcaggaggacaagttgaagatggtccctcggaagcaaagggagttctcgggatctgatcgggggaaactcccagggtctgaggagaagaatcagggaccaagcatgatcgggaggaaagaggaacgtctgattactgagagaaagcacgaacacctgaagaataaatctgcaccaaaggtggttaagcagaaagtcattgatgcccacctggacagccaaactcagaacttccagcaaacccagatacagaccgccgagtcaaaagccgaacacaagaagttgcctcagccttataattcgctccaggaggaaaagtgtttggaggtcaaagggatccaggagaaacaggtctttagtaacactaaagactcaaaacaggagattactcagaataaatctttcttcagcagcgtgaaggagtcacagagagatgatggcaaaggtgccctgaacatcgttgagttcctcaggaaacgcgaggagttgcagcagatcctgtcaagagtgaaacagtttgaggcagaacctaataagtccggtctcaaaacttttcagactctgctgaacaccattccaggatggttgatttccgaagacaagagagaatatgctgtgcatattgccatggagaacaacctggaaaaggtgaaggaggaaatcacccacataaaaacccaggctgaagacatgttggtcagctacgaaaacataattcagaccgccatgatgtccagtaaaactggcaagccaggcaacaagcctaccagccttgacgagacatccagtaaggtatcaaacgtccatgtatcaaataataagaacagtgagcagaaggagaataagatcgccaaggaaaaaacagttcagcaccaggtggccgctcaccacgaggccacagtccgctctcacgtcaaaactcatcaggaaataaagttggacgacagcaacattcccccgccctcgttgaaaacccggccccccagtcccaccttcatcacaattgaatccaccgcgcggcggacagagaatcctaccaaaaatgagctgagtcagtctcccaaaaaagactcctacgtggagccgccacctcggaggccaatgtcccagaagtccgagatccacagggcgaacacctccccctcacccccgaggtctaggagcgagcagttggttcgcctcaaggataccacagcgaagctgagcaagggcgccatcccttgtccagccgctactcccgtaccaattgttgagaaacggtctgagataattatgagcccagcaactcttcgacgtcagattaaaatcgagaccaggggcagggactccccgcctaccataaccatacccgtgaatatcaaccacgccgcatccgggtcatttcgcgagagtgttgacgctcaggaggagattaggaaagtggagaagcgcgcaacgtatgtacacaaggatggtctgaactcaactgatcacatggtccccgacacagaatcttacgatgccgttgagatcattcggaaggttgccgtaccacctcgactgagcgagcatactcagagatatgaagcggccaaccgaaccgtgcagatggcagaaaattttgtaaatgatccagagaatgaaatcaacagatggttccgtgagttcgaacacggccctgtgtctgaggctaagtcaaatcgtcgcgtgtacgctaagggcgaaaccaatcacaatattcagcaggagtcgcgcacattctgtaaggaagagtttggcctcacttcccttggtaataccagcttcacagatttttcctgcaaacatcctagagaacttcgggagaagatcccagtcaaacagcccaggatatgcagtgaaaccagatctcttagcgaacatttttccggcatggatgcctttgaaagtcagattgttgaatccaaaatgaagacatcctctagtcactcttccgaggctggcaaatccggttgcgattttaaacacgctccacccacatacgaggatgtcattgcgggccatatcctcgacatctctgattcccccaaggaggtgcggaagaacttccaaaagacctggcaggagagcgggcgggtgttcaaaggacttgggtacgctacagcggacgcatcagccaccgaaatgcggacaacctttcaggaggaatccgcgtttataagcgaggcagctgctccccggcagggcaatatgtacaccctctcaaaggattccctgagcaacggtgttcctagtggtcgccaagcagagttcagctag

SEQ ID NO: 243126 - DNA, 10650 bp, Artificial Sequence
  derived and/or modified sequence
atgttcccgatgcagaaaggctcacttaacttgctccgccaaaaatgggaatcctgtgattatcagcgctcagagtgtcatcctcgggactctcactgtacaatcttccagcctcaggaatccaagttgctggctcctgagggagaggtggtatccgcccctcagtcacttgatccaacttcactcccttactctacaggagaggagatgtggtcgagcaagcccgaggagaaagatagcgttgacaagtctaataacacacgggagtacggccgccccgaggtgttgaaggaagattcactgagctctcggaggcgcattgaacgattctccatagctttggatgaactgcgctctgtgttcgaggcccccaaaagcggaaataagcccgctgaatacggcggtaaagaagtcgagatagaacgaagtttatgcagccccgcctttaagagtcaccccggcagccagctggaggactcggtgaaggattccgacaagaagggaaaggaaacatcgttcgataagatgagcccagaatctggccattctcggattttcgaggcaaccgccgggcccaacaagcccgagtctggttttgcggaggattcagccgcccggggcgaaggtgtgagtgacctgcatgaagtcgtctcccttaaggagaggatggctagatatcaggccgctgtctcacgaggtgattgccgctctttcagtgccaacatgatggaggaatctgagatgtgcgccgtccctgggggcttggctaaagtgaaaaagcaatttgaagacgagatcacaagcagtcggaacaccttcgcacagtatcaataccaacaccagaatcgttcagaacaggaggccattcacagctcccaggtcggaacttcacgcagctcgcaagaaatggcacgaaatgaacaggaaggaagtaaggtccagaaaattgatgtgcatggcactgagatggtctcgcatctcgagaaacacaccgaggaagtgaatcaagcctcccagtttcaccagtatgtacaagagactgtgattgacactcccgaagacgaagagattcctaaagtcagtactaagcttctgaaagaacaatttgaaaagtccgcacaggaaaaaattctatatagcgataaggagatgactaccccagccaaacagattaagaccgagtcagaatatgaagaaacctttaaacccagcagtgtggtgagcactagctcaacctcatgtgtctctacgtcccagcgaaaagagacatccaccaccagatactccgatcattctgtgacaagtagtacactggcccagatcaatgcaacctcctctgggatgaccgaggagtttccacccccaccaccggacgtccttcaaaccagcgtggacgtgacggccttcagtcagtccccggagctgccttctccgcctaggcgcctgccagtccccaaggacgtatacagtaaacaacgcaatctctacgagctgaatcggctctataaacacatccacccagagctgcggaagaatctcgaaaaagactacatcagcgaagtttcggagatcgtatcatcccaaatgaacagtggcagttctgtctctgcagacgtgcaacaggctcgttacgttttcgagaacactaacgattcctctcaaaaggacctgaacagtgaaagggagtatcttgaatgggatgaaatactcaagggcgaagtacagagcatccgctggattttcgaaaatcagccacttgactcaatcaacaacggatcccctgacgagggcgatatctctcgggggattgccgaccaggagattatcgcaggcggcgatgtcaagtacactacatggatgttcgagactcaacccatagacacactgggcgcctacagtagcgataccgtagaaaatgcagaaaagatccctgagttggcaaggggggacgtctgcaccgccaggtggatgtttgaaacccgccctctcgatagcatgaataagatgcaccaatcgcaagaggaaagtgctgtgactatttcaaaggacattacaggtggggacgtgaagaccgtgcggtacatgttcgagactcagcacctggaccaactcggccagctgcattcagtggatgaagttcatctcctccagttaagatccgagctcaaggagattaaaggtaacgtgaagagatctattaagtgtttcgaaactcagccgctctacgtgataagagatgggtccgggcagatgttagagatcaagactgtccaccgtgaagacgtggagaagggtgacgtgcgcaccgctaggtggatgtttgagacccagccactcgacacgattaataaagatattacggaaattaaggtggtacgagggattagcatggaggagaatgtgaaaggaggagtgagcaaagccaagtggcttttcgaaactcagcctctcgagaagattaaggagagcgaggaggtaatcatagaaaaagaaaagatcataggcaccgacgttagtcgaaagtgttggatgttcgagacccagcccctggacattctgaaggaggtgcccgatgctgattccttgcagagggaggaaatcattggaggtgacgtccagaccaccaagcatttgtttgagaccctgcctattgaggcgctaaaggacagcccggacatcggaaagctccagaaaatcactgccagtgaggaggagaagggcgacgtccgccatcaaaagtggatcttcgagactcaacccctggaagacattcgaaaggacaaaaaagagtacacacgcaccgtcaaattagaagaggtagacaggggcgatgtgaagaactacacacatatatttgagtctaataacctgatcaagttcgatgctagtcataagatcgaagtcgagggtgtgacccgcggggccgttgagctcaacaaatccctttttgagaccacccctctgtacgctattcaggatccgcttgggaaataccaccaggttaagactgtgcagcaggaagagatagttagaggggacgtgcggtcctgtcgttggttattcgagacaagacccattgatcagtttgatgagagcatacataagtttcaaatcattagaggaataagcgcccaagaaattcagacaggaaacgtcaaatccgctaagtggctcttcgagacccaaccccttgacagtattaagtacttctctgatgtagaagagacggagtcaaagaccgaacagactagggacatcgtgaagggtgatgtgaagacatgcaaatggctattcgagactcaaccaatggaatctctgtacgagaaggtctccctgatgaccagttcggaagagatacacaaaggggacgtcaaaacctgtacctggttattcgaaactcaaccactggacaccataaaagatgactccgaaacagcggtcaagttacagaccgtcaaacaggaggagattcaaggaggcgatgtacgaaccgcgtgttttctgtttgaaacagaaaatctagattcgattcagggtgaggaggtgaaagaaataaaaccggtggagatggacatccaggccggcgacgtcagctcaatgcgctacaagttcgaaaaccaatcgctggacagcatcagtagtagctctgaagaggtattaaaaaaaatcaaaactcttaagacagaagacattcagaagggcaatgtgttaaactgccggtggttattcgaaaatcagcccatcgataagatcaaggagagccaggaaggcgacgagtgcgtaaaaaccgtgacagatatacaggggggagacgtgaggaaagggtgtttcatctttgagacctttagcttagatgagatcaaggaggagtctgactacatatccacaaagaaaacaatcactgaagaagttattcagggggacgtcaaaagctaccggatgttatttgaaacccaaccgctgtacgccatccaggacagggagggctcataccacgaagttactaccgtcaagaaggaggaagtcattcacggggatgtccgtggaactaggtggctgtttgagactaagccactcgatagtatcaacaagtccgagacagtttatgtgattaagtcagtcacccaggaggacattcagaagggcgacgtgtcctctgtgagatacagattcgaaacacaacccctcgatcagatttctgaggaatcacacaatattatgccttcaatcgatcacatccagggggggaatgttaagacaagccgacagttcttcgagtccgaaaattttgataagaacaattacatccgcaccgtcagcgtgaatgaaattcagaaaggaaatgtcaaaacctctacgtggctttttgagacacacacaatggacgaactgagaggcgagggcctggagtacgaaaacattaaaaccgtcacccaggaagacgtacagaaaggggacgtaaaacaggccgtctggctattcgagaatcgaacatttgattccattatggaggcccataagggaatcaccaagatgacgaaggaagaaatccccccttctgacgtgaaaacaaccacctggctgttcgagacaacacccctccacgaattcaatgagactcgggtcgaaaaaatcgagatcatcggtaaatctattaaagaaacactcgaggatctgtatagccagaaagtcattcaggccccgggaatcatcattgaggctgacgaaattggtgatgttcgcatggcaaagtacaaactgatgaatcaagcttcccccgaaatccagaaggaggagattatcagagcagatctgcggaatattatggtgaacttattgtcaaagcgcgattgcaccgaaagagaaatcctcatatccgaagaagaaaaggggaacgtcaacttgacaaaaacccagctgctgaaccgcagcacagaattccacgccgagaaggaagaaattgtgaagggggatgtacaacaggcaattaagaatctttttagcgaggaacgttcagtgaagaaaggcattcttattcaggaagatgagaagggtgacataaatatgaccatatactgcctcctacatgagaatgatggagatactatagagagagaggaagtgatagggggcgatgtcaagcgtaccatccacaatctgctctcaagtaccagtaataataaaatctccgaacgcgcgaagatagacgcctccgagcgtggaaatgtacagttcttcactacctgtatagaggccggcgctttggactacctgaaacagctacatactgaatctaacgagactttgacggcaaagaaacaggaaggcgaaaaagagatcatagggggagacgtggaagggacaaaacttctgctcaagaaacggcagtccctggtagaacgaacggttagcgaaacggacattatcccaggagatgtgcacaacacagtcaaggtgtttatgacagagccacagtcaacgtttggtaagatcccaaaggaggaaattatcaagggagacctcacgtccacgctgaacagcctatcccaagccgtgaatcaaaaaaccgtgacgaaaaccgaggaaataattaagggcaatatgcttgccacactaaaaagccttaaggaaagctcacaccgctggaaggaatcgaaacagcctgacgccatccccggggacatcgaaaaggcaatcgagtgcctggaaaaggctacaaacaccaaaacagagattctcaaaaaggagctgcttaaagatgacctcgagacctccctccgctctttgaaggaggcccagcggagtttcaaggaggttcataaggaaggcgtcatcaagaaggatgccaaagctgtgatggccggtagtagcggcgaacaaaagactgacatccaccaggtcgccgtacagagaaacaagaattctctcctgcagcctaagcccggaccctttgaacccgccgccaagtggcagggtggggctgataccctatcacagacaatgggaaagagttgccacggcaatttggtggaagagaggacagaagtaaatctgccaaaagcacctaaaggtacagttaagatcgtgattgacagagaacagaacaatgatgccctggaaaaaagcctcaggcgactatccaattcacaccacaaatccaacgtgcttgaaagcggggataagactggagtgtggactgacacaacaggggagcagcaccttcgagacgagtacatgagccgccagttgacaagtaccgtttccgtgaaaaacaaccttaccaccaaggaatcagatagagcagtgcgcgagctcaaaaaggacgacgttttcaactccatacaatccgctggcaagacagtgggtaaacagcagacttacgaattgagaaatgaccaccagaagatggaggggtttcacataaaatcccccaagaagacaaagaatataaaaatcctaactgacacccagagtagcaagccaagtcccacgcagcaccccgtgtcgatgccagtcggggggacttacgatctgtctggcgatttccagaagcagacactacttaagcaggagactaagtactcgaataaagacatcaaaaagaaaaatatcaacctccagcccatgtggcaattgttgcccgttgagcaggatacttcaaatgtaaccgagatgaaggtgtcagagaagagccacaataccttcaaggccacaaataaaaaaagagagacagatgtgcatctgaagagccaggattttctgatgaagacgaacacctctacaggtttgaaaatggccatggaaaggtcactcaacccaatcaatttcaatccagagaataacgtgaaggaaagtgaatgtcccctgcctcccccttcaccccctcccccaccaccttctaatgcctcatccgagatcgagttcccactgcctcctcctcccccactgatgatgttccctgaaaagaatggttttttgcctagcctgtccacagaaaagatcaaggccgagttcgagtcgtttcccggcctgcccctgcctccacctcctgtagacgagaaaagcgaacgcgagagctcatccatgttccttcctcctccacccccacccacaccctctcagaagcccgcacacttactgtcaagttcagccccagagaagcactccggtgacttcatgcagcaatacagccagaaagaagcttctaactcccagaactcccaggctaaaatcataaccggaaagaccggcgtgcttccaccgccgacattacccaagcccaagctgccaaaacatatcaaagacaataagaatgattttagtcctaaagtggaactggcgacctctttatctgatatggaatgtaaaattacaacttccaaggatcagaaaaaggtgatggttatgacaagttcggaacatacagaaacaaagcagaatgtcatctccaaaagccttgacgagcgcaagcagctatccatcgattccgcaaactgcctaagccatacggtgccgggaacctccgctcctaggaagaagcaaatcgcaccactgatcaagagccacagtttccctgagtcttctggtcagcagaatcctaagccatacatgagaaaattcaaaacccccttaatgattgccgaggaaaagtataggcagcaaaaagaggagatcgagaaacagaaacaggagtcttcctactacaacatcgtgaagactcagagccagaaccagcatatcactgaggtagagaaggagatgcctctccagaaaacaaacgaggaggtgtctctttcagggattgatagcgaatgtaccgtagtccagccctctcccgggtcccagtccaacgctcgaattctgggagtgtgttcagacaaccagttgtctacaacctccccagaaaccgtggcggcaaagcgattgcaccacgtgctggcagctagtgaagacaaggataaaatgaaaaaggaagtgctccagagcagccgggatatcatgcagagcaagtcagcttgcgagatcaagcagtcacaccaggagtgcagcacccagcaaacccagcagaaaaagtacctggagcaactgcacctgccccagagcaagcctatcagtccaaactttaaggtcaagacaatcaagctcccaactctggaccatacactcaacgagaccgaccactcctacgagagccataagcaacagtctgaaattgacgtacagactttcacaaagaaacagtatctgaaaactaaaaagacagaggcttcaacagaatgtagccacaaacaaagcttagcggagaggcactaccagctgccaaaaaaagagaagcgcgtgacagtacagttacccacggagagtatccagaagaaccaggaagacaagctgaagatggtgccacgcaaacagcgcgaatttagtggctctgataggggtaaattgcccggctccgaggaaaagaaccaaggaccatccatgattggccggaaagaagagcgactgatcactgaaaggaaacacgagcatctgaaaaacaaaagtgcaccaaaggtcgtcaaacagaaagttatagacgctcacctcgattcgcaaactcagaacttccagcagacgcagatccagacagctgagtcgaaggcagaacataagaaactgccccaaccctataatagcctgcaggaggaaaagtgcctggaagtaaagggcatacaggaaaagcaagtgttctccaacacgaaagactccaagcaggagattactcaaaacaagagttttttctcctctgtgaaagaatctcaaagagatgacggcaaaggcgctctgaatatagtagagttcttacgcaagcgggaggagctgcagcagattctttctagagtgaaacagtttgaggccgaaccaaataagtccggcttaaagacgttccagaccctcctgaacactatcccaggttggctgatctctgaggacaaaagggagtatgcggtccatatcgctatggaaaataacctggaaaaggtcaaggaggaaatcactcacattaaaacccaggccgaagacatgctagtctcttatgagaacatcatccagactgcaatgatgtctagcaagacaggaaagccaggcaacaagcccacatctcttgacgagacatctagtaaagtctccaatgtgcacgtgtcgaacaataagaacagcgagcagaaggagaacaagattgcaaaagaaaagacggtgcagcatcaagtcgccgcccaccacgaagccaccgtgcgatctcacgttaaaacccatcaggaaatcaagctggacgactctaacatccctcccccgtccttgaaaactcgcccaccgtcccccacgttcatcaccattgaaagcacagctaggagaacagagaatccaactaagaacgagctaagccagtccccaaaaaaagattcctatgtagagccgccgcccagacgtccaatgtcccaaaagagtgaaatccatcgggctaacacatcgccatcaccgcctcgctctcggagcgagcagctggtccggctgaaggataccacagccaagctgtccaagggtgccatcccttgccccgctgcaactcccgtcccgattgttgagaagcgcagtgaaataatcatgagtcccgccaccttaaggagacagataaagatagaaaccagaggacgcgattcaccacctactatcactatccccgtcaatatcaaccatgccgcatccggatccttccgcgagtccgtcgacgcacaagaggagattagaaaagtggaaaagagagcaacttatgttcacaaggacggtctcaatagcactgaccacatggttccggacacggaaagctacgacgccgtcgagatcatcagaaaggtcgctgtccctcctaggttatccgagcacacacagcgttacgaggcagctaacagaactgtgcagatggcagaaaactttgtgaatgatcccgaaaatgagatcaaccgctggtttagagagttcgaacatgggcctgtcagcgaggccaagtctaaccggagggtctacgctaagggcgagacaaaccataatattcaacaggagagtagaacattctgtaaagaagaatttggattaacaagcctggggaacacttctttcaccgactttagttgcaagcatccacgcgagctgcgcgaaaagattccagtaaaacagcctaggatatgtagcgaaaccagaagtctatcggagcattttagtggcatggatgcgtttgagagccagatcgtagagagtaagatgaagacttcaagtagtcatagcagtgaggcggggaagtccggttgtgacttcaagcacgcaccgccaacctacgaagatgtgattgctggacacattcttgatatcagtgatagccccaaagaggttcgaaaaaacttccagaaaacttggcaggagtcaggacgggtcttcaaaggactaggctatgccactgctgacgcgtctgcaactgagatgaggaccaccttccaggaagaatccgcattcatttctgaagcagccgcccctagacaaggaaacatgtataccctgagcaaagacagcctgagcaatggcgtaccgtctggaagacaggccgagttctcttag

SEQ ID NO: 243127 - DNA, 10650 bp, Artificial Sequence
  derived and/or modified sequence
atgttccccatgcagaagggcagcctgaacctgctgcggcagaagtgggagagctgtgactaccagaggtctgagtgccacccccgggacagccactgcaccatcttccagccccaggagagcaagctgctggcccctgagggggaggtggtgtctgccccccagagcctggaccccaccagcctgccctacagcactggagaggagatgtggagcagcaagccagaggagaaggacagcgtggacaagagcaacaacacccgggagtatggccggcctgaggtgctgaaggaggacagcctgagcagcagaagaagaattgagcgcttcagcatcgccctggatgagctgcggtctgtgtttgaggcccccaagagcggcaacaagccagcagaatatggaggcaaggaggtggagattgaaagaagcctgtgcagccctgccttcaagagccaccctggcagccagctggaggacagcgtgaaggacagcgacaagaagggcaaggagaccagctttgacaagatgagccctgagagcggccacagccgcatctttgaggccacagctggccccaacaagccagagagcggctttgctgaagattctgctgcccggggggagggcgtgtctgacctgcacgaggtggtgtccctgaaggagaggatggcccgctaccaggccgctgtgtccagaggagactgccgctccttcagcgccaacatgatggaggagagcgagatgtgtgctgtgcctgggggcctggccaaggtgaagaagcagtttgaagatgagatcaccagcagcaggaacacctttgcccagtaccagtaccagcaccagaacagaagtgagcaggaggccatccacagcagccaggtgggcaccagccgcagcagccaggagatggccagaaatgagcaggagggcagcaaggtgcagaagattgatgtgcatggaacagagatggtgagccacctggagaagcacacagaggaggtgaaccaggccagccagttccaccagtatgtgcaggagaccgtgattgacaccccagaagatgaggagatccccaaggtgtccaccaagctgctgaaggagcagtttgagaagagcgcccaggagaagatcctgtacagcgacaaggagatgaccaccccagccaagcagatcaagacagaaagtgaatatgaggagaccttcaagcccagctctgtggtgtccaccagcagcaccagctgtgtgtccaccagccagaggaaggagaccagcaccacccgctacagcgaccacagcgtgaccagcagcaccctggcccagatcaatgccaccagcagcggcatgacagaggagttccccccacctcctccagatgtgctgcagacctctgtggatgtgacagccttcagccagagccctgagctgcccagccccccccggcggctgcctgtgcccaaggatgtgtacagcaagcagaggaacctgtatgagctgaacagactctacaagcacatccaccctgagctgaggaagaacctggagaaggactacatcagcgaggtgtctgagatcgtgagcagccagatgaacagcggcagctctgtgtctgcagatgtgcagcaggcccgctacgtgtttgagaacaccaatgacagcagccagaaggacctgaacagcgagcgggagtacctggagtgggatgagatcctgaagggggaggtgcagagcatccgctggatctttgagaaccagcccctggacagcatcaacaacggcagcccagatgaaggagacatcagccggggcattgctgaccaggagatcatcgctggaggagatgtgaagtacaccacctggatgtttgagacccagcccatcgacaccctgggcgcctacagcagtgacacagtggagaatgctgagaagatccctgagctggcccggggagatgtgtgcacagcccgctggatgtttgagacccggcccctggacagcatgaacaagatgcaccagagccaggaggagagcgctgtgaccatcagcaaggacatcactggaggagatgtgaagacagtgcgctacatgtttgagacccagcacctggaccagctgggccagctgcacagcgtggatgaggtgcacctgctgcagctgcggtctgagctgaaggagatcaagggaaatgtgaagaggagcatcaagtgctttgagacccagcccctgtatgtgatcagagatggcagcggccagatgctggagatcaagacagtgcaccgggaggatgtggagaagggagatgtgaggacagcccgctggatgtttgagacccagcccctggacaccatcaacaaggacatcacagagatcaaggtggtgcggggcatctccatggaggagaatgtgaagggcggcgtgtccaaggccaagtggctgtttgagacccagcccctggagaagatcaaggagagcgaggaggtgatcatcgagaaggagaagatcatcggcacagatgtgtccaggaagtgctggatgtttgagacccagcccctggacatcctgaaggaggtgcctgatgctgacagcctgcagcgggaggagatcattggaggagatgtgcagaccaccaagcacctgtttgagaccctgcccatcgaggccctgaaggacagcccagacatcggcaagctgcagaagatcacagccagcgaggaggagaagggagatgtgcgccaccagaagtggatctttgagacccagcccctggaggacatcaggaaggacaagaaggagtacaccaggacagtgaagctggaggaggtggacagaggagatgtgaagaactacacccacatctttgagagcaacaacctgatcaagtttgatgccagccacaagattgaggtggagggcgtgaccagaggagctgtggagctgaacaagagcctgtttgagaccacccccctgtatgccatccaggaccccctgggcaagtaccaccaggtgaagacagtgcagcaggaggagatcgtgagaggagatgtgcgcagctgccgctggctgtttgagacccggcccatcgaccagtttgatgagagcatccacaagttccagatcatccggggcatcagcgcccaggagatccagacaggaaatgtgaagagcgccaagtggctgtttgagacccagcccctggacagcatcaagtacttcagtgatgtggaggagacagagagcaagacagagcagacccgggacatcgtgaagggagatgtgaagacctgcaagtggctgtttgagacccagcccatggagagcctgtatgagaaggtgtccctgatgaccagcagcgaggagatccacaagggagatgtgaagacctgcacctggctgtttgagacccagcccctggacaccatcaaggatgattctgaaacagctgtgaagctgcagacagtgaagcaggaggagatccagggcggagatgtgaggacagcctgcttcctgtttgaaacagagaacctggacagcatccagggcgaggaggtgaaggagatcaagcctgtggagatggacatccaggccggagatgtgtcctccatgagatacaagtttgagaaccagagcctggacagcatcagcagcagcagcgaggaggtgctgaagaagatcaagaccctgaagacagaggacatccagaagggaaatgtgctgaactgccgctggctgtttgagaaccagcccatcgacaagatcaaggagagccaggagggagatgaatgtgtgaagacagtgacagacatccagggcggagatgtgaggaagggctgcttcatctttgagaccttcagcctggatgagatcaaggaggagagtgactacatcagcaccaagaagaccatcacagaggaggtgatccagggagatgtgaagagctacaggatgctgtttgagacccagcccctgtatgccatccaggaccgggagggcagctaccacgaggtgaccaccgtgaagaaggaggaggtgattcatggagatgtgcggggcacccgctggctgtttgagaccaagcccctggacagcatcaacaagtcagaaacagtgtatgtgatcaagtctgtgacccaggaggacatccagaagggagatgtgtcctctgtgcgctacagatttgagacccagcccctggaccagatcagcgaggagagccacaacatcatgcccagcattgaccacatccagggcggcaatgtgaagaccagccggcagttctttgaaagtgagaactttgacaagaacaactacatcagaacagtgtctgtgaatgagatccagaagggaaatgtgaagaccagcacctggctgtttgagacccacaccatggatgagctgcggggggagggcctggagtatgagaacatcaagacagtgacccaggaggatgtgcagaagggagatgtgaagcaggccgtgtggctgtttgaaaatagaacatttgacagcatcatggaggcccacaagggcatcaccaagatgaccaaggaggagatccccccatctgatgtgaagaccaccacctggctgtttgagaccacccccctgcacgagttcaatgagaccagggtggagaagattgagatcatcggcaagagcatcaaggagaccctggaggacctgtacagccagaaggtgatccaggcccctggcatcatcatcgaggctgatgaaattggagatgtgaggatggccaagtacaagctgatgaaccaggccagccctgagatccagaaggaggagatcatccgggctgacctgaggaacatcatggtgaacctgctgagcaagagggactgcacagagcgggagatcctgatcagcgaggaggagaagggaaatgtgaacctgaccaagacccagctgctgaacagaagcacagagttccacgccgagaaggaggagatcgtgaagggagatgtgcagcaggccatcaagaacctcttcagcgaggagaggtctgtgaagaagggcatcctgatccaggaggatgagaagggggacatcaacatgaccatctactgcctgctgcatgaaaatgatggagacaccatcgagcgggaggaggtgattggaggagatgtgaagaggaccatccacaacctgctgagcagcaccagcaacaacaagatcagcgagcgggccaagattgatgccagcgagagaggaaatgtgcagttcttcaccacctgcatcgaggccggggccctggactacctgaagcagctgcacacagagagcaatgagaccctgacagccaagaagcaggagggggagaaggagatcattggaggagatgtggagggcaccaagctgctgctgaagaagaggcagagcctggtggagaggacagtgtctgaaacagacatcatccctggagatgtgcacaacacagtgaaggtgttcatgacagagccccagagcaccttcggcaagatccccaaggaggagatcatcaagggggacctgaccagcaccctgaacagcctgagccaggccgtgaaccagaagacagtgaccaagacagaggagatcatcaagggcaacatgctggccaccctgaagagcctgaaggagagcagccaccgctggaaggagagcaagcagccagatgccatccctggggacatcgagaaggccatcgagtgcctggagaaggccaccaacaccaagacagagatcctgaagaaggagctgctgaaggatgacctggagaccagcctgcggagcctgaaggaggcccagaggagcttcaaggaggtgcacaaggagggcgtcatcaagaaggatgccaaggctgtgatggccggcagcagtggagagcagaagacagacatccaccaggtggccgtgcagaggaacaagaacagcctgctgcagcccaagccaggcccctttgagcctgctgccaagtggcagggcggcgctgacaccctgagccagaccatgggcaagagctgccacggcaacctggtggaggagaggacagaggtgaacctgcccaaggcccccaagggcaccgtgaagatcgtcatcgaccgggagcagaacaatgatgccctggagaagagcctgcggcggctgagcaacagccaccacaagagcaatgtgctggagagcggggacaagacaggagtgtggacagacaccactggagagcagcacctgagagatgagtacatgagccggcagctgaccagcacagtgtctgtgaagaacaacctgaccaccaaggagagtgacagagctgtgcgggagctgaagaaggatgatgtgttcaacagcatccagagcgctgggaagacagtgggcaagcagcagacctatgagctgagaaatgaccaccagaagatggagggcttccacatcaagagccccaagaagaccaagaacatcaagatcctgacagacacccagagcagcaagcccagccccacccagcaccctgtgtccatgcctgtgggcggcacctatgacctgagcggggacttccagaagcagaccctgctgaagcaggagaccaagtacagcaacaaggacatcaagaagaagaacatcaacctgcagcccatgtggcagctgctgcctgtggagcaggacaccagcaatgtgacagagatgaaggtgtctgagaagagccacaacaccttcaaggccaccaacaagaagcgggagacagatgtgcacctgaagagccaggacttcctgatgaagaccaacaccagcacaggcctgaagatggccatggagaggagcctgaaccccatcaacttcaacccagaaaataatgtgaaggagagcgagtgccccctgcccccacccagccccccacctcctccacccagcaatgccagcagcgagattgagttccccctgcccccacctccacccctgatgatgtttcctgagaagaatggcttcctgcccagcctgagcacagagaagatcaaggccgagtttgagagcttccctggcctgcccctgcccccacctcctgtggatgagaagtctgagcgggagagcagctccatgttcctgcccccacctcctccacccacccccagccagaagccagcccacctgctgagcagcagcgcccctgagaagcacagcggggacttcatgcagcagtacagccagaaggaggccagcaacagccagaacagccaggccaagatcatcaccgggaagacaggagtgctgcccccacccaccctgcccaagcccaagctgcccaagcacatcaaggacaacaagaatgacttcagccccaaggtggagctggccaccagcctgagtgacatggagtgcaagatcaccaccagcaaggaccagaagaaggtgatggtgatgaccagcagcgagcacacagagaccaagcagaatgtcatcagcaagagcctggatgagaggaagcagctgagcattgacagcgccaactgcctgagccacacagtgcccggcaccagcgcccccaggaagaagcagatcgcccccctcatcaagagccacagcttccctgagagcagcggccagcagaaccccaagccctacatgaggaagttcaagacccccctgatgattgctgaggagaagtaccggcagcagaaggaggagattgagaagcagaagcaggagagcagctactacaacatcgtgaagacccagagccagaaccagcacatcacagaggtggagaaggagatgcccctgcagaagaccaatgaggaggtgtccctgtctggaattgattctgagtgcaccgtggtgcagcccagccctggcagccagagcaatgcccgcatcctgggcgtgtgcagcgacaaccagctgagcaccaccagccctgagaccgtggccgccaagaggctgcaccacgtgctggccgccagcgaggacaaggacaagatgaagaaggaggtgctgcagagcagccgggacatcatgcagagcaagagcgcctgtgagatcaagcagagccaccaggagtgcagcacccagcagacccagcagaagaagtacctggagcagctgcacctgccccagagcaagcccatcagccccaacttcaaggtgaagaccatcaagctgcccaccctggaccacaccctgaatgaaacagaccacagctatgagagccacaagcagcagagcgagattgatgtgcagaccttcaccaagaagcagtacctgaagaccaagaagacagaggccagcacagaatgtagccacaagcagagcctggccgagcggcactaccagctgcccaagaaggagaagagggtgacagtgcagctgcccacagagagcatccagaagaaccaggaggacaagctgaagatggtgcccaggaagcagcgggagttcagcggcagtgaccggggcaagctgcccggcagcgaggagaagaaccagggccccagcatgattggaaggaaggaggagcggctcatcacagagaggaagcatgagcacctgaagaacaagagcgcccccaaggtggtgaagcagaaggtgattgatgcccacctggacagccagacccagaacttccagcagacccagatccagacagctgagagcaaggccgagcacaagaagctgccccagccctacaacagcctgcaggaggagaagtgcctggaggtgaagggcatccaggagaagcaggtgttcagcaacaccaaggacagcaagcaggagatcacccagaacaagagcttcttcagctctgtgaaggagagccagagagatgatggaaaaggagccctgaacatcgtggagttcctgaggaagcgggaggagctgcagcagatcctgagccgggtgaagcagtttgaggccgagcccaacaagagcggcctgaagaccttccagaccctgctgaacaccatccctggctggctgatcagcgaggacaagcgggagtatgctgtgcacatcgccatggagaacaacctggagaaggtgaaggaggagatcacccacatcaagacccaggccgaggacatgctggtgtcctatgagaacatcatccagacagccatgatgagcagcaagacaggcaagccaggcaacaagcccaccagcctggatgagaccagcagcaaggtgtccaatgtgcacgtgagcaacaacaagaacagcgagcagaaggagaacaagatcgccaaggagaagacagtgcagcaccaggtggccgcccaccacgaggccaccgtgcgcagccacgtgaagacccaccaggagatcaagctggatgacagcaacatccccccacccagcctgaagacccggccccccagccccaccttcatcaccatcgagagcacagccaggagaacagagaaccccaccaagaatgagctgagccagagccccaagaaggacagctatgtggagcccccaccccggcggcccatgagccagaagtctgagatccaccgggccaacaccagccccagcccccccaggagccgctctgagcagctggtgcggctgaaggacaccacagccaagctgagcaagggggccatcccctgcccagctgccacccctgtgcccatcgtggagaagaggtctgagatcatcatgagccctgccaccctgcggcggcagatcaagattgagacccggggccgggacagcccccccaccatcaccatccctgtgaacatcaaccacgccgccagcggcagcttccgggagagcgtggatgcccaggaggagatcaggaaggtggagaagagggccacctacgtgcacaaggatggcctgaacagcacagaccacatggtgcctgacacagagagctatgatgctgtggagatcatcaggaaggtggccgtgcccccccggctgtctgagcacacccagagatatgaggccgccaacagaacagtgcagatggctgaaaattttgtgaatgaccctgaaaatgagatcaaccgctggttccgggagtttgagcacggccctgtgtctgaggccaagagcaacagaagagtgtatgccaagggggagaccaaccacaacatccagcaggagagcaggaccttctgcaaggaggagtttggcctgaccagcctgggcaacaccagcttcacagacttcagctgcaagcacccccgggagctgcgggagaagatccctgtgaagcagccccgcatctgcagcgagaccaggagcctgtctgagcacttcagcggcatggatgcctttgagagccagatcgtggagagcaagatgaagaccagcagcagccacagcagcgaggccggcaagagcggctgtgacttcaagcacgccccacccacctatgaagatgtgattgctggccacatcctggacatcagtgacagccccaaggaggtgaggaagaacttccagaagacctggcaggagagcggccgggtcttcaagggcctgggctacgccacagcagatgccagcgccacagagatgaggaccaccttccaggaggagagcgccttcatcagcgaggccgccgccccccggcagggcaacatgtacaccctgagcaaggacagcctgagcaatggagtgcccagcggccggcaggccgagttctcctag

SEQ ID NO: 243128 - DNA, 10650 bp, Artificial Sequence
  derived and/or modified sequence
atgttccccatgcagaagggcagcctgaacctgctgcggcagaagtgggagtcttgcgactatcagaggtctgagtgccaccctcgcgattcccactgtacaatatttcaaccgcaggaaagcaagctgctagccccggagggtgaagtcgtgtctgctcctcagtccctggaccccaccagcctcccctattcgacaggagaggaaatgtggtcttcgaaacccgaggagaaagactccgtcgataaaagcaataacacacgggagtacgggaggcccgaagtcctcaaggaagactctctgtcttcccgaagaaggatcgaaagattttcaatcgccttagacgaactgaggtccgtgttcgaagcccctaaaagcgggaacaaaccagcggagtatggagggaaggaagttgagattgaacggtctctgtgcagtcccgccttcaaatcgcaccccggctcccagctcgaggactctgttaaggacagcgacaagaagggcaaagagacgagcttcgataaaatgtctccggaaagcggacactcccggatctttgaagccacagcagggccgaacaaaccggagtccggtttcgcagaggactcagccgctcgcggtgaaggcgtgagtgatcttcacgaagtagtgtccctgaaggagagaatggccagatatcaagcagccgtgtcacgaggagactgccgttctttcagtgctaatatgatggaggagtccgagatgtgcgcagtcccgggaggacttgctaaggttaaaaagcaattcgaggacgagatcacctcctccaggaacacatttgcccagtaccagtatcagcatcaaaatcggtctgagcaggaggccatccattcttcccaggttggaaccagcagaagcagccaggaaatggcccgcaacgagcaggagggcagcaaagtacaaaagattgacgttcacggaaccgagatggtgtcacatttagagaagcatacagaggaggtcaaccaggccagtcagtttcatcagtacgtgcaggaaactgtgatcgataccccggaggacgaggaaatccctaaggtgagcaccaagcttctaaaggagcagttcgagaaatcggcacaggagaagatcttgtattcagataaagaaatgacgacgcccgccaagcaaatcaagactgaatccgagtatgaagaaacatttaagccatcctccgttgtaagtacttccagcacatcctgcgtcagtacttcccagagaaaggaaacctccaccacgaggtactctgatcactctgttacctcctcaaccctggcccagatcaatgcgacgtccagtggaatgaccgaggagtttccacccccacctcccgatgtgctgcagacatctgtagatgttaccgcgttctctcaaagcccggagctccctagtcctcccaggcgcctgccagtccctaaggacgtgtactcaaagcagagaaatttatatgagctgaataggctttataagcacatccatccagagcttaggaagaacctggaaaaagattatatatccgaagtgtccgagatcgttagttcacagatgaacagtgggagttcagtgagtgccgacgtacagcaggccaggtatgtgtttgagaataccaacgacagcagccaaaaggacctcaactccgagcgcgagtacctggagtgggatgagatccttaaaggggaggtgcagtccattcgctggatatttgagaaccagccactggatagcattaataatggcagtcctgatgaaggcgacatttccagaggaattgcggaccaggaaattatcgctggcggagacgtcaagtacaccacttggatgtttgaaacacagcctatcgataccttgggagcctattcctccgacaccgtggagaacgctgaaaagatccccgaactggcccgaggggacgtgtgcaccgcaagatggatgtttgagactagacccctggatagcatgaacaaaatgcaccagtcccaagaagaatcagccgttacaataagtaaagacatcaccggtggtgacgtcaaaactgtaaggtacatgttcgagacacagcatttggaccagcttggacagctacactcggtcgatgaagtccatctgctacaactacgtagcgagcttaaagagatcaaagggaacgtcaagagatcaatcaagtgttttgagactcagccactgtacgtcatcagagatggaagcggccagatgctggaaatcaaaaccgtacaccgagaggatgtggagaaaggagatgtgcgcaccgcccggtggatgtttgaaacccaaccgttagacacaattaataaggacattacagagatcaaagttgttaggggaatcagcatggaagaaaacgtcaaggggggggtctctaaggccaagtggctcttcgagactcagcccttggagaaaatcaaggaaagtgaggaggttatcatcgaaaaggagaaaatcattggaactgacgtgagtcgaaagtgttggatgttcgaaacccagccgctagacattctgaaggaggtcccggacgctgactctctccagcgggaggagatcatcgggggggatgtacaaaccactaagcacctgttcgaaacacttccaatagaggctctgaaggattcccctgatattggcaaactccagaagataacagctagtgaggaagagaaaggcgatgtacgacaccagaaatggatctttgagacacagcccttggaggatataagaaaagataaaaaagagtacacacggacggttaagctcgaagaggttgatcgcggggacgtgaagaattatactcacatcttcgagtcaaataaccttattaagtttgacgccagtcacaaaattgaggtggaaggcgtgacaagaggagctgtggagttgaataaatcattattcgaaacaacacctctatacgccatccaggatcctctggggaagtaccaccaggttaagacagtccagcaggaagagatcgtcaggggagacgtgagatcttgtagatggctttttgaaacacgaccaatcgaccagtttgatgaaagcatacacaaatttcagatcatccgaggcatatcagcacaggagattcaaaccggcaacgtcaaatcagcgaaatggcttttcgaaactcaacctctggactcaattaagtacttctccgacgttgaggaaactgaaagtaagaccgagcaaactcgggatatcgtgaagggagacgtgaagacatgtaagtggctcttcgagactcagcctatggagagtctctatgagaaagtatccctcatgacctccagcgaggagatacacaaaggtgacgtcaaaacatgtacctggctgttcgaaacacagccactggacacgatcaaggatgacagtgagaccgcagtaaaactacaaactgtcaaacaagaggaaattcagggtggagacgtgagaactgcctgctttctcttcgaaacggaaaacttagattctatccaaggagaggaggtgaaagagatcaaacccgtcgagatggacatccaagccggagatgtttccagcatgcgttataagttcgagaatcagagtcttgattcaatctccagcagctctgaagaagtgctgaagaaaatcaagaccctcaaaaccgaagacatccagaaaggaaacgtgcttaattgccgctggcttttcgaaaaccaacctattgacaagatcaaggaaagccaagagggcgacgagtgcgtgaagaccgtgaccgacatccagggcggggacgtgaggaaaggatgcttcatctttgagacattctcactcgatgagatcaaggaagagagtgattacatcagcaccaagaagaccatcaccgaggaggttatccagggcgacgtgaaatcttacaggatgctgttcgagacacagcccctgtacgccatccaggatcgcgagggaagctaccacgaggtcacaacagtcaaaaaagaggaggtgatacacggagacgtgcggggcacccgatggctgtttgagacaaagcctctagattccattaataagagcgagactgtctacgttattaagagcgtgacacaggaggacatccagaaaggcgatgtgagctcagtccgataccgttttgagacacagccacttgaccagatctcagaggagtcccacaacataatgccgagtatcgatcatattcaaggtggcaatgttaagacatcacgacagtttttcgaaagcgagaactttgataaaaacaactacattagaaccgtgtcagtaaacgaaatccagaagggcaatgtcaaaacgtcaacctggctgttcgaaacacataccatggacgaattgcgcggcgaaggccttgagtacgagaacataaaaactgttactcaggaggatgtgcagaagggggacgtcaaacaggctgtctggctattcgaaaacagaacctttgatagcataatggaggcccacaagggcatcaccaaaatgaccaaggaagagattcccccctcagatgttaagactaccacctggctcttcgagacaacgcccctgcacgaatttaatgaaaccagggtggagaaaatagaaattatcggcaagtctattaaggaaacccttgaagatttgtactcccagaaagttattcaggctcctggaattatcatcgaagctgacgagattggagacgtgaggatggcgaagtacaaactgatgaaccaagccagtcctgaaatccagaaagaggagatcattcgggcagatcttagaaacatcatggtcaatctgctgtcgaaacgggattgcaccgagcgcgagatcctgatcagcgaagaagagaagggaaacgtgaatctgaccaaaacccagctcctgaacagatccaccgagttccacgctgagaaagaggaaattgttaaaggcgatgttcaacaggctatcaagaatcttttctcggaggagagatctgtcaagaagggaatcttgatacaagaggatgagaagggggacattaacatgacaatttactgccttctccatgagaacgacggcgacacaattgagagggaggaggtgattggaggggacgtaaaaagaacaatccacaacttgctgagctcaacatcaaataataaaatcagtgagcgcgccaagatagacgcttctgagcggggcaacgtacagtttttcacgacatgcatcgaggcgggcgctctggactatctgaaacagctgcacacagagtctaacgagaccttaactgcgaaaaagcaggaaggggaaaaagagataatcggtggcgatgtcgaagggacgaaactgttgctgaagaagaggcagtcattagtggagagaaccgtgtccgagacagatatcatccctggggatgtccataacactgtaaaagttttcatgactgagccccaaagcacttttggaaagattcctaaagaggaaatcatcaaaggggatctcacctctacactgaattcactatcccaggctgtgaaccaaaaaactgttactaaaaccgaggagatcatcaaagggaatatgttggccaccctgaaatccttaaaagagagctctcatcggtggaaagagagcaagcagcccgacgccatacccggagatatcgaaaaggccatcgaatgtctggagaaggcaaccaacaccaagacagaaatactgaaaaaggaacttctgaaggacgatcttgagacatccctacgcagtctgaaggaggcccagaggtcgttcaaagaggtgcacaaagagggtgtgatcaaaaaggacgcaaaggctgtgatggcgggatcttcaggagaacagaaaacagacatccaccaggtggcagtgcaacggaataagaattctctgctccagccaaaaccaggcccattcgagcctgccgctaaatggcaggggggagccgataccctgagtcagacgatgggcaaatcctgtcatggaaaccttgtggaggagcgaaccgaagtgaacttgccgaaggctcctaaaggcactgtgaagattgtaatcgatcgggaacagaacaacgacgctctggagaagagcctccggcggctgtctaactcccaccacaagagtaacgtactcgaaagcggagacaagaccggtgtgtggactgataccactggagagcagcatctgagggatgagtacatgtcccggcagctcacaagtacggtttccgtgaagaacaaccttaccaccaaagagagcgatagagcagttagagagttaaagaaggacgatgtgttcaactcaattcaatcagccgggaagacggtgggaaagcagcaaacttacgaactgcggaatgaccatcaaaaaatggaaggcttccacatcaaatccccgaagaagaccaaaaatatcaaaatcctgactgacacccagtcgtctaagccttccccaactcagcacccagtgtcaatgcctgtgggtggtacatacgatctgtccggcgacttccagaagcagactcttttaaagcaggagacaaagtactccaacaaggatatcaaaaagaagaacattaacttacaacccatgtggcagctcttgcccgtagagcaggacacgagtaatgtcacagagatgaaggtctcagagaaatcacacaacacattcaaggccactaacaaaaaaagggagacggatgtccacctgaaatcccaagactttttgatgaagacaaatacgagtaccggcctcaagatggctatggagagatctctaaaccctatcaatttcaaccctgagaacaatgtgaaggaatcagagtgtccactaccacccccgtccccacccccaccacccccgagtaacgccagctccgaaattgaatttcctctcccacctccacctccgcttatgatgttcccagaaaagaacgggtttcttccttccctgagcaccgaaaagatcaaggccgagtttgaatctttcccaggcctccctctcccccccccaccagtggacgagaagtcagaacgtgagagttcaagtatgtttcttcccccacctccacctcccaccccatcgcaaaagccggcccatctgctgtcatcttcggctcccgaaaaacacagtggagacttcatgcagcagtacagtcagaaagaggccagtaatagtcagaattcccaggccaagataataaccggaaagaccggagtgctcccaccacctactctcccaaagccgaagctgccaaaacacatcaaggacaacaagaacgatttttcacccaaagtggaattggcgacttccctgagcgatatggagtgcaagattactacaagcaaggaccagaagaaggtgatggtgatgacaagcagtgagcatacagaaactaaacagaacgtgattagcaagtcgctcgatgaaagaaaacaactttcaattgactccgccaactgtctgtcacacaccgttcctgggacctcggctcccaggaagaaacagatcgctcctctgatcaaatcacactcatttccggaatccagcgggcaacaaaatcccaagccttatatgcggaagttcaagacacccctgatgatcgctgaggaaaaatatcggcagcagaaagaggagatcgagaagcagaagcaggagtcatcttattacaacatcgttaagacccagtcccaaaaccagcatatcacagaggtggagaaggaaatgcctctgcaaaagaccaacgaagaagtcagcctcagtgggatcgattccgagtgcaccgtcgtgcagccctctccgggatctcagtccaacgcccggattctgggtgtgtgctccgataatcagttgagcacaacgagccctgagaccgtagctgccaagaggctccaccatgtcctggcagccagcgaagataaagacaaaatgaaaaaggaggtgctacagtcaagtcgggatattatgcaatctaagagtgcttgcgagataaaacagtcacaccaagagtgtagcacccaacagacgcagcagaaaaagtacctcgaacaactgcacttgccacagtccaaaccaatctcccccaacttcaaggttaagacaataaagctcccgactctcgaccacactctaaatgaaaccgatcacagctacgaatcccataagcaacagtccgaaatcgatgtacagacattcacgaagaaacaatatctcaaaacgaagaagacagaggcttctacagagtgttcacacaagcagagtctggcagagcggcactatcagttgccgaagaaggaaaagcgggtgacggtgcagttaccaaccgagtccatccagaagaaccaggaagacaagctgaagatggtgccgcgcaaacaacgcgagtttagcggctcagaccggggaaagcttcccggttcagaagaaaagaaccaaggcccctccatgatcggtaggaaagaagagcgtcttatcacggagcgcaagcacgaacacctgaaaaataagtccgcacctaaagtggtgaaacaaaaggttattgacgcacacctggattctcagacgcagaattttcaacagacccaaattcaaacagctgaatccaaagccgaacataaaaaactgccgcagccatataactcattgcaagaagaaaagtgcctggaggtgaaagggatccaggaaaagcaggtgttttcgaacacaaaggactctaagcaggaaatcacccagaataagtcatttttttcctcagtgaaagagagtcagcgcgatgatgggaaaggcgccctgaacatcgtggagtttctgcgtaagagagaagaacttcaacagatactctcaagagtaaagcagttcgaggctgagcccaacaagtccggattgaagactttccagacattactaaacaccattcctggatggttgattagcgaggataagcgcgaatatgcggttcacatcgcaatggagaataatctggaaaaggtaaaagaggaaataacccatatcaaaacacaggcagaggatatgctcgtgagttacgaaaatatcatacagaccgctatgatgtccagcaaaaccggcaaacctggaaataagccaacctctttggacgagacctcatctaaagtctctaatgtgcacgtaagcaacaataagaactcagagcagaaagagaataagatcgccaaagagaagactgtacagcatcaagtggccgcacatcatgaagctaccgtgagatcccacgttaaaacacaccaagagatcaagctggacgatagtaatattcctccgccatctctgaagactagacccccctcccctactttcatcaccatagagtctactgcacgaagaaccgaaaaccctacaaaaaatgagcttagccagagccctaagaaggactcttatgtcgaacctcctcctcgaagacccatgtcacagaaaagcgaaatccacagggccaacacatcaccaagcccacccaggtccaggagcgaacaactggtccgcctaaaagacactacggcaaagctgtcgaagggtgccattccttgtcctgcagccacgcccgtcccgatagtcgagaagcggtctgagattattatgtctccagcgactctgagaaggcagatcaagatcgagaccaggggtcgcgattccccccccactattactatcccggtgaacattaaccacgccgcctccgggagtttcagagagtctgtagatgctcaggaggaaatccgcaaggtggagaaacgtgcgacctacgtccacaaggacggcttgaacagtaccgatcacatggtgccagacacagaatcttacgatgctgtggaaattatccgcaaggtggctgttccaccccggctttccgaacatactcagagatacgaggctgctaatcgcacagtccagatggccgaaaacttcgtcaatgaccccgagaacgagattaatagatggttccgagagtttgaacatggccctgtcagtgaggccaagagtaatcgccgcgtgtacgctaagggtgagacaaatcacaacattcaacaggaaagccggacattctgcaaggaagagttcggccttacctctctgggcaacactagcttcaccgacttctcctgcaaacatccaagagagctccgggaaaaaatccctgtcaaacagccacggatatgcagcgaaacacgttccctgagcgaacacttttccggcatggatgctttcgaatcccaaattgtggaatcaaaaatgaaaacctcctcttcacatagctccgaagcagggaagtccggttgcgactttaaacacgcacctcccacctatgaggacgttattgctgggcatattctcgatatctctgacagtcctaaggaagtgagaaagaactttcagaagacatggcaggaatcaggccgggtgttcaaaggccttggatacgccactgccgacgccagtgccacggagatgcggacaaccttccaggaggaatccgcgttcatctctgaagcagcagccccgcgacagggcaacatgtacactctttcgaaagacagcctgagtaacggagtgccgtccgggcggcaggccgaattctcctag

SEQ ID NO: 243129 - DNA, 10650 bp, Artificial Sequence
  derived and/or modified sequence
atgttccccatgcagaagggcagcctgaacctgctgcggcagaagtgggagagctgcgactaccagagaagcgagtgccaccccagggacagccattgcactatcttccagccacaggagtccaagcttctcgcccctgaaggtgaggtggtgtctgccccacagtctctcgaccccactagtctgccgtactccacaggagaggagatgtggtcatcaaaaccagaggaaaaagattcggtggacaagtcgaataacactcgagaatatggtagacccgaggtgctcaaggaggattcgctgtcctctcgcaggcggattgagcggttttctatagcactggacgagctgagaagcgtatttgaggctccgaaatctggaaacaagccagctgagtacggaggaaaagaggttgagattgagcggagcctgtgcagcccggccttcaaatcacacccaggaagtcaacttgaagacagcgtcaaagactcagataagaagggtaaggagacctcgtttgataaaatgagtccagagtctggacatagcagaatcttcgaagccaccgcaggaccaaacaagccagagtccggattcgccgaagactccgctgcacgtggtgagggcgtgtcggatctgcacgaagtggtgtcgcttaaagagcgcatggcgagatatcaggcagcagttagccggggcgactgtaggagtttctcagccaacatgatggaagagtccgaaatgtgtgccgtgccaggcggcctggccaaagtgaagaaacaatttgaagacgagattacctcaagtcgcaacacctttgctcagtatcagtaccagcaccagaacaggtctgagcaggaagctattcactcctcacaggtcggcaccagcaggtccagtcaagagatggccagaaatgagcaggaggggagcaaggtccagaagatagatgtgcatggcacagaaatggtgagccatttggaaaagcacactgaagaggttaaccaagctagccagtttcaccagtacgtgcaggaaacggtgatcgacacaccagaagatgaagagatcccgaaggtttccaccaagctcctaaaagaacagttcgagaaaagcgcccaggagaagatcctttacagcgataaggagatgacaaccccggcaaaacaaatcaagacggaatccgagtacgaagaaacttttaagccctcctccgtcgtgtccacctcttctaccagttgtgtgagcacctcccagcgcaaagaaacttcaactactcggtattccgaccacagcgttacgtcgtcaacgctggcccagatcaacgctacctcatccggcatgaccgaagagtttcccccaccccccccagatgtgcttcagacatctgtggacgtcacagcattctcccagagccctgaacttccaagccctcctagacgtctcccagtccccaaggatgtgtattccaaacagaggaacctgtatgagctgaacagactgtacaagcacattcaccctgagcttaggaagaacctggagaaggattatatttctgaggtgagtgaaattgtgtcctcccagatgaatagtggcagcagtgtcagcgcagatgtgcagcaagcacggtacgtgttcgaaaacaccaatgactcttcacagaaagaccttaacagtgagcgggagtacctcgagtgggatgaaatacttaaaggcgaggttcagtccatccgctggatattcgaaaatcagcccctagatagtatcaacaacggatctcccgacgagggagacattagtcgcgggatcgccgatcaggagatcatcgctgggggcgacgtgaagtataccacctggatgtttgagactcaaccaatcgatactcttggggcctattccagcgacaccgtcgagaatgccgagaaaattcccgagctggccagaggtgacgtgtgtaccgcccggtggatgttcgagactcgtcctttagactcaatgaacaaaatgcatcagagccaggaggaatcagctgtgacaatctccaaagatatcaccggaggagatgtaaaaacggtcagatatatgttcgagacacagcacttggaccagctgggccagctccactcggtggacgaggtgcacttgcttcaattaaggagcgaacttaaagagatcaaagggaacgttaaacggagtatcaagtgcttcgagacccaacctctctacgttatacgtgacggctcaggacagatgctggaaattaaaacggtccacagggaggacgtggagaaaggggacgttagaacggcccggtggatgtttgagacacagcctttagacactatcaacaaggacattactgagatcaaagtggtccgcggaatatctatggaagagaatgtgaaggggggcgtcagcaaagccaaatggctttttgaaacacagcccctcgagaagatcaaggagtccgaagaagttatcatcgagaaagaaaaaatcatagggacagacgtgagcagaaaatgttggatgttcgaaactcaacctttagatattctaaaagaggtgcctgatgccgacagccttcagcgtgaagagattatcggaggggatgtacagacaactaaacatttgtttgaaactttacccattgaagcactgaaagactccccagacattggtaagctacagaagatcactgcttcagaggaagaaaaaggtgatgtacgccatcagaagtggatattcgagacccagcctctcgaagacatacgcaaggataagaaagagtatacccggaccgtgaagctcgaggaagttgatcgcggtgatgtgaagaattacactcatatcttcgaatcaaataaccttatcaagttcgacgcttcccataagatcgaggtcgagggcgtgacgcgaggggccgttgaattgaataaatcacttttcgagaccacgcccttatacgctatccaggaccctttgggaaaatatcatcaggtgaagaccgtccagcaggaggagattgtccgaggcgatgtgcggtcctgtagatggctttttgagacaagacccattgaccagttcgatgaaagcattcacaagtttcagatcatcagagggattagtgctcaggagattcaaactgggaacgtgaaatccgccaagtggctgtttgaaacccagcccctggattccatcaagtatttttccgacgtcgaggagacagaatcaaaaaccgaacagacgcgcgacattgtcaaaggagacgtgaagacctgtaaatggctgttcgagacacagcccatggagtcgctgtatgagaaggtgtccctgatgacctcgtccgaagagattcacaaaggggacgtgaagacatgcacctggctgtttgaaacgcagccacttgacaccataaaagatgactcggaaactgctgtgaagctgcaaaccgttaagcaggaggaaatacagggcggggatgtcagaactgcatgtttcctgtttgaaactgaaaatctggatagtattcagggagaagaggttaaagaaatcaaacccgtcgaaatggacattcaggcgggggacgtttcaagcatgcgatacaaattcgaaaaccaaagcctcgatagcatatcctcttcaagcgaagaggtgctcaaaaaaataaagacgttaaagacagaggacatccaaaagggcaatgttctgaactgcaggtggctcttcgaaaatcagccaatagacaagattaaggagagtcaggagggagacgagtgcgtgaagaccgtgaccgatattcagggcggtgatgttagaaagggatgtttcatttttgaaacattttccttggatgaaatcaaagaggagtctgactacatttctactaaaaaaactattaccgaggaggttatacaaggggacgtaaagagctatcgcatgctgtttgagacacagcctctgtacgctattcaggatagggagggctcttatcacgaggtgacaactgtcaagaaggaagaggtgatccacggagacgttcgtggcactcggtggctcttcgagactaagcccctggactctattaacaagtcagagactgtgtacgttattaagtcggtcacacaggaggacattcagaagggcgatgtgtcttctgtgaggtaccggttcgaaacacagcccctcgatcagatctccgaggagagccataatatcatgccatctatcgaccatatccagggcggcaacgtgaaaacctcaaggcagttcttcgagagtgagaatttcgacaagaataattatatccggactgtctctgtcaacgagatccagaagggcaacgtaaagacctccacttggttgtttgagacgcacaccatggatgaacttaggggggagggactagaatacgagaacatcaagactgtgacgcaggaggacgttcagaaaggcgatgtcaaacaagctgtctggctgttcgagaaccggacctttgatagcattatggaggcccacaagggaataaccaaaatgaccaaggaggagattcctccctcagacgttaaaacaaccacatggctgttcgaaactacacccctccacgagtttaacgaaacacgggtggagaagatcgagatcattggaaagtctattaaagagaccctggaagacttatactcccagaaagtcattcaagcccccgggatcataatagaggctgacgagataggagatgtcagaatggctaaatacaaactcatgaatcaggccagccctgaaatccagaaggaggaaatcataagagcagacctgcggaacatcatggtcaacctgctgtccaagcgtgactgcaccgaaagagagatcctgatctcggaagaagagaaaggcaacgtgaacctgacaaaaacacagctgctgaatcgcagtacagagtttcacgcagaaaaagaagagatcgtgaaaggtgatgttcagcaagcaataaaaaatctattttcagaggagaggtcggtcaagaagggaatactgatccaggaagatgaaaagggtgatattaatatgacaatctattgtcttctgcatgagaacgacggggacacgatcgaaagagaggaggtgattgggggggacgtgaagcggactattcataatctactctcctctaccagcaacaacaagataagcgaacgcgctaagatagacgcatctgagcgaggcaatgtgcaattctttactacttgcatcgaggcaggagctctcgactatctcaagcaactccacactgagtcaaacgaaactctcaccgccaaaaaacaggaaggagaaaaggagatcattggcggagatgtggagggcacaaagttgctgctcaagaagagacagtctctggtggagaggacggtcagcgaaacagatataattccaggggacgttcataataccgtaaaagtctttatgaccgaaccccaatcaactttcggcaagattcctaaagaggaaatcataaagggtgatctgacctccacactcaacagcctctcccaagctgttaatcagaaaaccgtcacaaagaccgaagaaatcatcaaaggaaatatgttggcgactctgaagtctcttaaggagagttctcaccgatggaaggaatcaaaacagccagacgcaatccctggagacatagagaaagccattgagtgtctggaaaaagccacaaacacaaagaccgaaattcttaaaaaggaacttctcaaagacgatctcgagacatctctaaggagcctgaaggaggcacagagatccttcaaagaggttcataaagaaggcgtgattaagaaagacgccaaagctgtaatggctggctccagcggggaacagaaaacagacatacaccaagtggcggtgcaaagaaataagaacagcctgctccagcctaaacccggaccctttgaacctgctgccaagtggcaggggggtgccgacactctgagtcaaaccatgggaaagagctgtcatgggaatttggtcgaggagaggaccgaagtgaatctgccaaaagccccaaagggaactgtgaagatcgtgatcgatcgggaacagaacaacgacgccctggagaagtctctgagaagactgtccaattcacatcataagtcaaatgtgctcgagtccggcgataagacgggcgtgtggactgacaccacgggcgagcaacatctgcgcgatgagtacatgagtagacaactcacctcaaccgtgtcagttaaaaataatctcaccaccaaagaatctgacagagctgtcagagaattaaaaaaggacgacgtattcaattctatacagtccgctggtaaaactgtaggaaagcagcagacctacgagttgagaaacgatcaccagaagatggaggggttccacataaagtctccaaaaaagacgaaaaatatcaagattctgaccgatactcagagctcaaaaccttcacccacccagcaccccgtgagcatgcccgtcggtggcacttatgacttgagcggtgatttccaaaaacagactttgttaaagcaagaaactaaatattcaaataaggatattaagaagaaaaacattaatttgcagcccatgtggcagctgttgcctgtcgagcaggatactagtaatgtgacagagatgaaggtatccgaaaagtctcacaatactttcaaagccaccaataaaaaacgggagaccgatgttcacctgaaatctcaggatttcttgatgaagaccaacacttccactgggctgaaaatggccatggaacgtagtttgaatccgatcaatttcaacccagagaacaatgtgaaagaaagcgagtgtccccttccccctccaagtccgccaccaccccctccgtctaatgcttcttcggagatcgagtttccactcccaccaccccctcctctcatgatgttccccgagaaaaacgggttcctgccgagtctgtctaccgagaagataaaagccgagttcgagtctttccctgggctgccactgccgccgcccccggtggatgagaaaagtgaaagggaatctagttcaatgtttctccctccacccccaccccctacgccatctcagaaacctgcacaccttctttctagctccgctccagagaaacattctggggatttcatgcagcagtactcccagaaagaagcaagcaattcacagaattcccaggcaaagatcattacggggaaaacaggcgtcctgccacctccaactctccctaagccaaaactacctaagcacattaaggacaacaaaaatgattttagtcccaaggttgaactcgctacaagccttagcgatatggagtgtaagatcactacaagcaaggaccagaagaaggtgatggtgatgacaagttcggagcataccgaaactaaacaaaatgtaatcagcaagtcgctggacgagcggaagcaactgagcattgattcagccaactgcctgtcacatacagtgcccggtacatccgctcccagaaaaaagcagatagccccgctgattaaatctcactcattccctgagtccagcggccagcagaatccaaagccatacatgagaaaatttaaaacacccttaatgattgctgaggaaaagtataggcagcagaaggaggaaatcgagaaacagaaacaggagtccagttattataacattgtgaagacccagagccaaaatcagcatatcacagaggtggagaaagagatgcccctgcagaagaccaatgaggaggtaagcctatctggtatcgattccgagtgtactgtcgtccagccatcccccgggagccagagtaatgcacgcatccttggcgtttgttccgataatcaattatccacaacaagccctgagactgtggctgccaagcgtctccaccacgtgctggctgcatctgaggacaaggacaagatgaagaaggaagtgctgcagtcatcccgcgatatcatgcaaagcaaatctgcttgcgaaataaagcagtcacaccaggagtgctcaacccagcagacgcagcagaagaaatacctcgaacaactgcatctgccacagagcaaacctatatcacccaatttcaaggttaagaccatcaagctgcctacactggaccacacactgaacgagaccgaccactcctacgaaagccataaacagcaatcagagattgatgttcagactttcacgaagaagcagtatctgaaaacaaagaaaaccgaagccagtaccgagtgtagtcataaacagtccttagccgagagacactaccaattgccaaaaaaagagaaacgtgtcactgtgcagctgccaaccgagtctattcaaaagaaccaagaggataagctgaagatggttcctaggaaacaaagagaatttagcggttccgataggggcaaactgcccggatcagaggagaaaaatcaggggcctagtatgatcggcagaaaggaggaacggttgatcacagagcgaaagcatgagcacctaaagaataagtcagcccctaaagttgtcaagcaaaaggttatcgacgcgcatttggattcgcaaacccaaaattttcagcaaacccaaatacaaaccgcagaatccaaggccgagcataagaaactccctcaaccctataatagcctgcaggaagaaaagtgcctcgaggtgaaggggatacaggaaaagcaagttttctccaacaccaaggactccaaacaggagatcacccagaataaatcctttttctctagtgttaaggagagtcagagggacgatgggaaaggcgccctcaacatcgttgagtttctcagaaagagggaggaattacagcaaatcctctcacgtgtgaagcagttcgaggctgaaccaaacaagtcagggcttaagacctttcagaccctcctgaataccatccctggatggcttataagtgaggacaaacgtgagtacgccgtgcacatagctatggagaacaatctggagaaggttaaggaggaaatcactcatattaaaacacaagccgaagatatgctcgtgagttatgagaacattatccagacagccatgatgtcaagcaagaccgggaaaccaggaaataagccaaccagcctcgacgaaacctccagcaaggtctctaatgtgcacgtgagcaacaacaaaaactctgagcagaaggagaacaaaatagccaaggaaaaaacggtccagcatcaggtggcagctcatcatgaggccacagtgcgctcccacgttaagacgcaccaggagataaagctcgatgattccaacatcccccctcctagcctgaaaaccaggccaccgtctcccacattcattaccatcgagtcaacagcaagaagaacagagaatcctacaaaaaacgaattgtcccaatccccaaagaaagacagctacgttgaaccgccacctagaagacccatgagccagaaaagtgaaattcatagggctaacacttcaccctcacccccgagaagccggtccgaacagctcgtcaggctgaaggacactaccgccaagcttagcaagggcgccattccgtgccccgccgcaacacccgtgcccatcgtggaaaaacgctctgagattattatgtcgcccgcaaccctgcggcggcagataaagattgagacgcggggtcgggactcccctcccactatcacaatcccagtgaatattaaccacgctgcatccggctcgttccgcgaaagtgtggacgcgcaagaggaaattaggaaagtggagaagcgcgctacctatgttcacaaagatggactgaattccactgaccacatggtcccagacaccgagtcttacgacgctgttgagatcatacgaaaagtagctgttcctcccagactctctgaacatacccagcgctacgaagccgcaaaccgtaccgtgcagatggcggagaactttgtcaacgaccccgagaacgaaattaacagatggtttagagagttcgagcatgggcctgtcagcgaagcaaagagcaatcgcagagtatatgcaaaaggcgaaacaaatcataatatccagcaggaaagtcgcacattctgcaaagaggagttcggacttactagcctgggcaacacatctttcaccgactttagctgcaaacacccacgagaactgcgtgagaaaatcccagtcaaacagcctcggatttgttcagagactcgatccttgtctgagcacttcagtgggatggatgcatttgaatcccagatcgtggagtccaagatgaagacttcgtcctctcatagctcagaagctggtaaatccggttgtgattttaaacacgctccccccacatacgaggacgtgatcgctggccacattctggacatcagtgattctccaaaggaggttagaaaaaacttccagaaaacctggcaggagagtgggcgagtctttaaaggacttggatatgccactgcagatgccagcgccaccgaaatgaggacgacattccaggaagaaagtgcttttattagcgaagctgccgctcctcgacaaggaaacatgtacacactgagtaaggatagtctctctaatggtgtgccatctgggcgccaggcagagttcagctag

SEQ ID NO: 243130 - DNA, 10650 bp, Artificial Sequence
  derived and/or modified sequence
atgtttccaatgcagaaagggagtctgaatctcctacgacagaagtgggagtcctgcgactaccagcgctcggagtgtcatcccagggactctcattgtactatattccagcctcaggagtccaagctcttggcccctgagggtgaggtagtttccgctcctcagagcctggatcctacctccctgccttatagtaccggagaagagatgtggagttcaaagcccgaagagaaggactccgttgacaagtctaacaacactcgtgaatacgggcgacccgaagttctgaaagaggacagtctgagctcacgtcgcaggatcgagagatttagcattgctctcgacgagctgagaagtgtttttgaagctcctaagtccgggaataaacccgctgagtatgggggtaaagaggttgaaatcgagcgtagtctgtgctcacctgcctttaagtctcaccccggttctcagctggaagattcagtcaaagatagcgataagaagggaaaggaaacctctttcgataagatgtcacccgaaagcgggcattcccgcattttcgaagctacagcaggaccaaacaagcccgagtctggctttgctgaggattctgcagctaggggcgaaggtgtcagcgacctccacgaggtggtgtctctgaaggaacgtatggctcgttaccaggccgcagtgtctagaggcgattgcagatccttttccgctaacatgatggaagaatcagagatgtgtgcggtgccgggagggctcgcaaaggtgaagaagcagtttgaagacgaaattaccagttcgagaaacacgtttgcacagtatcaatatcagcatcagaataggtcagagcaggaggctatccatagctctcaagtagggacctctaggtcaagccaggagatggcacgcaacgaacaagaagggtccaaagtccagaaaatcgacgttcacgggacggaaatggtgtcacatctagagaagcacactgaagaggttaaccaggcatctcagtttcaccagtacgtgcaggagactgttatcgacactccagaagacgaggaaattcccaaggtgtccacaaagctcctgaaggaacaatttgaaaaatctgcacaggaaaagatcttgtatagtgataaggagatgaccactccagccaagcagattaagacagaatccgagtatgaggagacttttaaaccctcgtccgtggtgagtacatcatcaacttcttgcgtgtcgaccagccagcgaaaggaaacgagcacaactaggtattctgatcacagcgtgactagctccactctggcacagatcaacgctacctcgtctggtatgacagaagagtttccaccaccaccacctgacgtattgcagacgtccgtcgatgtgacagctttcagccaatcgccggaactcccctcacctccccgacggctgccagtgccgaaggatgtgtactcaaaacaacgcaatctgtatgagctgaataggctctacaagcatattcatcctgagctgcgaaagaacctggagaaggattatattagcgaagtgtccgagattgttagcagtcagatgaatagtgggagcagcgtcagcgccgatgttcagcaggccagatatgtctttgaaaataccaacgattcatcccaaaaagatctcaattctgagagggagtacttggagtgggatgaaattctgaagggtgaagtgcagagcataaggtggatattcgagaaccagccacttgacagtattaacaatggctcccccgatgagggcgatatctctcggggtatcgcggaccaagagatcattgccggaggggacgtgaagtatactacatggatgtttgagacccagcccattgacactctgggcgcatattcttccgacacggtggaaaatgcggagaagattcccgagctggccagaggcgatgtgtgtactgccagatggatgttcgaaaccaggcccctggactctatgaacaagatgcatcagagccaggaggaatccgcggttacgatcagcaaagatataacgggcggagacgtcaagactgtgaggtatatgtttgagacgcagcacctggatcaactggggcagttgcactccgtcgacgaggttcacctccttcagctgcgatctgagctgaaagagatcaaaggcaacgtgaagagaagcatcaaatgtttcgaaacgcagcctctttatgttatccgggacgggtcaggacagatgctcgagataaaaactgtgcatagggaggacgtggagaaaggagatgtcagaacggcacgctggatgttcgagacacaacctttggacacaatcaacaaggatattaccgaaatcaaggtggtccggggaatatccatggaagagaatgtaaaagggggtgtatctaaggctaagtggttgtttgaaacccagcccctcgagaaaattaaggaatccgaagaggtgattatcgagaaggagaaaattatcggtaccgacgtgtctagaaaatgctggatgtttgaaactcaaccgctagatattttgaaggaagtccccgatgccgactctctgcagcgggaggagatcataggaggagacgtacagacaaccaaacacctcttcgagactcttccgatcgaagccttaaaggattcacctgacattggcaagcttcagaagatcacggcttccgaagaggagaaaggggacgtgagacatcagaagtggatctttgagacacaacctctcgaagatattagaaaagacaagaaggaatacaccagaacagtgaaactcgaagaagtcgatagaggggacgttaagaattatacacacatatttgaaagcaataatcttattaagttcgacgcttcccacaagatagaggtggaaggagtaacacgaggcgctgtcgagctaaataagtcattgttcgagactacgcctctttacgcaatccaggaccccctaggcaagtatcaccaggtgaagacggtacagcaggaggagatcgttcgaggtgacgtgcgtagctgcagatggctgtttgagacccgcccaattgatcagttcgatgagtcaattcacaaattccagataattcggggaatctcagcccaagaaatccagactgggaacgtcaagagcgccaaatggcttttcgagacacagcccttagattcaatcaaatacttcagcgatgtggaagagaccgaaagcaaaacagagcaaactcgagacattgtaaaaggagatgtgaagacgtgcaagtggctgtttgagacccagcctatggaaagtctgtacgagaaggttagcctgatgaccagctcagaggaaatccacaagggtgacgtgaagacctgcacctggttgttcgagacccagcccctggacacgatcaaggacgactcggaaacggcggtcaagctccagactgtgaagcaggaggaaattcaaggaggtgacgtccggacagcttgtttcctattcgagaccgaaaacctggactcgattcagggggaagaggtgaaagagattaagccagtggagatggatatccaggcaggggacgtaagtagtatgcgctacaagtttgaaaaccaatctttggactcgatctcatccagctcagaggaggttctgaagaagatcaaaacacttaaaaccgaggacatccagaaagggaatgtcctgaattgtaggtggctctttgaaaaccagcctatcgacaagatcaaggaatctcaggagggcgatgagtgcgtcaaaaccgtgacagatatccaaggtggtgacgttagaaaaggatgctttatctttgagactttttcactcgacgagatcaaggaggagagcgattacatcagcaccaaaaagaccataactgaggaggtgatccaaggggatgtgaaaagctatagaatgctgttcgagacccagcccctgtacgcgatccaagacagagagggaagctaccatgaggttaccaccgttaagaaggaggaagtgattcacggagatgtaaggggtacacggtggctcttcgaaactaagcccctggatagtattaataaatccgagacagtgtatgtaatcaaaagtgtgacacaggaggatatccagaagggcgacgtgtcctccgttagatataggtttgaaacacagcccctggatcagatcagcgaagaatcacacaacatcatgccttctattgatcacatacagggcggaaacgtcaaaacctcgcgccagttctttgaatccgaaaattttgataagaacaattacatcaggacggtgtcagtgaacgagattcaaaagggcaatgtgaaaaccagtacgtggcttttcgagacccacacaatggatgaactacgaggagagggcctcgaatacgaaaacatcaagaccgtgactcaagaggatgttcagaaaggcgatgtcaaacaggcagtgtggctgttcgagaaccgaacctttgactccattatggaggcacataaagggataactaaaatgacaaaggaggagattcccccatcagatgttaaaaccacgacttggctgttcgagactacgcccctgcacgaattcaacgaaactcgggtggaaaaaatcgaaattatcgggaagagtataaaggaaacacttgaagacctgtactctcagaaggtcatccaagcccctgggatcatcattgaggccgacgaaataggtgatgtgcgaatggccaagtacaagctcatgaatcaggcgtctcccgagattcagaaggaggagatcattcgagctgacttgcgaaatattatggtgaacctattgagcaagcgggactgtaccgagcgcgagatacttatctctgaagaagagaagggcaacgtgaacttaacaaagactcagcttttgaatcgatcaaccgagttccatgccgagaaggaggagattgtgaaaggagacgtacagcaggcaattaagaatctgtttagcgaagaaagatccgtcaagaaggggatcctgatccaagaggacgagaaaggtgacattaatatgacaatctactgcttgctccacgagaatgacggcgacacgatagaaagggaggaagtgattggtggcgacgtcaaacggacgatccataatctcctctcaagtacatccaataacaaaatcagcgaacgggcaaagattgatgcttcggagcgagggaatgtgcagttcttcacaacgtgcatagaggcaggggcactggattacttgaagcagttgcacacagaaagcaatgagactttaaccgccaagaagcaagaaggcgagaaagagattatagggggagacgtggagggtactaaactcctgttgaagaaacggcagtcattagtggagaggaccgtgtccgaaacagatattattcccggtgacgttcacaacactgtcaaagtgttcatgaccgagccacaatcgacatttggcaaaattccaaaagaggagattattaaaggcgacctcacatccacactgaactcactaagccaggcggtgaatcagaagacagttaccaaaacggaagaaataattaaaggaaatatgctggcaacattaaaatcactgaaagaatcatctcataggtggaaagaatcaaagcaacccgatgcaataccaggggatatagaaaaagctattgaatgtcttgaaaaagcgacaaacacaaagacagaaatcctgaagaaggaacttctgaaggacgacctcgaaaccagcctgaggagtctcaaggaggcccaaagatcatttaaggaggtccataaggagggtgtgattaagaaagatgctaaggctgtgatggccggttcctcaggtgagcaaaaaaccgatattcatcaggtggctgttcagaggaacaagaactccctgctgcagccgaagcccggtcctttcgaacccgctgccaagtggcagggcggtgcagatacacttagccagactatgggaaagagctgtcatgggaatctagtggaggaacgcacagaagtcaaccttcctaaagcgcctaaaggcaccgtaaagatcgtgattgacagggaacagaacaacgacgccctggagaagtcactacggcgactatccaacagtcaccacaagtctaacgtgctcgagtctggtgataagaccggagtttggacggacaccacaggtgaacagcatttacgcgacgagtatatgtccagacagctgacctccaccgtgtctgtcaagaataacctcactaccaaggagtcagatagagcagtgcgtgagcttaagaaagatgatgtgttcaactccatacaatcggcaggaaaaaccgttgggaaacagcaaacgtatgaactgagaaacgaccaccaaaagatggaaggcttccacattaaaagcccaaaaaaaactaagaacattaagatccttacagacacccagtcatcgaagcctagcccaacccagcatccagtctcaatgccagtgggaggcacttacgacctgtcgggagatttccaaaagcagacactgttaaagcaagagacgaagtattccaacaaggatatcaagaagaaaaatataaatcttcagccaatgtggcaattactccccgtcgaacaggatacctcgaatgtgacagaaatgaaagtgagcgagaaatctcataacacctttaaagccacgaataagaagcgagagactgatgtgcatctgaagagtcaggattttcttatgaagaccaacacaagcaccggactgaagatggccatggagagaagcttgaatcctatcaactttaatcccgagaataatgttaaggagagtgaatgtcctctgccaccaccctcccctccccctcctcctccatccaatgccagctccgagattgaatttccattacctcctcctccccctttaatgatgttccctgaaaagaatggcttcctcccttctctgagcactgaaaagataaaagccgaatttgagtcatttccaggtttacctctgccccctcctccggtagacgaaaagtcggagagggagagctcttcaatgtttctgccacctccgcctcccccaacgccatctcagaaacctgcacatctcctcagtagctccgcaccagagaagcatagtggtgattttatgcagcagtatagtcagaaggaggcaagcaattctcagaattcccaagcgaagatcattactgggaaaaccggagtgctgcctccgccaacattgcccaaaccgaagctgccaaaacatattaaagacaacaaaaacgacttcagtcctaaagtggaactagcaactagcctgtccgacatggagtgtaaaatcaccacatccaaggatcaaaagaaagtcatggtgatgacaagcagtgaacacactgaaacaaagcagaatgtcatctccaagtcactcgatgaacgaaagcagttgtccatcgacagtgctaattgcctatcacacaccgttcctggaacctctgccccacgcaagaagcagatcgctccccttattaagagccatagtttccccgagagcagtggccagcagaaccccaaaccttatatgcgcaagtttaagaccccactgatgattgccgaggaaaaatatcggcagcagaaggaggaaatcgaaaagcaaaaacaggaaagctcgtattataatatcgtaaagacccaaagtcaaaaccagcacattaccgaggtggaaaaagaaatgccactccagaaaaccaacgaagaagtgtcgctgagtggcatcgatagcgagtgcacggtagtgcaaccatctccgggaagccagtccaacgctagaattctgggcgtttgctctgacaatcagctaagtacaacgtcacctgaaacggttgctgcaaagagactacatcacgtgcttgctgcctctgaagacaaagataaaatgaaaaaggaggtgttacagtccagtcgagacatcatgcaatcaaagagcgcttgtgagattaagcagtcccatcaggagtgtagtactcagcaaactcaacagaagaagtacctcgaacaattacacttaccccaatctaagccaatttcacctaatttcaaagtgaaaactatcaagctgcctacactggatcataccctcaacgagactgaccactcgtatgaaagtcataagcagcagtccgaaatagacgtgcagactttcaccaaaaagcagtacctgaaaacgaagaagaccgaagctagcacagaatgttcccataagcagtctctcgccgagagacactaccagctgccaaagaaagaaaagcgagtgactgtccagttaccgacagaaagcattcagaaaaaccaggaggacaagttgaaaatggtgccgagaaaacaaagggaattcagcggcagtgacaggggtaagttgcctggaagcgaagagaagaaccagggcccttccatgatcggcagaaaggaagaaaggttgattaccgaacggaagcatgaacatcttaagaacaagtctgccccaaaggttgtgaaacaaaaggttattgacgctcacctggactctcagacacaaaacttccagcagacgcagattcagacagctgagtctaaagccgagcataagaaactaccccagccctataactctctgcaagaggaaaagtgtctggaggtgaaaggaatccaagaaaaacaagtgttttccaacactaaggatagcaagcaggagataacacaaaacaagtcctttttcagttctgtcaaagagagccaacgcgacgacggcaagggagctttaaacatcgttgagtttctgcgcaagcgggaagagctccagcaaatactgagcagagttaagcagttcgaggctgagcccaacaagtccggactgaaaacctttcaaactctcctgaacactatccctggttggctgatttctgaagacaagcgcgaatacgccgtgcatatcgcaatggagaataatctggaaaaggtcaaggaggagataacacacattaaaactcaggcagaggacatgcttgtgtcatacgaaaatattattcagactgcgatgatgagcagtaagaccggtaaaccgggaaacaaaccaaccagcctcgatgaaacgtcctctaaagtatcaaacgttcacgtttcaaataacaaaaactctgagcagaaagagaataagatcgctaaagagaagactgttcagcatcaagttgcagcccaccacgaagctacagttcgttcccacgtgaaaacacatcaggagatcaagctagatgattccaacattccccctccttctctgaagacacgccctcctagccccaccttcatcactatagagtccacagccaggcggacagagaatcccactaaaaacgaattaagccaaagcccaaaaaaggattcctatgtggaaccaccacctcgaagaccaatgtcccagaaatcagagatccaccgggcaaacaccagcccttccccacccaggagccggtctgaacagttggtgcgcttgaaagacacaactgcaaagctgtccaagggagccatcccctgtcccgcagctacccccgtccccatagtggagaaaaggtcagagatcattatgagcccagccaccctaaggaggcagatcaaaatcgagactcggggacgcgatagtcctcccaccatcactatacctgtaaatattaaccacgctgcgagcgggtctttccgtgaaagcgtggacgcgcaagaggaaatccggaaagtggaaaaaagggcaacatatgtccataaggatggattgaattccacggaccacatggtccctgatacagaatcctacgatgctgtggagatcatcagaaaggtcgctgtccctccaaggctcagtgagcacacgcagcggtacgaggcagctaatcgcacggtgcagatggctgaaaacttcgtgaatgacccagagaacgagattaataggtggttcagagaatttgagcacggtcccgtttccgaagccaagagcaaccgcagggtctatgcaaagggtgaaacaaaccacaacatccagcaggagagcaggactttttgtaaggaagagttcgggctgactagtttaggcaatacctcctttaccgatttttcctgtaaacatccacgcgagcttcgagagaaaatccctgtaaaacagcccaggatctgttcagaaacccggtccctgtctgaacatttcagcggtatggacgcctttgaaagtcagatagtggaaagcaagatgaagacatcatcaagccactcatccgaagcaggcaaatcaggatgcgatttcaaacacgctcctccaacttatgaagacgtaattgctggacatatacttgatatctcagatagccctaaggaggtgcgcaaaaacttccaaaagacatggcaggagtcaggcagagtattcaaaggccttgggtatgccacagccgatgcttccgcaacggaaatgcggacaacatttcaggaggagtctgcctttattagtgaagctgctgcccctagacaggggaacatgtacacgctctccaaagatagcctttccaacggggtgcccagtggaaggcaggccgaattcagctag

SEQ ID NO: 243131 - DNA, 10650 bp, Artificial Sequence
  derived and/or modified sequence
atgtttccaatgcaaaaaggaagcctgaacctgttaaggcagaaatgggaaagctgcgactaccagaggtctgagtgccatcccagggattcacattgcacaatatttcaaccgcaggagagcaagctgctggcgcctgagggcgaagttgtgagcgcacctcagagcctggaccccacctcactcccctacagcaccggagaggaaatgtggtcatccaaacctgaagagaaagattccgttgacaagtctaacaacacccgcgaatatgggagacctgaggtcctgaaggaggacagtctgagcagccgacggagaatagaacgcttctctatcgccctggatgaattgcgcagtgtgtttgaagcacccaaaagcggcaacaaacctgccgaatacggcggaaaagaagtggagattgagagatccttgtgcagtcctgcctttaaatcccaccccggttctcagctggaagattcggtgaaagacagtgacaagaaaggaaaagagacttcttttgataaaatgtcgccagaatcagggcattccaggatcttcgaggctactgcaggtcctaataaacccgagagcggatttgccgaggacagcgctgccagaggggagggggtgagtgaccttcacgaggtggtgtcactgaaggagcggatggccagataccaggcggcagtgtcccgaggcgattgtagatccttctctgccaacatgatggaagagagcgagatgtgtgctgtgccagggggactggcaaaggtcaagaaacagttcgaagacgagatcacgagttcccgcaacacgtttgcccagtatcagtaccagcaccagaaccgctccgagcaggaggcgatacatagttctcaggtgggcacctccaggagcagtcaggaaatggcgagaaacgaacaggagggatctaaagtacagaaaatagacgtacatggaacggagatggtgtcccacctagagaaacacactgaagaggtgaatcaggcatcccagttccaccagtatgtgcaggaaaccgtcattgatacccctgaggatgaggaaatcccaaaagttagcacaaaactgctaaaggagcagtttgagaagtccgcccaggaaaagatactttactctgacaaggaaatgactacacctgctaagcagattaagacagaaagtgagtacgaagaaacctttaagccatcttctgtggttagcacatcatccaccagttgcgtgtccacgtctcaacgcaaggagacttccactacccggtacagcgatcattctgtgacctcctcaaccctggcccagattaatgccacgtcatcaggcatgaccgaagagtttcccccacctcccccagacgtactgcagacttctgtcgatgtgactgccttctcacagtcccccgaactgcctagccccccacggagactaccagtgccaaaagatgtgtattccaagcagaggaacttgtatgagctgaacagactttataagcatatccatccggagttgagaaagaaccttgagaaagactacataagcgaggtcagtgaaattgtctcttcacagatgaactctggcagcagtgtgagcgccgacgtccagcaggcccgttacgtgtttgagaacacaaatgattcaagccagaaggacctaaacagtgagagagaatacctcgaatgggacgagattttaaaaggcgaagttcaatccattagatggatctttgaaaatcaacctctggatagtattaacaatgggagcccggatgagggagacatcagccgagggatagcagaccaggagataattgctgggggagatgttaagtatacaacctggatgtttgagactcagcctatcgacaccctaggcgcatactcgtccgacacagtggaaaacgctgagaagataccagagctggccaggggggacgtgtgtactgcacggtggatgttcgaaacccggcctctcgactcaatgaacaagatgcaccagagtcaagaagaaagcgccgtgaccatatccaaggacataactggcggagacgtgaaaacggtaagatatatgttcgagactcagcaccttgaccagctcggccaattgcactccgtggacgaggtgcacctcctgcagttgcgcagcgagttgaaagaaatcaagggaaacgtcaagaggtccataaaatgctttgagacacagccattatatgtcatccgtgacggatccggacagatgctcgaaattaagacagttcatcgcgaagacgttgagaaaggcgatgtgcgcaccgcgagatggatgttcgagacgcagcccctcgacacaatcaataaagatatcacagagattaaagttgtgagaggcattagtatggaggaaaacgtaaaggggggtgtaagcaaggccaaatggctgtttgaaacccagcccctcgagaagatcaaagaatcagaggaagtcatcattgagaaggagaagattatcggcaccgatgtcagtcgcaagtgctggatgttcgagacgcagccactggatattctcaaagaggtacctgatgcagattcactccagcgcgaggaaatcattggtggagacgttcagactacgaaacacctttttgagaccttgccgattgaggccttgaaagatagcccggacatcggaaaacttcagaaaattaccgcatctgaggaggaaaagggagacgtgcgacaccagaagtggatcttcgaaacacagcctctggaggacatcaggaaggacaaaaaagagtacactcgcacagtcaaacttgaggaggtggataggggagatgttaagaactatacccatattttcgaatccaataatttaattaagtttgacgcttctcataagatcgaggtcgagggggtgacccggggagccgtcgaactgaataagagcctgttcgagacaactccattgtacgccatccaggatccactcggtaagtaccaccaagtgaaaactgtccagcaggaggagattgtgaggggcgacgttcggagttgcagatggcttttcgagacacggccaatcgaccagtttgatgagagtatccacaaattccagattatcagggggatctccgcccaggaaattcagacaggcaacgtcaagtccgccaaatggttgtttgaaacacagcctttagacagtattaaatacttttccgacgtggaagaaaccgagtcaaagactgagcagacacgcgatatcgtgaaaggcgatgtgaaaacttgtaagtggctctttgaaacccagcccatggaatccctgtacgaaaaagtgtcactgatgacttcgagtgaggaaattcacaagggcgacgtgaaaacttgcacatggttgttcgagacacagcccttggatactatcaaagatgattctgagactgctgtgaagctccagactgtaaagcaggaggagatccagggcggagatgtgcggactgcatgtttcctattcgagaccgagaatcttgactccatacagggcgaggaggttaaggagatcaaaccagtggagatggacatccaggccggagacgttagctccatgcggtataaattcgagaaccaaagcctcgactccatttcctcctcttctgaggaagtactcaagaagattaagacccttaaaactgaggacatccagaagggaaatgtgttgaactgtagatggctattcgaaaaccaacccattgacaaaattaaggagtcgcaggagggtgacgaatgcgtcaaaaccgtgactgacattcagggcggtgatgttaggaaaggctgttttatattcgaaaccttttcactggatgagataaaggaggaaagcgattacatctccactaagaagacgattactgaagaggtcattcagggggatgttaagagctaccgtatgctctttgaaacccaaccactttatgccatccaggaccgtgaggggtcctaccatgaggtcacgaccgtgaagaaggaggaggtgatccacggggacgtgagggggaccagatggctgtttgagacaaaacctttagattcaatcaacaagtccgagactgtctacgttattaagagcgttactcaggaggacatccagaagggcgatgtgagctccgtcagatatagattcgagactcaaccattagaccaaattagcgaggaaagccacaatatcatgcccagcattgaccatattcagggtgggaatgtgaagacttcgaggcagtttttcgagtctgagaattttgacaagaacaattatatacgaactgtctccgtgaatgagattcagaagggtaacgtgaagacctctacctggttattcgaaacacacacaatggacgaacttaggggtgagggcctcgagtatgaaaacataaaaactgtcactcaggaggatgtgcagaaaggagacgtgaaacaggccgtgtggttgttcgaaaatcgcacctttgatagtatcatggaagcacacaagggaatcacaaaaatgaccaaggaagagataccccctagcgacgttaagaccacaacatggctgtttgagacaacccctctccacgaatttaacgagacacgcgtcgaaaagatcgaaatcataggcaaatccatcaaggagactctggaggacctttattcccagaaggtcatccaggctccagggataattatcgaggccgacgagattggtgacgtgaggatggcaaaatacaaactcatgaatcaggccagtcctgaaatccagaaggaggaaattatccgggcagatttgcgcaacatcatggtaaatttgctgtctaagcgcgattgcacagagagggaaattcttatctccgaagaggaaaaagggaatgtgaacctcacaaaaacccagctcctgaatcggagcactgaatttcatgccgagaaagaagaaatagtcaaaggcgacgtccagcaggcaatcaaaaacctgttttcggaagaaaggtcagtgaagaaagggattctcattcaggaagacgaaaagggtgacataaacatgaccatctattgcctgttgcacgaaaacgacggtgatactatcgaacgtgaggaagtgataggcggagatgtgaaacggactatccacaatctgttgtcttcaacatcaaataataaaatttccgagagagccaagattgatgccagtgaaaggggcaatgtccagttcttcaccacctgtatagaggcaggcgcacttgactacctcaaacagctgcatactgagagcaatgagactcttactgcgaaaaaacaggaaggcgaaaaagagatcatagggggtgacgtggaggggactaagttattgctcaagaagcggcaaagcctggtggagcgcaccgtaagtgagacagatataattccgggtgacgtacataatacagtcaaggtgtttatgacggaaccacagtcgacgttcggcaagatccccaaagaggagatcatcaaaggagacttaactagtactctgaacagtttgtctcaagctgtgaaccagaaaacggtcacgaaaacagaggagattatcaaagggaacatgttggctacgctcaagagtctcaaggaatctagtcatcggtggaaagagtcaaaacagcccgatgccatccccggtgatattgaaaaagctattgagtgccttgaaaaggcaaccaataccaagacagaaatattgaagaaagagctgttaaaagatgaccttgagacatcacttcggagcctcaaagaggctcaacggtcattcaaggaggttcataaggagggcgttatcaaaaaggatgctaaggccgtgatggccggttcctcaggtgagcagaagacagatattcatcaggtggctgtgcagcgaaataagaactccctcctccagcctaagccgggtccctttgaaccagccgctaagtggcagggtggggcagacactttaagtcaaacaatgggaaagagctgccatggcaacttagtcgaagaaaggaccgaggttaatctcccaaaggcgcctaaggggacagtcaaaattgtgatcgaccgcgagcagaataacgatgccttggaaaagagcctaagacgcctctcaaattcgcaccacaaatccaatgtgctcgaatcgggggataagacaggggtatggaccgataccaccggagaacaacaccttagagatgagtacatgtctaggcagctgacgtcgactgtctccgtcaaaaataatcttactacaaaagaaagtgaccgggctgtgcgtgagctgaaaaaagatgacgtgttcaactctatccagtcagccggaaaaacagtgggtaaacagcagacatatgagctgcggaatgaccatcagaaaatggagggcttccatataaagtccccgaaaaaaaccaagaatatcaaaatcctgacggatactcaatccagcaagccttcaccaacccagcatccggtctccatgcctgtcggcggaacctacgacttatcgggcgattttcagaaacaaaccctgttaaaacaggaaacaaagtacagcaataaagacattaagaaaaagaacatcaatctacaacctatgtggcaacttctcccagtggaacaggatacatctaatgtaaccgaaatgaaggtgagcgagaagtcccataacaccttcaaagcaaccaacaagaagcgcgaaactgacgttcatctgaaaagccaggatttcttaatgaaaaccaacacaagcacggggctaaaaatggcgatggagaggtcactgaaccctattaattttaaccccgagaataacgtaaaagaaagcgagtgcccgctccctcctccctcaccccctccccctccccctagcaatgcttctagcgaaatcgaattcccgcttccccctccacctccactgatgatgttccctgaaaagaatggctttctacccagcctgtctacagagaagataaaggcggagtttgaatccttcccaggcctgccactccctcctcccccagtagacgagaagagtgaacgggaatctagttcaatgtttctaccccctccgcctccacctactccatcccagaagccggctcaccttctcagcagttccgcacctgaaaagcactcaggtgactttatgcaacagtacagccagaaggaggcttcaaatagtcaaaacagccaagcaaagatcattaccggaaaaacaggcgtgctgcctcctcctacgctcccaaaaccaaaactgcctaagcacatcaaagataataagaatgatttcagtcctaaagtggaactcgctacttccctgtccgacatggagtgcaagatcacaactagtaaggaccagaagaaggttatggttatgacctctagcgagcacacagagacaaagcagaatgttatcagcaaaagtctggatgaacgcaaacaattaagcatagactccgctaactgcctgagtcacacagtgcctggcacgagcgccccaagaaagaaacaaatcgcacctcttattaagagccacagttttcctgagagctcaggacaacagaatcccaagccctacatgcgcaagttcaaaacccctttgatgattgcagaagaaaagtatcgccagcagaaggaagagatagaaaagcaaaagcaggaaagcagttattacaacattgttaagactcaatcccagaaccaacatataacagaagtcgagaaagagatgccattgcagaagactaatgaagaagtgagcctatctggcatagactccgagtgcaccgtggtgcaaccatctcccggttctcagtcaaacgcccgaatccttggggtatgttcagacaaccagctgagtaccacatcccccgagacagtcgccgcaaagcggttgcaccatgtcctagcagcctccgaggacaaggacaagatgaagaaggaggtgttgcaatcttcacgggacatcatgcaatcaaagagcgcctgcgagataaagcagagccatcaggagtgctccacccaacaaacacaacagaagaagtacctcgaacagctgcacttgccgcagagtaagcccatcagtccaaactttaaggtcaaaaccattaaactgccgactcttgatcatacactgaacgagaccgatcattcgtacgaaagccacaagcagcagagtgaaatcgatgtccaaactttcacaaagaaacagtatctgaagacgaaaaagacagaagcaagtactgaatgttctcacaagcagagtctggccgaaagacactatcagctgcctaagaaggagaaacgcgtaacagtgcagctcccgaccgagagcatccaaaagaaccaggaagataagttgaagatggtgccacggaagcaaagggagttcagcggaagcgaccgaggaaagctacccggaagcgaggagaaaaaccagggtcccagcatgatcggtcgaaaggaggagcgcctcataaccgagcgtaaacacgagcatctcaagaacaaatcagctcctaaagtggtcaaacagaaagtcatcgacgcccacctggatagccagactcagaacttccaacagacacaaatccagacagcagagagtaaagctgaacataaaaagctgcctcagccctataattcgctgcaggaagagaaatgtctggaggtgaaaggaatccaggagaagcaggtttttagtaatacaaaagactccaaacaggagattacgcagaataagagcttcttcagctctgtgaaagagtcacagcgcgacgatggtaaaggcgctcttaatatcgtggaatttctgcgcaaacgagaagaattgcaacagatcctgtctcgagttaaacagttcgaggccgaaccgaacaaatcggggctgaagacctttcagacacttctaaatacgatccctgggtggctcatctcagaggataaaagagagtacgccgtgcatattgctatggaaaacaatcttgagaaagtgaaagaggaaatcactcatatcaaaactcaggcagaggacatgctggtgagctacgagaatatcatccaaaccgccatgatgtcctctaagacaggaaagccagggaacaagcccacaagcctcgacgagacctcgagcaaagtgagtaacgtgcacgtgagcaacaacaagaacagtgagcagaaggagaacaagattgcgaaagagaaaacagtgcagcatcaggtggccgctcaccacgaagccactgtcagatcgcacgtcaagacccatcaggaaattaagttggacgacagcaatatccccccaccttcactcaagaccaggccaccctctccaacgttcattacaattgaatctactgccagaagaaccgagaaccccaccaagaatgagctgtcccagtccccgaaaaaggactcctatgtggagccaccccctcgaagaccaatgtcgcagaaatccgagatccatcgggctaatactagtccaagccctcctcgatcccgatccgagcagcttgttcggctgaaggacacgacggcaaagctgagcaagggagctataccatgtcccgcagcaacacctgtgccaatcgtagaaaagcgttcggaaatcataatgagccctgctacattgcgcaggcaaatcaaaatagaaacgaggggtcgtgattcacctccaactatcacaatccctgtcaatatcaaccatgcggctagcggttcttttcgtgaaagtgttgacgcacaggaggagattcgtaaggtggaaaagagagcaacatatgtgcacaaggatggccttaatagcacggaccacatggtgcctgataccgagagctacgatgcagttgagatcatccgtaaagttgcggtgcctccccgactgagcgagcacacgcaacgatatgaagccgctaatcggacagtccaaatggctgaaaacttcgtgaacgatccagagaatgaaatcaacaggtggttcagagagtttgaacatggcccagtgtcagaggcgaagtccaatcggcgagtgtacgccaaaggagaaaccaaccataatattcagcaggaatcaaggacgttctgcaaggaagagttcgggctgacaagtttaggtaacacaagcttcaccgattttagctgcaagcaccctagggaattacgcgaaaaaattccagtcaagcagccaaggatctgtagcgagacccggtctctgagcgagcattttagtggcatggatgccttcgaaagccagatcgtggagtccaaaatgaaaactagtagctcacacagcagcgaggcgggaaagtcaggttgtgatttcaaacatgcacctcccacgtatgaggacgttattgcgggacatatcctggacatctccgatagcccaaaagaggtgaggaaaaactttcagaagacatggcaggaaagcggaagggtgttcaagggactggggtacgcaacggcagatgcaagcgccaccgaaatgcgaaccaccttccaagaagagtccgcttttatttctgaggccgcagccccaaggcagggaaacatgtacactttatccaaagattccctctcaaatggcgtgccttccggtcggcaagcagagttctcttaa

SEQ ID NO: 243132 - DNA, 12582 bp, Artificial Sequence
  derived and/or modified sequence
atgttcccaatgcagaagggctccctcaacctcctgaggcagaaatgggaatcttgtgattatcagagaagtgagtgtcatcccagggacagccattgtacaattttccagcctcaggaaagcaaattgcttgcgcctgaaggagaggtagtatcagcacctcaatctttggatcccacaagtctgccctacagtacaggggaagagatgtggagttcgaagccggaagagaaggattctgtggacaagagtaacaacaccagggaatatggtcggccagaagtgctgaaggaggattccctgagcagtcggcgcaggattgaacgcttttccattgcccttgatgagctgaggagtgtgtttgaggctcctaagagtggaaacaaaccagctgagtacggtggaaaggaagtggaaattgagcgaagtttgtgctcgccagcttttaagagtcaccctgggagccagctggaggattctgtgaaagattcagacaagaaaggcaaggaaacatcttttgacaagatgtcacctgaaagtggtcacagccgcatctttgaagcgactgctggccctaataagcctgagagtggatttgcagaagacagtgctgctcggggcgagggtgtgtcagacctccacgaagtggtctccctgaaggagcggatggcgaggtaccaggcagctgtttccaggggtgactgccgcagcttctctgctaatatgatggaagaatcagaaatgtgcgcagtgcctggtggtttggccaaggtgaagaaacaatttgaggacgaaattacttcttcccgtaatacctttgctcaataccaatatcaacatcagaacagatctgagcaggaggcaattcatagcagccaggttggcacttcaagaagcagccaggaaatggcaagaaatgaacaagaagggtccaaagtacagaaaattgatgttcatggaacagaaatggtctctcatcttgaaaagcacaccgaggaagtaaaccaagcatctcagtttcatcaatatgttcaagaaactgtcattgatacacctgaggatgaagagattccaaaggtttcgactaagttgttaaaagagcagtttgaaaagtctgcccaggaaaagatcctttattctgacaaagagatgacaaccccagccaagcagattaagactgaaagtgaatatgaagagactttcaagccatcatcagttgtgagtacctcttccacttcttgcgtttcaaccagccagaggaaggaaacatcaactacaagatatagtgatcacagtgtcacttcctcaactctggcacaaattaatgctacttcttcaggaatgacagaagaatttcctcctcccccacctgacgtacttcaaacttcagtagatgtgacagcattttcccagtcccctgaactgcccagtcctcctagaagactaccagtccccaaagatgtatattccaagcaaagaaatttgtatgaattaaaccgtttatataaacacatccatcctgagttaagaaaaaacttagaaaaagattatatcagtgaagtttctgagattgtttctagtcaaatgaactcagggagttcagtctcagcagatgtgcaacaagcccggtatgtttttgaaaacacaaatgacagttctcaaaaagatctgaactcagaaagagaatacttggaatgggatgaaattctgaagggagaggtgcagtccattagatggatctttgagaatcaaccattggattccatcaacaatggctctcctgatgaaggtgatatttccaggggcattgctgatcaagaaatcattgctggtggtgatgtgaaatataccacatggatgtttgaaacccaacccatcgacacacttggggcttattcttctgacactgtagaaaatgcagagaaaattcctgagctagccagaggagatgtctgcacagctcggtggatgtttgaaacaaggccattggactcaatgaataaaatgcatcaaagtcaagaagaatcagcggtaactatcagtaaggacataactgggggggatgtcaagactgtgagatacatgtttgaaactcaacatctagatcaacttggacagcttcattcagtggatgaggttcatttactgcagcttaggtctgagctcaaagaaattaagggaaatgttaaaagaagtataaaatgtttcgaaactcaaccattatatgttattagagatggttcgggccaaatgctggaaattaaaactgttcacagagaagacgttgaaaagggagatgtaagaacagcacggtggatgtttgaaacacagccgttggacacaattaacaaagatatcacagaaattaaagttgtccgaggaatatccatggaagaaaatgtcaaaggtggggtgagtaaggcaaagtggttatttgaaacccaacctttggagaaaatcaaagagtcagaagaggtcatcattgaaaaggaaaaaataataggtacagatgtctccagaaagtgttggatgtttgaaacccagccattagacattctaaaagaagttcctgatgcagattctctacaacgtgaggagataataggtggtgatgtacaaactactaagcatctatttgaaacacttccaattgaagcattaaaagacagtcctgatataggaaagcttcaaaaaatcactgcctctgaagaagaaaaaggggatgttaggcatcaaaaatggatttttgaaacccaacctctggaagacattagaaaagataaaaaggagtacacacgaacagtgaaacttgaagaagttgacagaggagatgtgaagaattacacacatatctttgaatcaaacaatttaattaaatttgatgcatcacataaaatagaggtggaaggagttacaagaggtgctgtagagttaaataaatctctcttcgagacaacaccactgtatgccattcaagatccccttggaaaatatcatcaagtaaagacagtccagcaagaagaaatcgtaagaggtgatgtaagaagctgtaggtggctttttgaaacaaggcccattgaccagtttgatgaaagcattcataaatttcaaataattagaggaatatctgctcaagaaatacagactggaaatgtgaaatctgccaaatggttgtttgaaacccaacctcttgattcaattaaatattttagtgatgtggaagaaacagaaagtaaaactgaacaaactagagatattgttaaaggggatgtcaaaacctgtaaatggctttttgagacccagccaatggagtctctttatgaaaaagtttcgttaatgaccagcagtgaagaaattcataagggagatgtcaaaacttgtacttggctctttgaaactcagccacttgataccataaaagatgactctgaaacagcagtcaaattgcaaactgtaaaacaggaggagatccaaggtggggatgttcgtacagcatgttttctttttgagacagaaaatttggacagcatacaaggagaagaagtgaaggaaatcaagcctgttgaaatggatatacaagctggagatgtttccagcatgaggtataaatttgaaaatcagtccttagattctataagttctagttcagaggaagttttgaaaaagatcaaaaccttaaaaactgaagatattcagaaaggcaatgttttaaattgtaggtggctttttgaaaaccaaccaattgataagataaaagaaagccaagaaggtgatgaatgtgttaagacggtgacagacatacaaggtggggatgtaagaaaggggtgctttatttttgagactttttctttagatgagattaaagaagaatctgactatatcagcaccaagaaaacaattactgaagaagtaatacagggtgatgtaaaaagctacagaatgctctttgaaacccagccactctatgcaattcaagaccgagaagggtcctatcatgaagtgaccacagttaaaaaagaagaggtaattcatggagatgtgcgaggaacaaggtggctttttgaaacaaagccattagactctattaataaatcagaaactgtgtatgttattaaatctgtcacacaagaagacattcagaagggagatgttagttctgtcagatacagatttgaaactcagccactggatcagatttctgaagaatcacataatattatgcccagtattgaccatatacaaggtggcaatgtaaagacaagtagacaattctttgagtctgaaaattttgataagaataactatatacgaacagtaagtgtcaatgaaatacaaaagggcaatgttaaaacatctacttggctatttgaaacccacactatggatgaactgagaggagaagggttagaatatgaaaatatcaagacagtcactcaggaagatgtgcagaaaggtgatgttaagcaggctgtgtggctttttgaaaatcgaactttcgattctattatggaagcacataaaggtatcacaaaaatgaccaaggaagaaatccctccttctgatgtcaaaacaaccacatggctctttgaaacaacaccacttcatgaatttaatgaaactagagtagaaaagatagaaattattggcaagagcattaaagaaaccttagaagatctctactctcaaaaagttatccaggctcctggaatcatcattgaagctgatgaaataggggatgttcgaatggcaaaatacaagctaatgaaccaagcatctcctgagatacagaaagaagaaattatcagggctgatctcagaaatataatggtgaacctactttccaaaagggactgtactgaaagagagattttgattagtgaagaagagaagggaaatgttaatttgactaaaactcaattattaaacagatcaactgaatttcatgctgaaaaagaagagatagtgaaaggtgatgtacaacaagcaataaaaaacctgttctctgaggaaagatctgtaaagaaaggcatcttaattcaggaagatgaaaaaggagatattaacatgactatctattgtcttcttcatgaaaatgatggtgacacaattgagcgtgaagaagtaataggtggtgatgtcaaacgtaccattcataatttattgtcttccacatcaaacaataaaatatctgaaagggctaaaattgatgcctctgagagaggaaatgttcagtttttcacaacctgcatagaagctggagctttggattatctgaaacaactccacacagagtcaaatgaaacactgacagctaagaaacaagaaggagagaaagaaatcattggtggtgatgttgaaggtacaaaactgttactgaagaaaaggcagtctctggttgaacgtactgttagtgaaactgacatcatccctggagatgtgcataacacagttaaggtttttatgaccgagcctcagagtacatttggtaagatacccaaagaagagattataaaaggtgatttgacatcaaccctaaattccctcagccaggctgtaaatcagaaaacagtgacgaaaacagaagaaattataaaaggtaacatgctagccacactcaagtcacttaaagaatcaagccatcgatggaaagaatctaaacagcctgatgccatccctggtgatattgaaaaagctattgaatgccttgaaaaagctacaaatacaaagacagaaattctgaaaaaggagcttctcaaagatgacctggaaacatcactaaggtctttgaaagaagcacaaagaagtttcaaagaggtacataaagaaggtgtaataaaaaaagatgctaaagctgtgatggcaggatcctcgggagagcagaaaacagatattcatcaggttgctgtccagaggaacaaaaatagtcttcttcagccaaagccaggtccatttgagccagcggccaagtggcaagggggagcagatactctcagtcaaactatggggaaatcttgccatggcaatttagtagaagaaagaactgaggttaatcttccaaaagcccccaaaggcactgtaaagattgtcatagatcgtgaacaaaacaatgatgctctggagaaaagccttagaagactatctaattcacaccataaatctaatgttttggaatcaggagacaaaacgggtgtctggactgatactacaggagaacagcatcttagagatgaatatatgagcagacaattaacttcaactgtgtcagttaagaataatctaacaactaaagaatcagacagggcagtgagagagctgaagaaggatgatgtctttaattccatccaatctgctggtaaaaccgttggaaagcaacagacatatgaactgagaaatgaccaccagaaaatggagggttttcatataaagagtcctaaaaagaccaaaaatattaaaatattaactgatacacaaagctccaagcccagtcccacccagcatccagtcagcatgccagttggaggaacttacgacctttcaggggactttcagaagcaaactttgttaaagcaagaaacaaaatattctaataaggatataaagaaaaagaatataaaccttcaaccaatgtggcagcttttgcctgtagagcaagacacatccaatgtaacagaaatgaaagtctctgaaaaaagtcacaatacatttaaggcaaccaacaaaaagcgggagactgatgttcacttgaaaagccaggactttctaatgaaaacaaatacttccacaggcttaaaaatggcaatggaaaggtccttgaatccaatcaactttaaccctgagaataatgtaaaagaaagtgagtgcccccttccacctccatctccacctcctccaccaccttctaatgcatcatctgaaattgaatttcctcttcctcctccacctcctttgatgatgtttcctgaaaaaaatgggtttcttccctcactgtccacagagaagataaaggctgaatttgaaagttttccaggcctccctcttcctccacctccagtagatgagaaatctgaaagagaaagttcatcgatgtttctgccgcctcctcctcctccaactccatctcaaaagccagcacatctcctttcctcctctgctccggaaaagcacagtggagacttcatgcaacaatattcccaaaaagaagcctcgaactctcagaattctcaggctaaaatcataacaggaaaaaccggtgtgttgccacctcccacattgcccaaacccaaacttcccaagcatataaaagataataagaacgatttttcccccaaagttgaactggcaacctccctgtcagatatggaatgtaaaattactacctcaaaggatcagaaaaaagtaatggtgatgaccagcagtgaacacacggagacaaagcagaacgttattagtaagagtcttgatgaaagaaaacaattatctattgactctgcaaactgtctctcacacacagttccaggaacttcagcacccaggaaaaaacagattgcgcctcttataaaatctcattcatttccagagagttcaggacaacaaaatccaaaaccttatatgagaaaatttaagacacctttaatgattgctgaagaaaaatatagacaacaaaaagaagaaattgaaaaacagaaacaggagagttcttactacaacattgttaaaactcaaagccaaaatcaacacataacagaggtggaaaaggaaatgccattacaaaaaaccaatgaggaggtttccctatctggaattgattcagaatgcactgtggttcaacccagcccaggctctcaaagtaatgctcggatactaggagtgtgttctgataaccaactctccacaacatcgccagaaacagtcgctgccaagaggctccaccatgttttagcagcttcagaagacaaagataagatgaaaaaggaagttttacaaagctcaagggacattatgcaatccaaatcagcttgcgaaattaaacaaagtcaccaagaatgtagtacccaacaaacacaacagaagaagtatttggagcagttgcacttgccccaaagcaaaccaatttccccaaatttcaaagttaaaaccatcaaacttccaactctagatcatacattaaatgaaacagaccacagctatgaaagtcataaacagcaatctgagattgatgttcaaacctttaccaaaaaacaatatctgaaaaccaagaaaactgaagcaagcactgaatgtagtcataagcaatctctggctgaaagacattatcagttacctaagaaggagaaaagagtgacagtacaattgcctacagaatccatacagaagaaccaggaagataagctcaagatggttcccaggaagcaaagagaatttagcggatctgacagagggaaacttccaggaagtgaagaaaaaaatcagggaccatcaatgattggtcgaaaagaagagagattaataactgaaagaaaacacgaacatctgaagaataaatcagcaccaaaggtcgtcaagcaaaaggttatcgatgcacatcttgattcacagactcagaattttcagcaaacacaaatacagaccgctgaaagtaaagctgaacataaaaaattgccccagccatataatagtctgcaggaagaaaaatgtctcgaagtcaagggcatacaagagaaacaagtcttctctaatactaaagattcaaagcaagagattacacagaacaaatctttcttttcctctgtgaaagaatcccagcgggatgatggaaaaggtgccttaaatatagtggaattcttgagaaaacgtgaagaactgcaacagattttgtcgagagtgaaacagtttgaagcagagccaaataaaagtggccttaaaacatttcagacactattaaatactatcccaggatggctgataagtgaagataagagagaatatgcagttcacattgccatggagaataatttagaaaaagtaaaagaagaaataacacatattaaaactcaagcggaagatatgcttgtgtcctatgaaaatataattcagacagccatgatgtcctccaaaacaggaaaaccgggaaataaacccactagtcttgatgaaacatcatccaaagtatctaatgttcatgtcagcaataataaaaatagtgaacagaaagaaaataaaattgccaaagagaaaacagtacagcaccaagtagcagctcatcatgaagcaactgttcgtagtcacgtgaaaacccatcaggaaattaaacttgatgatagcaacattcctcctccctctttaaaaacacgcccaccgtcaccaacttttatcacaatagaatctactgcccgacgaacagaaaaccctactaagaacgagctttctcagtcccctaaaaaggacagttatgttgaacccccaccaagaaggcccatgtcgcaaaaatctgaaattcacagagcaaacacttccccttctccacccaggagtcgctctgaacaacttgtcagactcaaagacaccactgcaaagttatccaaaggggccatcccatgtccagcagcaaccccggttccaattgtagagaagaggtctgaaatcatcatgtctcctgcaacacttcgtcgtcaaattaagatagaaactcgtggtagggactctccacctacaatcacaataccagtaaatataaatcatgctgctagtggttccttcagagaatctgtggacgctcaagaggaaatcaggaaagtggagaagagagctacttatgttcataaagatggactaaattccactgatcacatggtgcccgacactgaaagttatgatgcagttgaaatcatccgcaaggttgcagtgcctcctcgcctgtcagagcacacacagagatatgaagcggccaaccgaactgttcaaatggctgaaaatttcgtgaatgaccctgaaaatgaaataaacagatggttcagggaatttgagcatggcccagtttctgaagcaaagtcaaatagaagagtttatgcaaagggagaaacaaaccataacatacaacaagaaagtcgtacattttgtaaggaggaatttggattaacatctttaggaaacacgagttttacagacttttcttgcaaacatcctagagaactgcgagaaaagattcctgttaagcagcccaggatctgctctgaaaccaggtctctaagtgaacatttctcaggcatggatgcatttgagagtcaaattgttgagtcgaagatgaaaacctcttcatcacatagctcagaagctggcaaatctggctgtgacttcaagcatgccccaccaacctatgaggatgtcattgctggacatattttagatatctctgattcacctaaagaagtaagaaaaaattttcaaaagacgtggcaagagagtggaagagtttttaaaggcctgggatatgcaaccgcagatgcttctgcaactgagatgagaaccaccttccaagaggaatctgcatttataagtgaagctgctgctccaagacaaggaaatatgtatactttgtcaaaagacagtttatccaatggagtgcctagtggcagacaagcagaattttcataagtcctgcttccgatgccaccattgcaacagtaaactaagtttgggaaattatgcatcacttcatggacaaatatactgtaaacctcactttaaacaacttttcaaatccaaaggaaattatgatgaaggttttggacataagcagcataaagatagatggaactgcaaaaaccaaagcagatcagtggactttattcctaatgaagaaccaaatatgtgtaaaaatattgcagaaaacacccttgtacctggagatcgtaatgaacatttagatgctggtaacagtgaagggcaaaggaatgatttgagaaaattaggggaaaggggaaaattaaaagtcatttggcctccttccaaggagatccctaagaaaaccttaccctttgaggaagagctcaaaatgagtaaacctaagtggccacctgaaatgacaaccctgctatcccctgaatttaaaagtgaatctctgctagaagatgttagaactccagaaaataaaggacaaagacaagatcactttccatttttgcagccttatctacagtccacccatgtttgtcagaaagaggatgttataggaatcaaagaaatgaaaatgcctgaaggaagaaaagatgaaaagaaggaaggaaggaagaatgtgcaagataggccgagtgaagctgaagacacaaagagtaacaggaaaagtgctatggatcttaatgacaacaataatgtgattgtgcagagtgctgaaaaggagaaaaatgaaaaaactaaccaaactaatggtgcagaagttttacaggttactaacactgatgatgagatgatgccagaaaatcataaagaaaatttgaataagaataataataacaattatgtagcagtctcatatctgaataattgcaggcagaagacatctattttagaatttcttgatctattacccttgtcgagtgaagcaaatgacactgcaaatgaatatgaaattgagaagttagaaaatacatctagaatctcagagttacttggtatatttgaatctgaaaagacttattcgaggaatgtactagcaatggctctgaagaaacagactgacagagcagctgctggcagtcctgtgcagcctgctccaaaaccaagcctcagcagaggccttatggtaaaggggggaagttcaatcatctctcctgatacaaatctcttaaacattaaaggaagccattcaaagagcaaaaatttacactttttcttttctaacaccgtgaaaatcactgcattttccaagaaaaatgagaacattttcaattgtgatttaatagattctgtagatcaaattaaaaatatgccatgcttggatttaagggaatttggaaaggatgttaaaccttggcatgttgaaacaacagaagctgcccgcaataatgaaaacacaggttttgatgctctgagccatgaatgtacagctaagcctttgtttcccagagtggaggtgcagtcagaacaactcacggtggaagagcagattaaaagaaacaggtgctacagtgacactgagtaaaatatctatggccactgacagtccacacttaggcactgagagatattgatgttctgaaataagattttatgaatttggatacccttttgaggaacttgatgtaaacatggtgttcagaaatctcgtgtctatctcaatgggatatttcttgtattacaccttgtcatttttttcacaatttatttacatctacttttgtttgaactggaatgaagagatgaaacactatggatatgttttccattcaaatggcactttagcatattgttctgttttcctgtaaaacatcatgggtgtgatttttatactgctgctgcttgtcacaattattataacttctctgtaatttcctctgaaataaaattgaatcacctgaggtgcaaacc

SEQ ID NO: 243133 - DNA, 12675 bp, Artificial Sequence
  derived and/or modified sequence
ggagaaatctggcaggtctctaggcagacaaaagggaacatctggtagggactgggacatgtagaaaaaaggacaacctggacccatccatgttcccaatgcagaagggctccctcaacctcctgaggcagaaatgggaatcttgtgattatcagagaagtgagtgtcatcccagggacagccattgtacaattttccagcctcaggaaagcaaattgcttgcgcctgaaggagaggtagtatcagcacctcaatctttggatcccacaagtctgccctacagtacaggggaagagatgtggagttcgaagccggaagagaaggattctgtggacaagagtaacaacaccagggaatatggtcggccagaagtgctgaaggaggattccctgagcagtcggcgcaggattgaacgcttttccattgcccttgatgagctgaggagtgtgtttgaggctcctaagagtggaaacaaaccagctgagtacggtggaaaggaagtggaaattgagcgaagtttgtgctcgccagcttttaagagtcaccctgggagccagctggaggattctgtgaaagattcagacaagaaaggcaaggaaacatcttttgacaagatgtcacctgaaagtggtcacagccgcatctttgaagcgactgctggccctaataagcctgagagtggatttgcagaagacagtgctgctcggggcgagggtgtgtcagacctccacgaagtggtctccctgaaggagcggatggcgaggtaccaggcagctgtttccaggggtgactgccgcagcttctctgctaatatgatggaagaatcagaaatgtgcgcagtgcctggtggtttggccaaggtgaagaaacaatttgaggacgaaattacttcttcccgtaatacctttgctcaataccaatatcaacatcagaacagatctgagcaggaggcaattcatagcagccaggttggcacttcaagaagcagccaggaaatggcaagaaatgaacaagaagggtccaaagtacagaaaattgatgttcatggaacagaaatggtctctcatcttgaaaagcacaccgaggaagtaaaccaagcatctcagtttcatcaatatgttcaagaaactgtcattgatacacctgaggatgaagagattccaaaggtttcgactaagttgttaaaagagcagtttgaaaagtctgcccaggaaaagatcctttattctgacaaagagatgacaaccccagccaagcagattaagactgaaagtgaatatgaagagactttcaagccatcatcagttgtgagtacctcttccacttcttgcgtttcaaccagccagaggaaggaaacatcaactacaagatatagtgatcacagtgtcacttcctcaactctggcacaaattaatgctacttcttcaggaatgacagaagaatttcctcctcccccacctgacgtacttcaaacttcagtagatgtgacagcattttcccagtcccctgaactgcccagtcctcctagaagactaccagtccccaaagatgtatattccaagcaaagaaatttgtatgaattaaaccgtttatataaacacatccatcctgagttaagaaaaaacttagaaaaagattatatcagtgaagtttctgagattgtttctagtcaaatgaactcagggagttcagtctcagcagatgtgcaacaagcccggtatgtttttgaaaacacaaatgacagttctcaaaaagatctgaactcagaaagagaatacttggaatgggatgaaattctgaagggagaggtgcagtccattagatggatctttgagaatcaaccattggattccatcaacaatggctctcctgatgaaggtgatatttccaggggcattgctgatcaagaaatcattgctggtggtgatgtgaaatataccacatggatgtttgaaacccaacccatcgacacacttggggcttattcttctgacactgtagaaaatgcagagaaaattcctgagctagccagaggagatgtctgcacagctcggtggatgtttgaaacaaggccattggactcaatgaataaaatgcatcaaagtcaagaagaatcagcggtaactatcagtaaggacataactgggggggatgtcaagactgtgagatacatgtttgaaactcaacatctagatcaacttggacagcttcattcagtggatgaggttcatttactgcagcttaggtctgagctcaaagaaattaagggaaatgttaaaagaagtataaaatgtttcgaaactcaaccattatatgttattagagatggttcgggccaaatgctggaaattaaaactgttcacagagaagacgttgaaaagggagatgtaagaacagcacggtggatgtttgaaacacagccgttggacacaattaacaaagatatcacagaaattaaagttgtccgaggaatatccatggaagaaaatgtcaaaggtggggtgagtaaggcaaagtggttatttgaaacccaacctttggagaaaatcaaagagtcagaagaggtcatcattgaaaaggaaaaaataataggtacagatgtctccagaaagtgttggatgtttgaaacccagccattagacattctaaaagaagttcctgatgcagattctctacaacgtgaggagataataggtggtgatgtacaaactactaagcatctatttgaaacacttccaattgaagcattaaaagacagtcctgatataggaaagcttcaaaaaatcactgcctctgaagaagaaaaaggggatgttaggcatcaaaaatggatttttgaaacccaacctctggaagacattagaaaagataaaaaggagtacacacgaacagtgaaacttgaagaagttgacagaggagatgtgaagaattacacacatatctttgaatcaaacaatttaattaaatttgatgcatcacataaaatagaggtggaaggagttacaagaggtgctgtagagttaaataaatctctcttcgagacaacaccactgtatgccattcaagatccccttggaaaatatcatcaagtaaagacagtccagcaagaagaaatcgtaagaggtgatgtaagaagctgtaggtggctttttgaaacaaggcccattgaccagtttgatgaaagcattcataaatttcaaataattagaggaatatctgctcaagaaatacagactggaaatgtgaaatctgccaaatggttgtttgaaacccaacctcttgattcaattaaatattttagtgatgtggaagaaacagaaagtaaaactgaacaaactagagatattgttaaaggggatgtcaaaacctgtaaatggctttttgagacccagccaatggagtctctttatgaaaaagtttcgttaatgaccagcagtgaagaaattcataagggagatgtcaaaacttgtacttggctctttgaaactcagccacttgataccataaaagatgactctgaaacagcagtcaaattgcaaactgtaaaacaggaggagatccaaggtggggatgttcgtacagcatgttttctttttgagacagaaaatttggacagcatacaaggagaagaagtgaaggaaatcaagcctgttgaaatggatatacaagctggagatgtttccagcatgaggtataaatttgaaaatcagtccttagattctataagttctagttcagaggaagttttgaaaaagatcaaaaccttaaaaactgaagatattcagaaaggcaatgttttaaattgtaggtggctttttgaaaaccaaccaattgataagataaaagaaagccaagaaggtgatgaatgtgttaagacggtgacagacatacaaggtggggatgtaagaaaggggtgctttatttttgagactttttctttagatgagattaaagaagaatctgactatatcagcaccaagaaaacaattactgaagaagtaatacagggtgatgtaaaaagctacagaatgctctttgaaacccagccactctatgcaattcaagaccgagaagggtcctatcatgaagtgaccacagttaaaaaagaagaggtaattcatggagatgtgcgaggaacaaggtggctttttgaaacaaagccattagactctattaataaatcagaaactgtgtatgttattaaatctgtcacacaagaagacattcagaagggagatgttagttctgtcagatacagatttgaaactcagccactggatcagatttctgaagaatcacataatattatgcccagtattgaccatatacaaggtggcaatgtaaagacaagtagacaattctttgagtctgaaaattttgataagaataactatatacgaacagtaagtgtcaatgaaatacaaaagggcaatgttaaaacatctacttggctatttgaaacccacactatggatgaactgagaggagaagggttagaatatgaaaatatcaagacagtcactcaggaagatgtgcagaaaggtgatgttaagcaggctgtgtggctttttgaaaatcgaactttcgattctattatggaagcacataaaggtatcacaaaaatgaccaaggaagaaatccctccttctgatgtcaaaacaaccacatggctctttgaaacaacaccacttcatgaatttaatgaaactagagtagaaaagatagaaattattggcaagagcattaaagaaaccttagaagatctctactctcaaaaagttatccaggctcctggaatcatcattgaagctgatgaaataggggatgttcgaatggcaaaatacaagctaatgaaccaagcatctcctgagatacagaaagaagaaattatcagggctgatctcagaaatataatggtgaacctactttccaaaagggactgtactgaaagagagattttgattagtgaagaagagaagggaaatgttaatttgactaaaactcaattattaaacagatcaactgaatttcatgctgaaaaagaagagatagtgaaaggtgatgtacaacaagcaataaaaaacctgttctctgaggaaagatctgtaaagaaaggcatcttaattcaggaagatgaaaaaggagatattaacatgactatctattgtcttcttcatgaaaatgatggtgacacaattgagcgtgaagaagtaataggtggtgatgtcaaacgtaccattcataatttattgtcttccacatcaaacaataaaatatctgaaagggctaaaattgatgcctctgagagaggaaatgttcagtttttcacaacctgcatagaagctggagctttggattatctgaaacaactccacacagagtcaaatgaaacactgacagctaagaaacaagaaggagagaaagaaatcattggtggtgatgttgaaggtacaaaactgttactgaagaaaaggcagtctctggttgaacgtactgttagtgaaactgacatcatccctggagatgtgcataacacagttaaggtttttatgaccgagcctcagagtacatttggtaagatacccaaagaagagattataaaaggtgatttgacatcaaccctaaattccctcagccaggctgtaaatcagaaaacagtgacgaaaacagaagaaattataaaaggtaacatgctagccacactcaagtcacttaaagaatcaagccatcgatggaaagaatctaaacagcctgatgccatccctggtgatattgaaaaagctattgaatgccttgaaaaagctacaaatacaaagacagaaattctgaaaaaggagcttctcaaagatgacctggaaacatcactaaggtctttgaaagaagcacaaagaagtttcaaagaggtacataaagaaggtgtaataaaaaaagatgctaaagctgtgatggcaggatcctcgggagagcagaaaacagatattcatcaggttgctgtccagaggaacaaaaatagtcttcttcagccaaagccaggtccatttgagccagcggccaagtggcaagggggagcagatactctcagtcaaactatggggaaatcttgccatggcaatttagtagaagaaagaactgaggttaatcttccaaaagcccccaaaggcactgtaaagattgtcatagatcgtgaacaaaacaatgatgctctggagaaaagccttagaagactatctaattcacaccataaatctaatgttttggaatcaggagacaaaacgggtgtctggactgatactacaggagaacagcatcttagagatgaatatatgagcagacaattaacttcaactgtgtcagttaagaataatctaacaactaaagaatcagacagggcagtgagagagctgaagaaggatgatgtctttaattccatccaatctgctggtaaaaccgttggaaagcaacagacatatgaactgagaaatgaccaccagaaaatggagggttttcatataaagagtcctaaaaagaccaaaaatattaaaatattaactgatacacaaagctccaagcccagtcccacccagcatccagtcagcatgccagttggaggaacttacgacctttcaggggactttcagaagcaaactttgttaaagcaagaaacaaaatattctaataaggatataaagaaaaagaatataaaccttcaaccaatgtggcagcttttgcctgtagagcaagacacatccaatgtaacagaaatgaaagtctctgaaaaaagtcacaatacatttaaggcaaccaacaaaaagcgggagactgatgttcacttgaaaagccaggactttctaatgaaaacaaatacttccacaggcttaaaaatggcaatggaaaggtccttgaatccaatcaactttaaccctgagaataatgtaaaagaaagtgagtgcccccttccacctccatctccacctcctccaccaccttctaatgcatcatctgaaattgaatttcctcttcctcctccacctcctttgatgatgtttcctgaaaaaaatgggtttcttccctcactgtccacagagaagataaaggctgaatttgaaagttttccaggcctccctcttcctccacctccagtagatgagaaatctgaaagagaaagttcatcgatgtttctgccgcctcctcctcctccaactccatctcaaaagccagcacatctcctttcctcctctgctccggaaaagcacagtggagacttcatgcaacaatattcccaaaaagaagcctcgaactctcagaattctcaggctaaaatcataacaggaaaaaccggtgtgttgccacctcccacattgcccaaacccaaacttcccaagcatataaaagataataagaacgatttttcccccaaagttgaactggcaacctccctgtcagatatggaatgtaaaattactacctcaaaggatcagaaaaaagtaatggtgatgaccagcagtgaacacacggagacaaagcagaacgttattagtaagagtcttgatgaaagaaaacaattatctattgactctgcaaactgtctctcacacacagttccaggaacttcagcacccaggaaaaaacagattgcgcctcttataaaatctcattcatttccagagagttcaggacaacaaaatccaaaaccttatatgagaaaatttaagacacctttaatgattgctgaagaaaaatatagacaacaaaaagaagaaattgaaaaacagaaacaggagagttcttactacaacattgttaaaactcaaagccaaaatcaacacataacagaggtggaaaaggaaatgccattacaaaaaaccaatgaggaggtttccctatctggaattgattcagaatgcactgtggttcaacccagcccaggctctcaaagtaatgctcggatactaggagtgtgttctgataaccaactctccacaacatcgccagaaacagtcgctgccaagaggctccaccatgttttagcagcttcagaagacaaagataagatgaaaaaggaagttttacaaagctcaagggacattatgcaatccaaatcagcttgcgaaattaaacaaagtcaccaagaatgtagtacccaacaaacacaacagaagaagtatttggagcagttgcacttgccccaaagcaaaccaatttccccaaatttcaaagttaaaaccatcaaacttccaactctagatcatacattaaatgaaacagaccacagctatgaaagtcataaacagcaatctgagattgatgttcaaacctttaccaaaaaacaatatctgaaaaccaagaaaactgaagcaagcactgaatgtagtcataagcaatctctggctgaaagacattatcagttacctaagaaggagaaaagagtgacagtacaattgcctacagaatccatacagaagaaccaggaagataagctcaagatggttcccaggaagcaaagagaatttagcggatctgacagagggaaacttccaggaagtgaagaaaaaaatcagggaccatcaatgattggtcgaaaagaagagagattaataactgaaagaaaacacgaacatctgaagaataaatcagcaccaaaggtcgtcaagcaaaaggttatcgatgcacatcttgattcacagactcagaattttcagcaaacacaaatacagaccgctgaaagtaaagctgaacataaaaaattgccccagccatataatagtctgcaggaagaaaaatgtctcgaagtcaagggcatacaagagaaacaagtcttctctaatactaaagattcaaagcaagagattacacagaacaaatctttcttttcctctgtgaaagaatcccagcgggatgatggaaaaggtgccttaaatatagtggaattcttgagaaaacgtgaagaactgcaacagattttgtcgagagtgaaacagtttgaagcagagccaaataaaagtggccttaaaacatttcagacactattaaatactatcccaggatggctgataagtgaagataagagagaatatgcagttcacattgccatggagaataatttagaaaaagtaaaagaagaaataacacatattaaaactcaagcggaagatatgcttgtgtcctatgaaaatataattcagacagccatgatgtcctccaaaacaggaaaaccgggaaataaacccactagtcttgatgaaacatcatccaaagtatctaatgttcatgtcagcaataataaaaatagtgaacagaaagaaaataaaattgccaaagagaaaacagtacagcaccaagtagcagctcatcatgaagcaactgttcgtagtcacgtgaaaacccatcaggaaattaaacttgatgatagcaacattcctcctccctctttaaaaacacgcccaccgtcaccaacttttatcacaatagaatctactgcccgacgaacagaaaaccctactaagaacgagctttctcagtcccctaaaaaggacagttatgttgaacccccaccaagaaggcccatgtcgcaaaaatctgaaattcacagagcaaacacttccccttctccacccaggagtcgctctgaacaacttgtcagactcaaagacaccactgcaaagttatccaaaggggccatcccatgtccagcagcaaccccggttccaattgtagagaagaggtctgaaatcatcatgtctcctgcaacacttcgtcgtcaaattaagatagaaactcgtggtagggactctccacctacaatcacaataccagtaaatataaatcatgctgctagtggttccttcagagaatctgtggacgctcaagaggaaatcaggaaagtggagaagagagctacttatgttcataaagatggactaaattccactgatcacatggtgcccgacactgaaagttatgatgcagttgaaatcatccgcaaggttgcagtgcctcctcgcctgtcagagcacacacagagatatgaagcggccaaccgaactgttcaaatggctgaaaatttcgtgaatgaccctgaaaatgaaataaacagatggttcagggaatttgagcatggcccagtttctgaagcaaagtcaaatagaagagtttatgcaaagggagaaacaaaccataacatacaacaagaaagtcgtacattttgtaaggaggaatttggattaacatctttaggaaacacgagttttacagacttttcttgcaaacatcctagagaactgcgagaaaagattcctgttaagcagcccaggatctgctctgaaaccaggtctctaagtgaacatttctcaggcatggatgcatttgagagtcaaattgttgagtcgaagatgaaaacctcttcatcacatagctcagaagctggcaaatctggctgtgacttcaagcatgccccaccaacctatgaggatgtcattgctggacatattttagatatctctgattcacctaaagaagtaagaaaaaattttcaaaagacgtggcaagagagtggaagagtttttaaaggcctgggatatgcaaccgcagatgcttctgcaactgagatgagaaccaccttccaagaggaatctgcatttataagtgaagctgctgctccaagacaaggaaatatgtatactttgtcaaaagacagtttatccaatggagtgcctagtggcagacaagcagaattttcataagtcctgcttccgatgccaccattgcaacagtaaactaagtttgggaaattatgcatcacttcatggacaaatatactgtaaacctcactttaaacaacttttcaaatccaaaggaaattatgatgaaggttttggacataagcagcataaagatagatggaactgcaaaaaccaaagcagatcagtggactttattcctaatgaagaaccaaatatgtgtaaaaatattgcagaaaacacccttgtacctggagatcgtaatgaacatttagatgctggtaacagtgaagggcaaaggaatgatttgagaaaattaggggaaaggggaaaattaaaagtcatttggcctccttccaaggagatccctaagaaaaccttaccctttgaggaagagctcaaaatgagtaaacctaagtggccacctgaaatgacaaccctgctatcccctgaatttaaaagtgaatctctgctagaagatgttagaactccagaaaataaaggacaaagacaagatcactttccatttttgcagccttatctacagtccacccatgtttgtcagaaagaggatgttataggaatcaaagaaatgaaaatgcctgaaggaagaaaagatgaaaagaaggaaggaaggaagaatgtgcaagataggccgagtgaagctgaagacacaaagagtaacaggaaaagtgctatggatcttaatgacaacaataatgtgattgtgcagagtgctgaaaaggagaaaaatgaaaaaactaaccaaactaatggtgcagaagttttacaggttactaacactgatgatgagatgatgccagaaaatcataaagaaaatttgaataagaataataataacaattatgtagcagtctcatatctgaataattgcaggcagaagacatctattttagaatttcttgatctattacccttgtcgagtgaagcaaatgacactgcaaatgaatatgaaattgagaagttagaaaatacatctagaatctcagagttacttggtatatttgaatctgaaaagacttattcgaggaatgtactagcaatggctctgaagaaacagactgacagagcagctgctggcagtcctgtgcagcctgctccaaaaccaagcctcagcagaggccttatggtaaaggggggaagttcaatcatctctcctgatacaaatctcttaaacattaaaggaagccattcaaagagcaaaaatttacactttttcttttctaacaccgtgaaaatcactgcattttccaagaaaaatgagaacattttcaattgtgatttaatagattctgtagatcaaattaaaaatatgccatgcttggatttaagggaatttggaaaggatgttaaaccttggcatgttgaaacaacagaagctgcccgcaataatgaaaacacaggttttgatgctctgagccatgaatgtacagctaagcctttgtttcccagagtggaggtgcagtcagaacaactcacggtggaagagcagattaaaagaaacaggtgctacagtgacactgagtaaaatatctatggccactgacagtccacacttaggcactgagagatattgatgttctgaaataagattttatgaatttggatacccttttgaggaacttgatgtaaacatggtgttcagaaatctcgtgtctatctcaatgggatatttcttgtattacaccttgtcatttttttcacaatttatttacatctacttttgtttgaactggaatgaagagatgaaacactatggatatgttttccattcaaatggcactttagcatattgttctgttttcctgtaaaacatcatgggtgtgatttttatactgctgctgcttgtcacaattattataacttctctgtaatttcctctgaaataaaattgaatcacctgaggtgcaaaccaaaa

SEQ ID NO: 243134 - DNA, 12269 bp, Artificial Sequence
  derived and/or modified sequence
atacagagctcagttcctaaaaataggtgccaagttgcatcctttagacgctctgctaaaataaattcagccgtcccatctacttgcttgatagacccttcagtggagcgggcctccactgcacccattgctttcaggggactgggaaattggctgtacatgaaacaagggaggaagctagtctgtgaagaactataaagatatatgatatttccacaaacttggggttaaacctaaatatcataaaagcgactgctggccctaataagcctgagagtggatttgcagaagacagtgctgctcggggcgagggtgtgtcagacctccacgaagtggtctccctgaaggagcggatggcgaggtaccaggcagctgtttccaggggtgactgccgcagcttctctgctaatatgatggaagaatcagaaatgtgcgcagtgcctggtggtttggccaaggtgaagaaacaatttgaggacgaaattacttcttcccgtaatacctttgctcaataccaatatcaacatcagaacagatctgagcaggaggcaattcatagcagccaggttggcacttcaagaagcagccaggaaatggcaagaaatgaacaagaagggtccaaagtacagaaaattgatgttcatggaacagaaatggtctctcatcttgaaaagcacaccgaggaagtaaaccaagcatctcagtttcatcaatatgttcaagaaactgtcattgatacacctgaggatgaagagattccaaaggtttcgactaagttgttaaaagagcagtttgaaaagtctgcccaggaaaagatcctttattctgacaaagagatgacaaccccagccaagcagattaagactgaaagtgaatatgaagagactttcaagccatcatcagttgtgagtacctcttccacttcttgcgtttcaaccagccagaggaaggaaacatcaactacaagatatagtgatcacagtgtcacttcctcaactctggcacaaattaatgctacttcttcaggaatgacagaagaatttcctcctcccccacctgacgtacttcaaacttcagtagatgtgacagcattttcccagtcccctgaactgcccagtcctcctagaagactaccagtccccaaagatgtatattccaagcaaagaaatttgtatgaattaaaccgtttatataaacacatccatcctgagttaagaaaaaacttagaaaaagattatatcagtgaagtttctgagattgtttctagtcaaatgaactcagggagttcagtctcagcagatgtgcaacaagcccggtatgtttttgaaaacacaaatgacagttctcaaaaagatctgaactcagaaagagaatacttggaatgggatgaaattctgaagggagaggtgcagtccattagatggatctttgagaatcaaccattggattccatcaacaatggctctcctgatgaaggtgatatttccaggggcattgctgatcaagaaatcattgctggtggtgatgtgaaatataccacatggatgtttgaaacccaacccatcgacacacttggggcttattcttctgacactgtagaaaatgcagagaaaattcctgagctagccagaggagatgtctgcacagctcggtggatgtttgaaacaaggccattggactcaatgaataaaatgcatcaaagtcaagaagaatcagcggtaactatcagtaaggacataactgggggggatgtcaagactgtgagatacatgtttgaaactcaacatctagatcaacttggacagcttcattcagtggatgaggttcatttactgcagcttaggtctgagctcaaagaaattaagggaaatgttaaaagaagtataaaatgtttcgaaactcaaccattatatgttattagagatggttcgggccaaatgctggaaattaaaactgttcacagagaagacgttgaaaagggagatgtaagaacagcacggtggatgtttgaaacacagccgttggacacaattaacaaagatatcacagaaattaaagttgtccgaggaatatccatggaagaaaatgtcaaaggtggggtgagtaaggcaaagtggttatttgaaacccaacctttggagaaaatcaaagagtcagaagaggtcatcattgaaaaggaaaaaataataggtacagatgtctccagaaagtgttggatgtttgaaacccagccattagacattctaaaagaagttcctgatgcagattctctacaacgtgaggagataataggtggtgatgtacaaactactaagcatctatttgaaacacttccaattgaagcattaaaagacagtcctgatataggaaagcttcaaaaaatcactgcctctgaagaagaaaaaggggatgttaggcatcaaaaatggatttttgaaacccaacctctggaagacattagaaaagataaaaaggagtacacacgaacagtgaaacttgaagaagttgacagaggagatgtgaagaattacacacatatctttgaatcaaacaatttaattaaatttgatgcatcacataaaatagaggtggaaggagttacaagaggtgctgtagagttaaataaatctctcttcgagacaacaccactgtatgccattcaagatccccttggaaaatatcatcaagtaaagacagtccagcaagaagaaatcgtaagaggtgatgtaagaagctgtaggtggctttttgaaacaaggcccattgaccagtttgatgaaagcattcataaatttcaaataattagaggaatatctgctcaagaaatacagactggaaatgtgaaatctgccaaatggttgtttgaaacccaacctcttgattcaattaaatattttagtgatgtggaagaaacagaaagtaaaactgaacaaactagagatattgttaaaggggatgtcaaaacctgtaaatggctttttgagacccagccaatggagtctctttatgaaaaagtttcgttaatgaccagcagtgaagaaattcataagggagatgtcaaaacttgtacttggctctttgaaactcagccacttgataccataaaagatgactctgaaacagcagtcaaattgcaaactgtaaaacaggaggagatccaaggtggggatgttcgtacagcatgttttctttttgagacagaaaatttggacagcatacaaggagaagaagtgaaggaaatcaagcctgttgaaatggatatacaagctggagatgtttccagcatgaggtataaatttgaaaatcagtccttagattctataagttctagttcagaggaagttttgaaaaagatcaaaaccttaaaaactgaagatattcagaaaggcaatgttttaaattgtaggtggctttttgaaaaccaaccaattgataagataaaagaaagccaagaaggtgatgaatgtgttaagacggtgacagacatacaaggtggggatgtaagaaaggggtgctttatttttgagactttttctttagatgagattaaagaagaatctgactatatcagcaccaagaaaacaattactgaagaagtaatacagggtgatgtaaaaagctacagaatgctctttgaaacccagccactctatgcaattcaagaccgagaagggtcctatcatgaagtgaccacagttaaaaaagaagaggtaattcatggagatgtgcgaggaacaaggtggctttttgaaacaaagccattagactctattaataaatcagaaactgtgtatgttattaaatctgtcacacaagaagacattcagaagggagatgttagttctgtcagatacagatttgaaactcagccactggatcagatttctgaagaatcacataatattatgcccagtattgaccatatacaaggtggcaatgtaaagacaagtagacaattctttgagtctgaaaattttgataagaataactatatacgaacagtaagtgtcaatgaaatacaaaagggcaatgttaaaacatctacttggctatttgaaacccacactatggatgaactgagaggagaagggttagaatatgaaaatatcaagacagtcactcaggaagatgtgcagaaaggtgatgttaagcaggctgtgtggctttttgaaaatcgaactttcgattctattatggaagcacataaaggtatcacaaaaatgaccaaggaagaaatccctccttctgatgtcaaaacaaccacatggctctttgaaacaacaccacttcatgaatttaatgaaactagagtagaaaagatagaaattattggcaagagcattaaagaaaccttagaagatctctactctcaaaaagttatccaggctcctggaatcatcattgaagctgatgaaataggggatgttcgaatggcaaaatacaagctaatgaaccaagcatctcctgagatacagaaagaagaaattatcagggctgatctcagaaatataatggtgaacctactttccaaaagggactgtactgaaagagagattttgattagtgaagaagagaagggaaatgttaatttgactaaaactcaattattaaacagatcaactgaatttcatgctgaaaaagaagagatagtgaaaggtgatgtacaacaagcaataaaaaacctgttctctgaggaaagatctgtaaagaaaggcatcttaattcaggaagatgaaaaaggagatattaacatgactatctattgtcttcttcatgaaaatgatggtgacacaattgagcgtgaagaagtaataggtggtgatgtcaaacgtaccattcataatttattgtcttccacatcaaacaataaaatatctgaaagggctaaaattgatgcctctgagagaggaaatgttcagtttttcacaacctgcatagaagctggagctttggattatctgaaacaactccacacagagtcaaatgaaacactgacagctaagaaacaagaaggagagaaagaaatcattggtggtgatgttgaaggtacaaaactgttactgaagaaaaggcagtctctggttgaacgtactgttagtgaaactgacatcatccctggagatgtgcataacacagttaaggtttttatgaccgagcctcagagtacatttggtaagatacccaaagaagagattataaaaggtgatttgacatcaaccctaaattccctcagccaggctgtaaatcagaaaacagtgacgaaaacagaagaaattataaaaggtaacatgctagccacactcaagtcacttaaagaatcaagccatcgatggaaagaatctaaacagcctgatgccatccctggtgatattgaaaaagctattgaatgccttgaaaaagctacaaatacaaagacagaaattctgaaaaaggagcttctcaaagatgacctggaaacatcactaaggtctttgaaagaagcacaaagaagtttcaaagaggtacataaagaaggtgtaataaaaaaagatgctaaagctgtgatggcaggatcctcgggagagcagaaaacagatattcatcaggttgctgtccagaggaacaaaaatagtcttcttcagccaaagccaggtccatttgagccagcggccaagtggcaagggggagcagatactctcagtcaaactatggggaaatcttgccatggcaatttagtagaagaaagaactgaggttaatcttccaaaagcccccaaaggcactgtaaagattgtcatagatcgtgaacaaaacaatgatgctctggagaaaagccttagaagactatctaattcacaccataaatctaatgttttggaatcaggagacaaaacgggtgtctggactgatactacaggagaacagcatcttagagatgaatatatgagcagacaattaacttcaactgtgtcagttaagaataatctaacaactaaagaatcagacagggcagtgagagagctgaagaaggatgatgtctttaattccatccaatctgctggtaaaaccgttggaaagcaacagacatatgaactgagaaatgaccaccagaaaatggagggttttcatataaagagtcctaaaaagaccaaaaatattaaaatattaactgatacacaaagctccaagcccagtcccacccagcatccagtcagcatgccagttggaggaacttacgacctttcaggggactttcagaagcaaactttgttaaagcaagaaacaaaatattctaataaggatataaagaaaaagaatataaaccttcaaccaatgtggcagcttttgcctgtagagcaagacacatccaatgtaacagaaatgaaagtctctgaaaaaagtcacaatacatttaaggcaaccaacaaaaagcgggagactgatgttcacttgaaaagccaggactttctaatgaaaacaaatacttccacaggcttaaaaatggcaatggaaaggtccttgaatccaatcaactttaaccctgagaataatgtaaaagaaagtgagtgcccccttccacctccatctccacctcctccaccaccttctaatgcatcatctgaaattgaatttcctcttcctcctccacctcctttgatgatgtttcctgaaaaaaatgggtttcttccctcactgtccacagagaagataaaggctgaatttgaaagttttccaggcctccctcttcctccacctccagtagatgagaaatctgaaagagaaagttcatcgatgtttctgccgcctcctcctcctccaactccatctcaaaagccagcacatctcctttcctcctctgctccggaaaagcacagtggagacttcatgcaacaatattcccaaaaagaagcctcgaactctcagaattctcaggctaaaatcataacaggaaaaaccggtgtgttgccacctcccacattgcccaaacccaaacttcccaagcatataaaagataataagaacgatttttcccccaaagttgaactggcaacctccctgtcagatatggaatgtaaaattactacctcaaaggatcagaaaaaagtaatggtgatgaccagcagtgaacacacggagacaaagcagaacgttattagtaagagtcttgatgaaagaaaacaattatctattgactctgcaaactgtctctcacacacagttccaggaacttcagcacccaggaaaaaacagattgcgcctcttataaaatctcattcatttccagagagttcaggacaacaaaatccaaaaccttatatgagaaaatttaagacacctttaatgattgctgaagaaaaatatagacaacaaaaagaagaaattgaaaaacagaaacaggagagttcttactacaacattgttaaaactcaaagccaaaatcaacacataacagaggtggaaaaggaaatgccattacaaaaaaccaatgaggaggtttccctatctggaattgattcagaatgcactgtggttcaacccagcccaggctctcaaagtaatgctcggatactaggagtgtgttctgataaccaactctccacaacatcgccagaaacagtcgctgccaagaggctccaccatgttttagcagcttcagaagacaaagataagatgaaaaaggaagttttacaaagctcaagggacattatgcaatccaaatcagcttgcgaaattaaacaaagtcaccaagaatgtagtacccaacaaacacaacagaagaagtatttggagcagttgcacttgccccaaagcaaaccaatttccccaaatttcaaagttaaaaccatcaaacttccaactctagatcatacattaaatgaaacagaccacagctatgaaagtcataaacagcaatctgagattgatgttcaaacctttaccaaaaaacaatatctgaaaaccaagaaaactgaagcaagcactgaatgtagtcataagcaatctctggctgaaagacattatcagttacctaagaaggagaaaagagtgacagtacaattgcctacagaatccatacagaagaaccaggaagataagctcaagatggttcccaggaagcaaagagaatttagcggatctgacagagggaaacttccaggaagtgaagaaaaaaatcagggaccatcaatgattggtcgaaaagaagagagattaataactgaaagaaaacacgaacatctgaagaataaatcagcaccaaaggtcgtcaagcaaaaggttatcgatgcacatcttgattcacagactcagaattttcagcaaacacaaatacagaccgctgaaagtaaagctgaacataaaaaattgccccagccatataatagtctgcaggaagaaaaatgtctcgaagtcaagggcatacaagagaaacaagtcttctctaatactaaagattcaaagcaagagattacacagaacaaatctttcttttcctctgtgaaagaatcccagcgggatgatggaaaaggtgccttaaatatagtggaattcttgagaaaacgtgaagaactgcaacagattttgtcgagagtgaaacagtttgaagcagagccaaataaaagtggccttaaaacatttcagacactattaaatactatcccaggatggctgataagtgaagataagagagaatatgcagttcacattgccatggagaataatttagaaaaagtaaaagaagaaataacacatattaaaactcaagcggaagatatgcttgtgtcctatgaaaatataattcagacagccatgatgtcctccaaaacaggaaaaccgggaaataaacccactagtcttgatgaaacatcatccaaagtatctaatgttcatgtcagcaataataaaaatagtgaacagaaagaaaataaaattgccaaagagaaaacagtacagcaccaagtagcagctcatcatgaagcaactgttcgtagtcacgtgaaaacccatcaggaaattaaacttgatgatagcaacattcctcctccctctttaaaaacacgcccaccgtcaccaacttttatcacaatagaatctactgcccgacgaacagaaaaccctactaagaacgagctttctcagtcccctaaaaaggacagttatgttgaacccccaccaagaaggcccatgtcgcaaaaatctgaaattcacagagcaaacacttccccttctccacccaggagtcgctctgaacaacttgtcagactcaaagacaccactgcaaagttatccaaaggggccatcccatgtccagcagcaaccccggttccaattgtagagaagaggtctgaaatcatcatgtctcctgcaacacttcgtcgtcaaattaagatagaaactcgtggtagggactctccacctacaatcacaataccagtaaatataaatcatgctgctagtggttccttcagagaatctgtggacgctcaagaggaaatcaggaaagtggagaagagagctacttatgttcataaagatggactaaattccactgatcacatggtgcccgacactgaaagttatgatgcagttgaaatcatccgcaaggttgcagtgcctcctcgcctgtcagagcacacacagagatatgaagcggccaaccgaactgttcaaatggctgaaaatttcgtgaatgaccctgaaaatgaaataaacagatggttcagggaatttgagcatggcccagtttctgaagcaaagtcaaatagaagagtttatgcaaagggagaaacaaaccataacatacaacaagaaagtcgtacattttgtaaggaggaatttggattaacatctttaggaaacacgagttttacagacttttcttgcaaacatcctagagaactgcgagaaaagattcctgttaagcagcccaggatctgctctgaaaccaggtctctaagtgaacatttctcaggcatggatgcatttgagagtcaaattgttgagtcgaagatgaaaacctcttcatcacatagctcagaagctggcaaatctggctgtgacttcaagcatgccccaccaacctatgaggatgtcattgctggacatattttagatatctctgattcacctaaagaagtaagaaaaaattttcaaaagacgtggcaagagagtggaagagtttttaaaggcctgggatatgcaaccgcagatgcttctgcaactgagatgagaaccaccttccaagaggaatctgcatttataagtgaagctgctgctccaagacaaggaaatatgtatactttgtcaaaagacagtttatccaatggagtgcctagtggcagacaagcagaattttcataagtcctgcttccgatgccaccattgcaacagtaaactaagtttgggaaattatgcatcacttcatggacaaatatactgtaaacctcactttaaacaacttttcaaatccaaaggaaattatgatgaaggttttggacataagcagcataaagatagatggaactgcaaaaaccaaagcagatcagtggactttattcctaatgaagaaccaaatatgtgtaaaaatattgcagaaaacacccttgtacctggagatcgtaatgaacatttagatgctggtaacagtgaagggcaaaggaatgatttgagaaaattaggggaaaggggaaaattaaaagtcatttggcctccttccaaggagatccctaagaaaaccttaccctttgaggaagagctcaaaatgagtaaacctaagtggccacctgaaatgacaaccctgctatcccctgaatttaaaagtgaatctctgctagaagatgttagaactccagaaaataaaggacaaagacaagatcactttccatttttgcagccttatctacagtccacccatgtttgtcagaaagaggatgttataggaatcaaagaaatgaaaatgcctgaaggaagaaaagatgaaaagaaggaaggaaggaagaatgtgcaagataggccgagtgaagctgaagacacaaagagtaacaggaaaagtgctatggatcttaatgacaacaataatgtgattgtgcagagtgctgaaaaggagaaaaatgaaaaaactaaccaaactaatggtgcagaagttttacaggttactaacactgatgatgagatgatgccagaaaatcataaagaaaatttgaataagaataataataacaattatgtagcagtctcatatctgaataattgcaggcagaagacatctattttagaatttcttgatctattacccttgtcgagtgaagcaaatgacactgcaaatgaatatgaaattgagaagttagaaaatacatctagaatctcagagttacttggtatatttgaatctgaaaagacttattcgaggaatgtactagcaatggctctgaagaaacagactgacagagcagctgctggcagtcctgtgcagcctgctccaaaaccaagcctcagcagaggccttatggtaaaggggggaagttcaatcatctctcctgatacaaatctcttaaacattaaaggaagccattcaaagagcaaaaatttacactttttcttttctaacaccgtgaaaatcactgcattttccaagaaaaatgagaacattttcaattgtgatttaatagattctgtagatcaaattaaaaatatgccatgcttggatttaagggaatttggaaaggatgttaaaccttggcatgttgaaacaacagaagctgcccgcaataatgaaaacacaggttttgatgctctgagccatgaatgtacagctaagcctttgtttcccagagtggaggtgcagtcagaacaactcacggtggaagagcagattaaaagaaacaggtgctacagtgacactgagtaaaatatctatggccactgacagtccacacttaggcactgagagatattgatgttctgaaataagattttatgaatttggatacccttttgaggaacttgatgtaaacatggtgttcagaaatctcgtgtctatctcaatgggatatttcttgtattacaccttgtcatttttttcacaatttatttacatctacttttgtttgaactggaatgaagagatgaaacactatggatatgttttccattcaaatggcactttagcatattgttctgttttcctgtaaaacatcatgggtgtgatttttatactgctgctgcttgtcacaattattataacttctctgtaatttcctctgaaataaaattgaatcacctgaggtgcaaacc

SEQ ID NO: 243135 - protein, 885 aa, Artificial Sequence
  derived and/or modified sequence
MSHPDYRMNLRPLGTPRGVSAVAGPHDIGASPGDKKSKNRSTRGKKKSIFETYMSKEDVSEGLKRGTLIQGVLRINPKKFHEAFIPSPDGDRDIFIDGVVARNRALNGDLVVVKLLPEEHWKVVKPESNDKETEAAYESDIPEELCGHHLPQQSLKSYNDSPDVIVEAQFDGSDSEDGHGITQNVLVDGVKKLSVCVSEKGREDGDAPVTKDETTCISQDTRALSEKSLQRSAKVVYILEKKHSRAATGFLKLLADKNSELFRKYALFSPSDHRVPRIYVPLKDCPQDFVARPKDYANTLFICRIVDWKEDCNFALGQLAKSLGQAGEIEPETEGILTEYGVDFSDFSSEVLECLPQGLPWTIPPEEFSKRRDLRKDCIFTIDPSTARDLDDALSCKPLADGNFKVGVHIADVSYFVPEGSDLDKVAAERATSVYLVQKVVPMLPRLLCEELCSLNPMSDKLTFSVIWTLTPEGKILDEWFGRTIIRSCTKLSYEHAQSMIESPTEKIPAKELPPISPEHSSEEVHQAVLNLHGIAKQLRQQRFVDGALRLDQLKLAFTLDHETGLPQGCHIYEYRESNKLVEEFMLLANMAVAHKIHRAFPEQALLRRHPPPQTRMLSDLVEFCDQMGLPVDFSSAGALNKSLTQTFGDDKYSLARKEVLTNMCSRPMQMALYFCSGLLQDPAQFRHYALNVPLYTHFTSPIRRFADVLVHRLLAAALGYRERLDMAPDTLQKQADHCNDRRMASKRVQELSTSLFFAVLVKESGPLESEAMVMGILKQAFDVLVLRYGVQKRIYCNALALRSHHFQKVGKKPELTLVWEPEDMEQEPAQQVITIFSLVEVVLQAESTALKYSAILKRPGTQGHLGPEKEEEESDGEPEDSSTS

SEQ ID NO: 243136 - protein, 675 aa, Artificial Sequence
  derived and/or modified sequence
MSHPDYRMNLRPLGTPRGVSAVAGPHDIGASPGDKKSKNRSTRGKKKSIFETYMSKEDVSEGLKRGTLIQGVLRINPKKFHEAFIPSPDGDRDIFIDGVVARNRALNGDLVVVKLLPEEHWKVVKPESNDKETEAAYESDIPEELCGHHLPQQSLKSYNDSPDVIVEAQFDGSDSEDGHGITQNVLVDGVKKLSVCVSEKGREDGDAPVTKDETTCISQDTRALSEKSLQRSAKVVYILEKKHSRAATGFLKLLADKNSELFRKYALFSPSDHRVPRIYVPLKDCPQDFVARPKDYANTLFICRIVDWKEDCNFALGQLAKSLGQAGEIEPETEGILTEYGVDFSDFSSEVLECLPQGLPWTIPPEEFSKRRDLRKDCIFTIDPSTARDLDDALSCKPLADGNFKVGVHIADVSYFVPEGSDLDKVAAERATSVYLVQKVVPMLPRLLCEELCSLNPMSDKLTFSVIWTLTPEGKILDEWFGRTIIRSCTKLSYEHAQSMIESPTEKIPAKELPPISPEHSSEEVHQAVLNLHGIAKQLRQQRFVDGALRLDQLKLAFTLDHETGLPQGCHIYEYRESNKLVEEFMLLANMAVAHKIHRAFPEQALLRRHPPPQTRMLSDLVEFCDQMGLPVDFSSAGALNKSLTQTFGDDKYSLARKEVLTNMCSRLPVPPHWL

SEQ ID NO: 243137 - protein, 144 aa, Artificial Sequence
  derived and/or modified sequence
MSHPDYRMNLRPLGTPRGVSAVAGPHDIGASPGDKKSKNRSTRGKKKSIFETYMSKEDVSEGLKRGTLIQGVLRINPKKFHEAFIPSPDGDRDIFIDGVVARNRALNGDLVVVKLLPEEHWKVVKPESNDKETEAAYESDIPEE

SEQ ID NO: 243138 - protein, 619 aa, Artificial Sequence
  derived and/or modified sequence
MSHPDYRMNLRPLGTPRGVSAVAGPHDIGASPGDKKSKNRSTRGKKKSIFETYMSKEDVSEGLKRGTLIQGVLRINPKKFHEAFIPSPDGDRDIFIDGVVARNRALNGDLVVVKLLPEEHWKVVKPESNDKETEAAYESDIPEELCGHHLPQQSLKSYNDSPDVIVEAQFDGSDSEDGHGITQNVLVDGVKKLSVCVSEKGREDGDAPVTKDETTCISQDTRALSEKSLQRSAKVVYILEKKHSRAATGFLKLLADKNSELFRKYALFSPSDHRVPRIYVPLKDCPQDFVARPKDYANTLFICRIVDWKEDCNFALGQLAKSLGQAGEIEPETEGILTEYGVDFSDFSSEVLECLPQGLPWTIPPEEFSKRRDLRKDCIFTIDPSTARDLDDALSCKPLADGNFKVGVHIADVSYFVPEGSDLDKVAAERATSVYLVQKVVPMLPRLLCEELCSLNPMSDKLTFSVIWTLTPEGKILDEWFGRTIIRSCTKLSYEHAQSMIESPTEKIPAKELPPISPEHSSEEVHQAVLNLHGIAKQLRQQRFVDGALRLDQLKLAFTLDHETGLPQGCHIYEYRESNKPCCAGTPRPKQGCSVTWWNSATRWGCPWTSAPQEPSMKA

SEQ ID NO: 243139 - DNA, 2658 bp, Artificial Sequence
  derived and/or modified sequence
atgagccaccctgattacagaatgaatcttcgccctctcgggaccccacgtggcgtgtctgctgtcgctggaccccacgacataggcgcatctcccggcgataaaaaaagtaaaaaccgatctacccgtgggaagaaaaagtccatcttcgagacgtacatgtccaaggaggacgtctccgagggcctgaaacggggaacgcttattcagggggttttgaggatcaatccaaaaaagtttcacgaagcttttattccctctcccgatggcgatagagacatctttattgatggagtggttgccagaaacagagcactgaacggcgacctcgtggtggttaagcttctgccagaggagcattggaaggtggtgaagcctgagtctaacgataaagagaccgaagcagcatatgaaagcgacatcccagaggagctgtgcggtcatcacctcccacagcaatctctcaaatcgtataacgatagccccgatgttatcgtcgaagcccagttcgatgggtcagatagcgaagatgggcacgggattactcagaacgtgctggtggatggcgtaaagaaattgtctgtgtgtgtgagtgaaaagggacgggaagatggcgacgcaccggtcacgaaggacgagaccacctgtatcagtcaagacactagggctctctctgagaaatcccttcagcgttctgctaaagtcgtatacatcctggagaaaaagcactcacgcgccgctactgggttcctgaagctgctagcggacaagaatagtgaactgttccggaaatacgctttattctctccttcggaccaccgggtgccaagaatctatgtgccgctgaaagactgtccccaggactttgttgccagaccaaaagactacgcaaacactctgtttatatgtcgaatcgtggattggaaggaagactgtaatttcgcgctcgggcaattggcaaagagtttaggccaggcaggggagatcgaacccgagacagaaggtattctaactgagtatggcgtcgattttagtgactttagcagcgaggtcttggagtgtctcccacagggcctcccgtggactattccgcccgaggaattttccaaaaggagagatttacgcaaagattgtattttcaccatcgacccctccaccgcaagggatctggacgacgcactttcctgcaagcctctagccgacggcaactttaaagtaggagtccatatcgcagatgtgtcatacttcgttccggagggtagcgaccttgataaagtcgccgctgagagagccacttccgtctacctggttcagaaggtcgtaccaatgctgccacgtctcctttgcgaggaactttgttctctgaatcctatgtccgacaaactgactttcagcgttatttggaccctgacacccgaggggaagatattagatgagtggtttggcaggaccattatcagatcctgcactaaactaagctatgagcatgctcaatctatgattgagtcccctaccgagaagatcccagccaaagagctgcctccaattagccctgaacactcttctgaagaagtccaccaggctgttttaaatctgcacgggattgcgaaacagttaaggcaacagaggttcgtggacggagccctgaggcttgaccaactcaagttggcatttaccctggatcacgagacggggctgccccagggatgtcacatctacgagtatagggagtctaacaaattggtcgaggagtttatgctcttggctaacatggctgtggctcacaagattcatagggctttccctgaacaggcacttctgagaagacatccgcccccccagaccaggatgctgagtgatctcgttgaattttgcgatcagatgggcctgccggtggatttcagttctgctggtgccttgaataaatcactcacacagacgtttggggatgacaagtactctctcgctcggaaagaggtccttaccaacatgtgttctaggccaatgcagatggcgttgtacttttgttcgggcctactgcaagaccccgctcagttccgccactatgctctcaacgtaccgctttatacacacttcaccagcccaattaggagatttgccgatgtactggttcacaggctgttggcagcagccctgggctaccgtgaaagactggacatggctcccgacacgttacagaagcaagcagaccattgtaatgatcggcggatggcaagcaagagagtacaggaactgagcacatcactgttttttgctgttctagtgaaggagtcagggccgctagagtccgaagccatggtgatgggcatccttaaacaggcattcgacgtgctggttcttcgctatggtgtccagaagagaatctactgtaatgcactggcccttcgctcacatcactttcagaaggtgggcaaaaaacctgagctgaccttggtgtgggaaccggaggatatggagcaggagcccgcacagcaggttatcacaatcttcagtctggtggaagtggtgcttcaggcagagtcaaccgcccttaagtattccgctatactgaaaagacccggcacccagggacacctcggacccgaaaaggaggaggaagagagcgatggggaaccagaggactcctcaacctcttag

SEQ ID NO: 243140 - DNA, 2658 bp, Artificial Sequence
  derived and/or modified sequence
atgagccacccggactatcggatgaacctgcggccacttggcacaccccggggggtatccgcggtagctggacctcacgatattggcgctagccctggcgacaagaaatccaagaataggtcgacacgcggtaagaagaagtcaattttcgaaacttacatgtccaaggaagacgtctccgaaggactaaagcgggggacactcatccagggtgtgctgcggataaatcccaaaaaattccacgaggcttttattccatcgcccgatggagatcgcgacatcttcatagatggggtggttgctagaaacagagccctcaatggggaccttgtcgtggtgaaattgctgccagaggaacactggaaagttgttaagccagagtccaacgacaaagaaactgaagcagcgtatgagtctgacatccccgaagagctatgcggacatcatctgccccagcagtcacttaaaagttacaatgatagtcccgatgtcattgtggaggctcagtttgatggctctgatagtgaggatggccatggaatcacccagaatgtgctggtggatggcgtcaagaagctgtcagtatgcgtttccgagaaaggcagagaagacggggacgccccggtgacaaaggacgaaaccacatgtattagccaggatacccgggcactgagtgaaaaatctctccaacgcagtgcaaaggtggtgtatatcctggagaagaagcattctcgagcagctactggctttctgaagctgctcgcggataaaaactccgagctgttcagaaaatatgccctgttcagcccctccgaccatcgtgttccgcgtatttatgttcctcttaaggactgcccacaagatttcgtcgcccggccaaaagattacgcgaacactctgttcatctgccgtatcgtggactggaaggaggactgcaactttgctctcggtcagcttgctaaaagcctgggccaggccggagagattgagccagagaccgaaggaattctgacagaatatggggtcgatttctctgacttctcatccgaagtgctggagtgcctgccccaaggactgccatggacaatccccccagaggaattctctaagaggcgcgacttaaggaaggactgcattttcaccatcgacccaagcaccgcccgtgatctcgacgatgccctgtcttgtaagcctctggccgatggaaactttaaggtgggtgtgcacattgccgacgtgtcctactttgtgcctgaaggttccgatctcgataaggtggctgctgagcgcgctacctcggtctacctagtgcaaaaggtcgtacctatgctcccccgcctcctctgtgaagagctatgctctctcaacccgatgtccgacaagttgacttttagcgtcatctggactctcacacccgaagggaagatcctcgatgaatggtttggaagaacaatcattagatcatgcaccaaactttcctacgaacatgcacagtccatgatcgagtctccaacagagaagatccctgcaaaggagcttccaccgatctcccctgagcacagctctgaggaggttcatcaagcggtgctgaacctacacggcattgccaaacaattgaggcaacagcgattcgttgacggtgctttaagactcgatcagctgaaactggcgttcaccctcgaccacgaaaccggtctgccgcagggctgtcatatttatgaatatcgagagagcaataagctcgtggaggaattcatgctgctggccaatatggccgtggcccataaaattcatcgagccttccccgagcaagccttgttacggcgtcaccccccaccccagacaaggatgctgagcgatttagtggagttttgtgaccagatggggctaccggtggacttctcctcagctggagctcttaataagagccttacccagactttcggtgatgataaatacagtcttgcgcgcaaggaagtgctcactaacatgtgctctagaccgatgcagatggccctgtacttttgttctggtctgctgcaggacccagcgcagttcagacactatgcactgaatgtaccactctatacccatttcaccagccctatccgacgctttgctgacgtactcgtccaccgccttttggccgctgcattggggtatagggagaggttggacatggcacccgacactctgcagaagcaagccgatcattgcaacgaccggcgaatggccagcaaaagggtgcaggagctgtccacctccctgttctttgctgtacttgtgaaggaaagcgggccccttgagtcagaggcaatggtgatggggattctgaaacaggccttcgacgtgctagtgcttcgctatggtgtacagaagcgcatctactgtaacgccctggccctacggtctcatcactttcagaaggtgggtaagaaaccagaattgactctggtctgggagccggaggacatggaacaggagccagcacagcaggtcattactatcttctcactggtggaagtggtgctgcaggccgagtcaaccgcgctgaagtacagtgcgatcctgaagaggcctggtacgcaaggtcacctgggtcctgagaaagaagaggaggaatcggacggggaacccgaagacagttcaacttcgtag

SEQ ID NO: 243141 - DNA, 2028 bp, Artificial Sequence
  derived and/or modified sequence
atgtctcatccagattatcgcatgaacttgcgccccctgggcacccctcgcggtgtgtccgccgtggccggcccccacgacatcggcgccagcccaggggataaaaaaagcaaaaatcgctcgaccagagggaagaaaaagtctatttttgagacttacatgtctaaggaggacgtgtccgagggcctaaagcgaggcacgttaatccagggggtcttgcggatcaatcccaagaagttccacgaagcattcattcctagccccgacggtgatcgcgatatcttcattgatggcgtggtcgcccggaatagggcccttaatggcgacctagtggtggtcaagctgctgccggaggagcactggaaggtggttaaacccgaatccaacgacaaagagacagaggcagcttacgagtctgacattccggaagagctatgcggtcatcaccttcctcagcagtctttgaagtcatataacgatagtccggacgtgattgtcgaagcccaatttgatggcagtgacagcgaagacggccatgggattactcaaaacgtgctggtcgacggagttaagaagctctcagtatgcgtgtccgagaaagggcgagaggatggcgacgctcccgtgacaaaggatgagaccacttgcattagccaggacactcgagctctgtccgaaaaatctctacagagaagcgccaaggttgtatacatcctcgagaagaaacactcacgggccgccacaggttttctgaaactcctggcagacaagaattcagaactgtttcgcaagtacgctttgtttagccctagcgatcatcgcgtgccacggatatacgtgccattgaaggactgcccgcaggatttcgtggccagaccaaaagattatgccaacacattgtttatttgcaggattgtagattggaaagaggattgtaacttcgcattagggcaactagcaaaatcactcggccaagccggggaaatcgagccagaaaccgaaggaatcctgacggaatacggggtggatttctccgacttctcaagtgaagttctcgagtgcctgccacaagggctgccctggaccatacccccggaggagttttcaaaacggcgagacctgcgaaaagattgcatcttcactatagacccgtctacggcccgcgacttggacgatgcgctttcctgcaagcctctggccgatgggaactttaaggtgggggttcacattgccgatgtgagctactttgttccagaaggctccgaccttgataaggtggctgctgagcgtgccacatcggtctatctggtgcagaaggtcgtgcctatgctgccacggcttttatgtgaggaactgtgtagcctgaaccccatgtcagacaaactgaccttctccgtgatctggacactcacccctgaaggcaagattctggatgagtggtttgggagaactatcataaggagttgtaccaaattgagctatgagcacgcccagtccatgattgagtctcccactgagaaaatccctgcaaaagaactgcctcctattagtccagaacacagctccgaggaggtgcatcaggccgtgctcaacctgcacggaatcgccaaacaactgaggcagcagcgattcgtcgatggggccctccgcttggaccaactgaagcttgcctttaccttagaccatgagaccggcctgcctcagggttgccatatttacgagtacagagaaagcaataaattagtcgaggaatttatgttattagccaacatggcagtggctcacaaaatccaccgggccttcccagagcaggccttgctgcgtcggcacccccctcctcagacaagaatgctgagtgatctggtggagttctgtgaccagatgggcctgcccgtggactttagctcagctggcgccctgaataagagcctgacacagacctttggcgatgacaagtattccctggccaggaaggaagtgttaactaatatgtgttcccggctgcctgtccctccccattggctttag

SEQ ID NO: 243142 - DNA, 1860 bp, Artificial Sequence
  derived and/or modified sequence
atgtcacacccagactaccgcatgaatttaaggcctctggggactccccgaggagtcagtgccgtggctggaccacacgatattggagcatcccccggcgacaagaagagtaagaaccggagcacacgtggcaaaaaaaaatccattttcgagacctacatgtccaaagaggacgtttcggaagggctcaagagagggacactaattcagggcgtcctaagaatcaaccccaagaagttccacgaggcttttattcctagcccagacggagatagagatatttttattgatggcgtagttgccaggaacagggccctgaacggcgacctcgtggtagtgaaactgttacctgaagagcattggaaagttgtgaaaccagaatctaatgacaaagagaccgaggccgcctacgagtccgacattccggaggagctctgtggccaccatttacctcaacagagtttgaagtcctataatgactcgccggatgtaatcgtggaagctcagtttgatgggtcggactctgaggatggacatgggataacccagaacgtgttagtagatggcgtcaaaaagctctcggtgtgcgtgtctgagaaagggcgcgaggacggggatgcaccagtgactaaagacgagacaacctgtatatcccaagacactagagcccttagtgaaaagagcctgcaacggtccgccaaggttgtttacatcctggaaaaaaaacacagcagggccgcaaccgggttcttgaaactgctggcggacaagaactccgaactctttaggaagtacgccctgttcagccctagtgatcatagagttccacggatctacgtccccctgaaggactgccctcaggactttgttgccagacccaaagactacgcgaataccctcttcatctgtcgaatcgtggattggaaggaagactgtaactttgccctgggacagttggctaagtccctggggcaggcgggagagattgagcctgaaaccgaggggatactcaccgaatatggtgtagacttttctgacttttcctccgaggtgctggagtgtcttccacagggtctgccctggaccattccacccgaagaatttagcaagagacgggatctacgcaaagactgtatcttcacaattgatccgtccactgcacgcgacctggacgacgcactgagctgcaaacctctcgctgatgggaatttcaaggtgggagtccacattgctgatgtgagctattttgtgcccgagggaagtgacctcgataaagtggcagccgagagggccacaagcgtctatctagtccaaaaggtcgtgccaatgctgcctcggttgctttgcgaggaactttgttccctcaatccaatgagcgataaactaacattcagcgtaatctggaccctcacccccgagggaaagattttagacgagtggttcggccgcaccattatccgctcttgtaccaaactgagctatgagcacgcacagagtatgattgagagcccaacggaaaaaatcccggctaaagaattgcctccaatctctcccgagcatagtagcgaggaagtacaccaggctgtgcttaatcttcatgggattgcaaagcagttgcggcaacagcggtttgtagacggagctttgcggctcgatcaactgaagctcgccttcaccctggatcacgagactggcctgcctcagggttgccatatctatgaatatagggagagcaataaaccctgttgcgcaggaactccgcgccctaagcagggttgttctgtcacatggtggaactctgccacccggtggggctgcccttggactagcgcccctcaggagccatccatgaaagcttag

SEQ ID NO: 243143 - DNA, 2658 bp, Artificial Sequence
  derived and/or modified sequence
atgagccacccagactacaggatgaacctgcggcccctgggcaccccccggggcgtgtctgctgtggccggcccccatgacatcggggccagccctggggacaagaagagcaagaacagaagcacccggggcaagaagaagagcatctttgagacctacatgagcaaagaagatgtgtctgagggcctgaagaggggcaccctcatccagggcgtgctgcgcatcaaccccaagaagttccacgaggccttcatccccagcccagatggagaccgggacatcttcattgatggagtggtggccaggaacagagccctgaatggagacctggtggtggtgaagctgctgcctgaggagcactggaaggtggtgaagccagagagcaatgacaaggagacagaagctgcctatgaaagtgacatccctgaggagctgtgtggccaccacctgccccagcagagcctgaagagctacaatgacagcccagatgtgattgtggaggcccagtttgatggcagtgacagtgaagatggccacggcatcacccagaatgtgctggtggatggagtgaagaagctgtctgtgtgtgtgtctgagaagggcagagaagatggagatgcccctgtgaccaaggatgagaccacctgcatcagccaggacacccgggccctgtctgagaagagcctgcagaggtctgccaaggtggtgtacatcctggagaagaagcacagccgggccgccaccggcttcctgaagctgctggccgacaagaacagcgagctgttcagaaaatatgccctcttcagccccagcgaccaccgggtgccccgcatctacgtgcccctgaaggactgcccccaggactttgtggcccggcccaaggactatgccaacaccctcttcatctgcagaattgtggactggaaggaggactgcaactttgccctgggccagctggccaagagcctgggccaggccggggagattgagcctgagacagagggcatcctgacagaatatggagtggacttcagtgacttcagcagcgaggtgctggagtgcctgccccagggcctgccctggaccatccccccagaggagttcagcaagagaagagacctgaggaaggactgcatcttcaccatcgaccccagcacagcccgggacctggatgatgccctgagctgcaagcccctggctgatggcaacttcaaggtgggcgtgcacatcgcagatgtgtcctactttgtgcctgagggcagtgacctggacaaggtggccgctgagcgggccacctctgtgtacctggtgcagaaggtggtgcccatgctgccccggctgctgtgtgaggagctgtgcagcctgaaccccatgtctgacaagctgaccttcagcgtcatctggaccctgaccccagagggcaagatcctggatgagtggtttggaagaaccatcatccgcagctgcaccaagctgtcctatgagcacgcccagagcatgattgagagccccacagagaagatcccagccaaggagctgccccccatcagccctgagcacagcagcgaggaggtgcaccaggccgtgctgaacctgcatggaattgccaagcagctgcggcagcagagatttgtggatggagccctgcggctggaccagctgaagctggccttcaccctggaccacgagaccggcctgccccagggctgccacatctatgagtaccgggagagcaacaagctggtggaggagttcatgctgctggccaacatggctgtggcccacaagatccaccgggccttccctgagcaggccctgctgcggcggcaccccccaccccagaccaggatgctgagtgacctggtggagttctgtgaccagatgggcctgcctgtggacttcagcagcgctggggccctgaacaagagcctgacccagacctttggagatgacaagtacagcctggccaggaaggaggtgctgaccaacatgtgcagccggcccatgcagatggccctgtacttctgcagcggcctgctgcaggaccctgcccagttccgccactacgccctgaatgtgcccctgtacacccacttcaccagccccatccgccgctttgctgatgtgctggtgcaccggctgctggccgccgccctgggctaccgggagcggctggacatggccccagacaccctgcagaagcaggccgaccactgcaatgacaggaggatggccagcaagagggtgcaggagctgagcaccagcctcttctttgctgtgctggtgaaggagagcggccccctggagagcgaggccatggtgatgggcatcctgaagcaggcctttgatgtgctggtgctgcgctatggagtgcagaagaggatctactgcaatgccctggccctgcggagccaccacttccagaaggtgggcaagaagccagagctgaccctggtgtgggagcctgaggacatggagcaggagcccgcccagcaggtgatcaccatcttcagcctggtggaggtggtgctgcaggccgagagcacagccctgaagtacagcgccatcctgaagaggcctggcacccagggccacctgggccctgagaaggaggaggaggagagtgatggagagcctgaggacagcagcaccagctag

SEQ ID NO: 243144 - DNA, 2028 bp, Artificial Sequence
  derived and/or modified sequence
atgagccacccagactacaggatgaacctgcggcccctgggcaccccccggggcgtgtctgctgtggccggcccccatgacatcggggccagccctggggacaagaagagcaagaacagaagcacccggggcaagaagaagagcatctttgagacctacatgagcaaagaagatgtgtctgagggcctgaagaggggcaccctcatccagggcgtgctgcgcatcaaccccaagaagttccacgaggccttcatccccagcccagatggagaccgggacatcttcattgatggagtggtggccaggaacagagccctgaatggagacctggtggtggtgaagctgctgcctgaggagcactggaaggtggtgaagccagagagcaatgacaaggagacagaagctgcctatgaaagtgacatccctgaggagctgtgtggccaccacctgccccagcagagcctgaagagctacaatgacagcccagatgtgattgtggaggcccagtttgatggcagtgacagtgaagatggccacggcatcacccagaatgtgctggtggatggagtgaagaagctgtctgtgtgtgtgtctgagaagggcagagaagatggagatgcccctgtgaccaaggatgagaccacctgcatcagccaggacacccgggccctgtctgagaagagcctgcagaggtctgccaaggtggtgtacatcctggagaagaagcacagccgggccgccaccggcttcctgaagctgctggccgacaagaacagcgagctgttcagaaaatatgccctcttcagccccagcgaccaccgggtgccccgcatctacgtgcccctgaaggactgcccccaggactttgtggcccggcccaaggactatgccaacaccctcttcatctgcagaattgtggactggaaggaggactgcaactttgccctgggccagctggccaagagcctgggccaggccggggagattgagcctgagacagagggcatcctgacagaatatggagtggacttcagtgacttcagcagcgaggtgctggagtgcctgccccagggcctgccctggaccatccccccagaggagttcagcaagagaagagacctgaggaaggactgcatcttcaccatcgaccccagcacagcccgggacctggatgatgccctgagctgcaagcccctggctgatggcaacttcaaggtgggcgtgcacatcgcagatgtgtcctactttgtgcctgagggcagtgacctggacaaggtggccgctgagcgggccacctctgtgtacctggtgcagaaggtggtgcccatgctgccccggctgctgtgtgaggagctgtgcagcctgaaccccatgtctgacaagctgaccttcagcgtcatctggaccctgaccccagagggcaagatcctggatgagtggtttggaagaaccatcatccgcagctgcaccaagctgtcctatgagcacgcccagagcatgattgagagccccacagagaagatcccagccaaggagctgccccccatcagccctgagcacagcagcgaggaggtgcaccaggccgtgctgaacctgcatggaattgccaagcagctgcggcagcagagatttgtggatggagccctgcggctggaccagctgaagctggccttcaccctggaccacgagaccggcctgccccagggctgccacatctatgagtaccgggagagcaacaagctggtggaggagttcatgctgctggccaacatggctgtggcccacaagatccaccgggccttccctgagcaggccctgctgcggcggcaccccccaccccagaccaggatgctgagtgacctggtggagttctgtgaccagatgggcctgcctgtggacttcagcagcgctggggccctgaacaagagcctgacccagacctttggagatgacaagtacagcctggccaggaaggaggtgctgaccaacatgtgcagccggctgcctgtgcccccccactggctgtag

SEQ ID NO: 243145 - DNA, 1860 bp, Artificial Sequence
  derived and/or modified sequence
atgagccacccagactacaggatgaacctgcggcccctgggcaccccccggggcgtgtctgctgtggccggcccccatgacatcggggccagccctggggacaagaagagcaagaacagaagcacccggggcaagaagaagagcatctttgagacctacatgagcaaagaagatgtgtctgagggcctgaagaggggcaccctcatccagggcgtgctgcgcatcaaccccaagaagttccacgaggccttcatccccagcccagatggagaccgggacatcttcattgatggagtggtggccaggaacagagccctgaatggagacctggtggtggtgaagctgctgcctgaggagcactggaaggtggtgaagccagagagcaatgacaaggagacagaagctgcctatgaaagtgacatccctgaggagctgtgtggccaccacctgccccagcagagcctgaagagctacaatgacagcccagatgtgattgtggaggcccagtttgatggcagtgacagtgaagatggccacggcatcacccagaatgtgctggtggatggagtgaagaagctgtctgtgtgtgtgtctgagaagggcagagaagatggagatgcccctgtgaccaaggatgagaccacctgcatcagccaggacacccgggccctgtctgagaagagcctgcagaggtctgccaaggtggtgtacatcctggagaagaagcacagccgggccgccaccggcttcctgaagctgctggccgacaagaacagcgagctgttcagaaaatatgccctcttcagccccagcgaccaccgggtgccccgcatctacgtgcccctgaaggactgcccccaggactttgtggcccggcccaaggactatgccaacaccctcttcatctgcagaattgtggactggaaggaggactgcaactttgccctgggccagctggccaagagcctgggccaggccggggagattgagcctgagacagagggcatcctgacagaatatggagtggacttcagtgacttcagcagcgaggtgctggagtgcctgccccagggcctgccctggaccatccccccagaggagttcagcaagagaagagacctgaggaaggactgcatcttcaccatcgaccccagcacagcccgggacctggatgatgccctgagctgcaagcccctggctgatggcaacttcaaggtgggcgtgcacatcgcagatgtgtcctactttgtgcctgagggcagtgacctggacaaggtggccgctgagcgggccacctctgtgtacctggtgcagaaggtggtgcccatgctgccccggctgctgtgtgaggagctgtgcagcctgaaccccatgtctgacaagctgaccttcagcgtcatctggaccctgaccccagagggcaagatcctggatgagtggtttggaagaaccatcatccgcagctgcaccaagctgtcctatgagcacgcccagagcatgattgagagccccacagagaagatcccagccaaggagctgccccccatcagccctgagcacagcagcgaggaggtgcaccaggccgtgctgaacctgcatggaattgccaagcagctgcggcagcagagatttgtggatggagccctgcggctggaccagctgaagctggccttcaccctggaccacgagaccggcctgccccagggctgccacatctatgagtaccgggagagcaacaagccctgctgtgccggcaccccccggcccaagcagggctgcagcgtgacctggtggaacagcgccacccgctggggctgcccctggaccagcgccccccaggagcccagcatgaaggcctag

SEQ ID NO: 243146 - DNA, 2658 bp, Artificial Sequence
  derived and/or modified sequence
atgagccaccccgactaccggatgaacctgcggcccctgggcaccccacgtggcgtttccgcagtggctggcccccacgacatcggagcttctccaggagacaagaagtccaagaataggtccacccggggaaagaaaaagtcaatctttgagacctatatgagcaaggaggatgtttctgaggggctgaaacggggcacactaattcagggagtgctgcgtattaatcctaaaaagtttcatgaggccttcattccttctcccgacggcgacagggacattttcatcgatggagttgtagccaggaatcgggcactgaatggcgacctcgttgtggtgaaattgttgccagaggagcactggaaagtagttaaacccgaatccaacgataaagaaacagaggcggcttatgagtcagatatccccgaggagctgtgtgggcatcacctgcctcaacagtctctcaagagttacaatgactcccccgatgtcattgtagaggcacagtttgatggaagcgattctgaggacgggcacgggataacccagaatgtgctcgtggatggtgttaagaagttgtcagtatgtgtatctgaaaaagggagagaggacggcgatgcccctgttacaaaggatgagacgacttgtattagtcaggacacccgagcactgtcagaaaaatcgcttcagcgcagtgctaaagtggtgtacatcttagagaagaaacattcaagggccgctacagggttccttaagctacttgcagataaaaatagcgaacttttccgaaaatatgcactgttctcacccagcgaccacagggttccaagaatatacgtgccccttaaggactgcccccaggactttgtggctagacccaaagactatgcaaacactctttttatctgccgaattgtggattggaaagaggactgtaacttcgctctaggacagctggctaaatcccttgggcaggcaggagaaatcgagcctgagaccgaaggaatcctcacagaatacggcgtagacttttccgacttctcatctgaagtgctggagtgtctcccgcagggcctgccttggaccatcccgccagaagagtttagcaaacggagggatttgaggaaggattgcatctttactattgacccgagtacagctcgggatctggatgacgccctgtcttgtaagccactcgcagacgggaacttcaaagttggcgtgcacattgcggatgtctcctattttgtgcccgaggggagcgatctcgataaggtggcagccgagagagccacaagcgtctatctggtgcagaaggtggtgcccatgcttccaagactcctctgcgaagagctgtgcagtctgaaccccatgtctgacaaacttactttttccgtgatttggactctgactcctgagggaaagattcttgacgagtggtttggacggacgatcatccgttcctgtactaaattatcctacgagcacgcacagtccatgatcgagtctcctactgaaaagatcccggctaaagagctcccccctatatccccagagcatagctcagaagaagttcaccaggctgttctgaatctccacgggatcgcaaagcaactgcggcagcagcggtttgtagatggcgctttacgcctcgaccagctcaaattggcgttcaccctagatcacgagaccgggctgcctcaagggtgccacatttacgagtaccgcgagtccaataagttagtagaggagtttatgttgctggcaaacatggctgttgcacacaagattcatagggctttccccgagcaagctctgctgcgaagacatccaccaccccagacaaggatgctatcagatctagtggagttttgtgatcagatgggattgcccgtggattttagctctgccggtgccctgaataagagcctgactcagacctttggggatgacaagtacagcctagcgaggaaggaggtactcacaaatatgtgctcccgcccaatgcagatggctctatacttttgttcgggtttactgcaggaccccgcccagtttcgccattacgctcttaatgtaccactgtacacgcacttcacctcaccaatcagacgcttcgcggacgttctcgtgcacaggctgctcgccgcagcgctggggtaccgggagcgtctagacatggcacccgacacattgcaaaaacaggcggaccactgtaacgaccggcgcatggctagcaaacgcgtgcaggagttaagtacctccttgttcttcgccgtgctggttaaggagtccgggcccctggagtccgaggccatggtgatgggcatcctcaagcaggcctttgacgtgctggttctgcggtacggggttcaaaagaggatctactgtaatgctttagctctgcgatcccatcactttcaaaaagtcgggaaaaagcccgagttgacactggtttgggagcctgaggacatggagcaagagcccgcacagcaggtgatcactattttctcacttgtcgaggtggtgctgcaggctgaatctacagctctcaaatacagtgcgatcctgaagcggccggggacccagggccatttaggacccgaaaaggaagaggaagagtctgatggcgaaccagaggacagctcgactagctag

SEQ ID NO: 243147 - DNA, 2658 bp, Artificial Sequence
  derived and/or modified sequence
atgagccaccccgactaccggatgaacctgcggcccctgggcaccccaaggggcgtttcagccgtggctggcccccacgacattggagcctcaccaggtgacaaaaaaagtaagaaccgctctacgagaggaaaaaaaaagagcatcttcgagacttacatgtcgaaggaggatgtctccgaaggactcaagcgcggaacactcattcagggggtattaagaatcaaccctaagaagttccacgaagctttcattccttctccggacggtgacagagatattttcattgatggcgttgtcgccaggaacagagctctgaacggcgacttagtcgtggttaagctgcttccagaggaacattggaaggtcgtcaaacctgagtctaacgacaaggagacagaagctgcctacgagagcgacatccctgaggaattgtgtggccaccacttacctcagcaatctctcaagtcatataacgatagcccagacgtaatcgtagaagcccagttcgatggaagtgacagcgaggatgggcacggaatcacacagaatgtcctggtcgacggcgttaaaaagctgtcagtatgcgtgtccgaaaagggccgagaggatggcgacgcccctgtgaccaaagacgaaactacctgcatatcacaggacacccgagccctgtccgagaagtccctacaacggagcgctaaggtggtgtatatcctggagaagaaacacagtagggccgcaacaggctttttgaagctgcttgcagacaagaatagtgagctttttagaaagtacgctcttttcagccctagcgaccatagggtgccccggatttacgttcccctgaaggattgccctcaggatttcgtagcacggcctaaggattacgcaaacaccttgtttatttgcagaattgtggactggaaggaagattgtaacttcgctctgggacaactggccaaaagccttggacaggcaggcgaaatcgagcctgaaaccgagggaattctcaccgaatatggggtggacttcagcgacttttcaagtgaagtgctagagtgtctccctcagggattgccctggacaatccctccagaggaattttccaagaggagagacctccgcaaagattgtatttttactatcgatccatctaccgctagagacctggatgacgcgctgtcatgcaagccactggccgacggaaacttcaaagttggggttcacatcgccgatgtatcctattttgtccctgagggcagtgaccttgacaaagttgctgctgagagagcgacttctgtgtatctggtgcagaaagtggtgccaatgttgccccggttactgtgcgaggaactgtgtagtttgaacccaatgagcgacaagttaacattcagcgtcatttggacacttactcccgagggcaaaattctggacgaatggtttgggcggacaatcatccgatcttgtacaaagctgtcttatgaacatgcccaatctatgattgaaagccctactgaaaagatcccagctaaggagcttcccccaatttcccctgagcattcttccgaggaagtgcatcaggcagtgctgaatcttcacggcatcgctaaacagcttagacagcaacgcttcgtggatggagctctccgactggatcagctgaagctggccttcactctggatcatgaaactggactgccacagggctgccacatctacgaatatcgagagagtaacaagttggtcgaggagtttatgctgctagctaacatggccgtggcccataaaatacaccgcgcgttccctgagcaggctctgctgcggaggcatccacccccacaaacaagaatgctctcggatctcgtggagttctgcgaccaaatggggcttccggttgacttctcttctgctggggctttaaacaagtccctgacccagacgtttggggacgacaagtactcacttgcccggaaggaggtgctgactaatatgtgctctaggccgatgcagatggcattatatttttgcagcggcctgttacaggacccagcccaatttcgacactatgccctgaacgttcctctctatacgcatttcacaagcccgatccgccggttcgccgacgtgctagtgcataggttgctcgcagcggctcttggatatagggaaagacttgatatggcgcccgataccctccagaagcaggctgaccactgtaacgatcgccggatggcctctaaaagggttcaggagctctctacatctctattcttcgctgtacttgttaaagagagcgggcctctggaatctgaagccatggtaatgggaattttaaagcaggcctttgatgtgctcgtgctaagatacggtgttcagaagaggatctattgcaacgctctcgccctacgctcccatcactttcagaaggtgggcaaaaagccagagctgactctggtgtgggaacctgaagacatggagcaagagccagcacagcaggtgattaccatttttagtttagtggaggtggttttgcaagccgaaagcacagcactgaaatatagtgccatcctcaagcggcctggtacccagggtcacctgggtcccgagaaggaggaggaagaaagcgatggggaaccagaggacagcagtacttcctag

SEQ ID NO: 243148 - DNA, 2028 bp, Artificial Sequence
  derived and/or modified sequence
atgagccaccccgactaccggatgaacctgcggcccctgggcaccccaaggggggtgtctgctgtggctggcccacacgacatcggcgcctcccctggggataagaagtccaagaacagatcaacacgcggtaagaagaagtccatcttcgagacttatatgtccaaagaggatgtgtcagagggactcaagagaggaaccctgatccaaggagtgcttcgtattaacccgaaaaagttccacgaagcctttattcctagccccgacggagatcgggacatcttcatcgacggcgtcgtcgcccgcaatcgcgcattgaatggcgatctggtggtggtaaaattgctcccagaagagcactggaaggtcgtcaagccagaaagcaatgataaggaaacagaagctgcttatgagtcagacattccagaggagctctgcggtcaccacttgccacaacagtccctgaagtcgtacaatgactcgcccgatgttattgttgaagcccagtttgatgggtccgatagtgaagatggtcacgggatcacccagaatgtactggtcgacggagtcaagaagctctccgtgtgtgtgtctgagaaggggagggaagacggggacgctcctgtgaccaaggacgagacgacatgcatatcgcaggatacccgggctctgagcgaaaaaagcctgcagcgaagcgctaaggtcgtgtacatactggaaaagaagcactctcgagccgccaccgggtttctcaagctgctggctgacaagaactccgagctgttccggaaatatgcactcttttcaccatccgatcatcgggtcccacgcatctacgtgcccttaaaagactgtccccaggacttcgtggctcgccccaaagattacgctaacaccctgttcatctgcaggattgtggattggaaggaggattgcaatttcgcactcgggcagctagctaagtcactgggtcaggctggagagatagagcctgagaccgaggggatcctgacagaatacggcgtggacttttcggatttcagttcagaggtgctggagtgtcttccacagggccttccctggactatcccgcccgaagaattcagcaaacggcgcgaccttcgtaaggattgcattttcacaattgatccctctacagcaagggatttggacgatgccctcagctgcaagcccctagccgacgggaattttaaggttggagtccacatcgcggatgtgtcctacttcgtccctgaggggtcagacttggacaaggtggcagcggagcgggctacctccgtttatctcgtgcagaaggtggtcccaatgttgcctagactgctttgtgaagaactctgctcactcaatcctatgtccgataaacttacatttagcgtgatatggaccctgactcccgagggaaaaatccttgatgagtggttcgggagaaccattatccgctcctgcacgaaactttcatacgaacacgcccagtccatgattgagtccccaaccgagaagatcccagccaaggagctgcctcctatttcacccgagcattcttccgaagaagtccaccaagccgtcctgaatctacatgggattgccaaacagttgcgccagcaacgcttcgtggatggcgccctgcggctggatcagttaaaactggcattcacgcttgatcatgagaccggacttccacagggctgtcacatttacgaatatcgggagagtaataaactggtggaagagtttatgttattagctaatatggccgtcgcccacaaaatccaccgtgcctttcccgagcaagccctactaagacgacacccgcccccacagacacgcatgctgtccgaccttgttgagttctgcgaccagatggggctgcccgtggacttctccagtgccggagccctaaacaagtcacttactcagacgtttggtgatgacaagtatagcctggctagaaaggaggttctgaccaatatgtgtagtagactccccgttccaccacattggctgtag

SEQ ID NO: 243149 - DNA, 1860 bp, Artificial Sequence
  derived and/or modified sequence
atgagccaccccgactaccggatgaacctgcggcccctgggcaccccccgcggcgtgagtgccgtggcaggcccacacgacatcggagcctcacctggggacaagaagagcaagaacagatctacacgcggaaaaaagaaaagcatcttcgagacctatatgtctaaggaagacgtgagtgaaggactgaaacgcggaacgcttatccagggagtgctgagaatcaatcccaaaaagtttcatgaggcttttatcccctcaccggatggcgacagagacatttttatcgatggagtcgtggcacgaaatcgagccctgaatggcgatctcgtcgtcgtaaagttactccctgaggaacactggaaagtagtcaagccagaaagtaatgataaggagacagaggctgcgtatgagagtgacattcctgaggaactatgtggacaccacctaccccagcagtctctgaagagctataacgactccccagacgtcattgtggaggcccaatttgatggatcagacagcgaagacggtcatggcataacccaaaatgtactcgtggacggagtgaagaaactgagcgtgtgcgtctccgagaagggacgagaggatggcgacgctcctgtcacaaaggatgaaacaacctgtatttcacaggatactcgtgccctctccgagaaatctttgcagaggtccgcgaaggtggtgtatattcttgagaaaaagcatagccgcgcagccacaggtttcctgaagctgctggcagacaagaacagcgaactgttcaggaagtatgccctgttcagcccctccgatcatagagtgccccggatatacgtccctttgaaagattgccctcaggacttcgtcgcacgccccaaggactacgccaatacactgttcatttgtaggatcgtggattggaaggaggattgcaactttgcgctcgggcagcttgctaaatctctggggcaggccggggaaatcgagcccgagacagaaggtattctcaccgagtatggtgtagacttctccgacttttcatcagaggtgctagaatgtctccctcagggactgccctggacgattcccccggaggagttcagcaagcgccgggacctgagaaaggattgcatttttacaatagatccaagtactgcaagagatcttgatgacgctttgtcctgtaaacccctggctgatgggaactttaaggtcggggtgcacattgccgacgtgtcctatttcgtccccgagggctcggacctggacaaggtggccgctgagcgagccacctccgtttacctagtgcagaaagtggttccgatgctgccccgattgctgtgtgaggagctttgcagcctgaacccaatgtccgataaattgaccttttcagtgatctggactctgacaccagagggcaaaattctagatgaatggttcgggagaaccataattcgtagttgtactaaactgtcatacgagcatgcccagagcatgatagagtctcccacggaaaagataccagctaaggagctgccccctatttcacccgagcattctagtgaggaagtgcatcaagccgtgcttaacctccacgggatcgccaaacaactgagacaacagagattcgtggacggagctctgcgcctcgaccaactcaagttggcgtttactctggaccacgagaccgggctgccccagggctgtcatatctacgagtaccgggaatcaaacaagccgtgttgcgccgggacacctaggcccaaacagggttgttcagtcacgtggtggaactccgcaaccagatgggggtgcccatggacaagcgcccctcaggaaccaagcatgaaggcctag

SEQ ID NO: 243150 - DNA, 2658 bp, Artificial Sequence
  derived and/or modified sequence
atgtctcacccagattacagaatgaacctgcggcctctgggaacacctcgaggcgtatccgcagtcgccggaccacacgatatcggggctagtccaggggacaagaaatcaaaaaaccgctccactcgcggaaaaaaaaagtctatctttgaaacctacatgtcaaaggaagacgtcagtgagggcctaaaaaggggcaccctcatccagggggttctgcggattaacccgaagaagttccatgaggcctttatcccgtctccagatggcgaccgagacatcttcatcgacggtgtggtggcgagaaacagggctttgaacggagacctggtggtagtcaaattgctaccagaagagcattggaaggtggtcaaacccgagtccaatgataaggagactgaggccgcttatgaatccgacattcctgaagagctttgcggacaccacctaccacagcagtcgctcaaatcgtataatgactctcctgacgtgatcgtggaagcgcaatttgatggctccgactccgaggacggacacggaattacccagaatgtgctggtcgacggcgttaaaaaattgagtgtctgtgtgagcgaaaagggtcgtgaggacggagacgccccagtcacaaaagacgagaccacctgtatatctcaggacacccgggctttgtctgaaaagtccctgcagcgaagtgccaaggtggtgtatatactggagaaaaaacattccagagctgcaacaggtttcctcaagctgttagcagataagaattccgagctgttccgcaaatatgcgctcttttctccttccgatcatcgagtgcctcggatttatgtcccccttaaagactgtcctcaagattttgtcgctcgcccaaaagattacgccaataccctgttcatctgtcggatagtggactggaaggaggattgcaacttcgccctggggcagctggctaaatctttgggtcaggccggtgagatcgagcctgaaacagagggcattctgactgagtacggcgtggatttttccgatttttcgtctgaagtgttagaatgccttccccaggggctgccctggaccataccgccagaggaattctcgaaaaggcgggaccttcgcaaagattgtatatttaccatagatccttccacagccagggatctggatgacgctctttcatgtaagcccctggcagacggaaattttaaggtgggcgtgcacatcgccgacgtgtcctattttgtacccgaaggatctgacctggacaaagttgccgctgagcgggctacatctgtgtatttggtgcaaaaggtggtgcctatgctcccacggctcctttgcgaggaactctgctctcttaatcccatgtccgacaagttgaccttcagcgtgatctggacactaacacccgagggcaagatcctggacgaatggttcgggagaactatcattcggagctgcactaagctgagctacgaacacgcccagtccatgattgaaagcccgacagaaaagatccccgcaaaagaactaccaccgatttccccagaacattcatccgaggaggtgcaccaggcagttctgaacttacacggcatcgccaaacagcttcgccagcaaaggttcgtcgacggggctctgcgcctggaccagctgaagctggctttcacactggatcatgagaccggccttccccaaggttgtcacatctacgagtatcgcgagagcaacaagcttgttgaagagttcatgcttctggctaatatggcggtggcacataaaattcacagggctttcccggaacaggcattgcttaggagacaccccccaccacagactagaatgctctcagacctggtggagttctgcgaccagatgggactgcctgttgacttttccagcgccggagccctgaacaaaagtctcacacagaccttcggtgacgacaaatactccctggccagaaaggaggtattgacaaacatgtgtagtaggccaatgcagatggctctatatttttgcagcggcctgctccaggatccggcacaatttcggcactacgccctgaatgtgcccttatacacccattttaccagcccaattcgcagatttgccgacgtccttgtccaccgattactggctgcagccctggggtacagagaacgcctcgatatggcccctgacaccctgcagaaacaagctgatcattgtaacgataggcgcatggcctcaaagcgtgtgcaggagctgtccacctcgctgttctttgccgtcctcgttaaagagtctggccctttggagtcagaggccatggtgatgggaattcttaaacaagctttcgacgtccttgtactccgatatggcgtgcagaaaaggatctattgcaatgctcttgcactacggtcacaccatttccagaaagtcggcaagaagccagagctcacactggtttgggagcctgaggatatggagcaagaaccagctcaacaggtcatcacaattttcagcctggttgaagtggtgctccaggccgagtctactgcacttaaatactctgctatcctcaagcggccaggcacccaaggccatctgggccctgaaaaagaagaggaagagtctgacggcgaacccgaagatagttcaaccagctag

SEQ ID NO: 243151 - DNA, 2658 bp, Artificial Sequence
  derived and/or modified sequence
atgagccatccagattatcgcatgaacctcaggcccctgggaaccccccgtggcgtaagtgcagtggccggaccccatgacataggcgctagtcccggagataaaaaatccaagaaccggagtacaagaggtaaaaagaagagtatcttcgaaacctacatgtctaaagaagacgttagtgaggggcttaagcgcggtacattgatccagggcgtgctgcggatcaaccctaagaagtttcatgaagccttcatccccagcccggatggagaccgggatatcttcatcgacggggtcgtggcgaggaatcgcgctctgaacggagacctcgtggtggtgaagctcctacctgaggagcattggaaggtagttaaacccgaatctaacgataaagaaacagaagcagcctacgagtctgatatacctgaggagctatgcggccatcacctgccccagcagagcctgaaaagttacaacgactcccccgacgtgattgttgaggcacagtttgacgggtctgactccgaagatggccatgggatcacgcagaacgtgcttgtggatggcgtcaaaaagctgtctgtctgcgtgtccgagaagggcagggaggacggagatgccccagtcacaaaggatgagacgacatgcatatctcaggatacccgtgcccttagtgaaaagtcgctgcagaggtccgccaaggtggtgtacatactagaaaagaaacactctagggccgcaactgggttcctgaagctgctggctgataaaaattccgagctgtttcggaagtacgcactgttctccccctccgatcacagggtgccccgaatttacgttcccctcaaggactgtcctcaagatttcgtggcaaggccaaaggattacgctaacacattgttcatttgtcgtatcgtggattggaaagaggactgtaactttgccctaggccagcttgccaaatcccttggtcaggcaggcgaaattgagcccgaaacagagggcattctcactgaatacggggtagacttctctgacttttcaagcgaggtgctagaatgtctcccccaggggttgccttggactatcccacccgaggagttctctaagaggagagatctgagaaaagactgcatctttaccatcgacccaagtactgctagggacctggatgacgctctgagctgcaaacctctggctgacggcaactttaaagtgggcgtgcatattgctgacgtgagttactttgtccctgagggaagtgacctcgacaaagttgcagctgaaagggcaacttcagtgtacctcgtgcagaaagtggtaccgatgctccctcggctgctctgcgaggagctctgttcacttaaccccatgtcagataagcttacgtttagtgttatctggaccttgaccccagaaggcaagatcttggatgaatggttcggcagaaccatcatccggagttgtactaagctgtcatacgagcatgctcagagcatgattgaaagccccaccgagaaaatccctgccaaggagctgcccccaatatcaccagaacatagctctgaggaggtgcaccaggccgtacttaaccttcacggcatcgcgaaacagctaagacaacagcggttcgtggatggagccctgcgattagatcaactgaaactcgcctttacactggaccacgaaacaggtctcccccaagggtgccacatatatgaatacagagaatccaacaagcttgtcgaagagttcatgctgctggccaatatggcggtcgcacataaaattcatcgcgcatttccggagcaggctctgttgcggaggcaccctccccctcagacccgcatgctgtctgacctcgtggaattctgcgaccagatgggcctgcccgttgacttttcctctgctggcgctctgaataagagcttgacgcagacattcggtgatgataagtattccctggcaaggaaagaggtgcttacgaatatgtgttcaagacctatgcagatggcgctctatttctgtagcggattgctgcaggatccagctcagttcagacattacgctttgaacgtacccttgtacacacatttcacctcgcctattaggcggttcgccgacgtattagtgcatcggctactggctgccgcactcggatatcgagagcgcttggacatggctcccgataccctccagaagcaggccgaccactgcaatgataggaggatggcaagcaaacgggtccaggaactgtccacaagcctgttttttgctgttctagtaaaggagtctgggcctttagaatccgaagctatggtgatgggcatactgaaacaggccttcgacgtgcttgtgctaagatatggggtgcagaagagaatctattgtaatgctctggctctaaggagccatcactttcagaaagtcgggaaaaagccagaactgactttagtctgggagcctgaggatatggagcaggagcctgctcaacaggtcattacaattttctcccttgtggaggtcgtgcttcaggcggaaagcaccgcgcttaagtacagtgccatcctgaagcggcctggaactcagggccacctgggaccagagaaggaggaggaggaatctgacggcgaacctgaagatagctccacatcatag

SEQ ID NO: 243152 - DNA, 2028 bp, Artificial Sequence
  derived and/or modified sequence
atgtcccatccagattataggatgaacctaagacctctgggtactcctagaggtgtctccgccgtggctgggccacatgacataggtgcaagccccggagataaaaagtctaaaaaccgtagcactcggggaaaaaagaagagcatcttcgagacatacatgtctaaggaggatgtcagcgaaggcctgaaacggggtactctgatacagggagtcttgcgtataaatcctaaaaaattccatgaggccttcataccctctcccgacggggatagagacatctttatcgatggggtggtggcccgtaaccgggcattgaacggcgatctagtggtggtaaaactcttacccgaagagcactggaaagtcgttaagccagagagtaacgacaaagagaccgaagccgcatacgaatcggacatcccagaggaactttgcggacatcatcttccccaacaatccttgaaatcatacaacgattccccggatgtaatcgttgaggcgcaatttgacggctccgatagtgaggacgggcacggtatcacacagaatgtgcttgtcgatggagtaaagaagctgtccgtctgcgtatcagaaaaggggcgtgaggacggcgacgccccagtaaccaaagatgaaacaacttgtatatcacaggacacccgcgcactgagtgagaaaagtctgcagcggtctgctaaggtggtgtatatcctcgagaagaaacattcccgcgcagcgacaggctttttgaagctgctggccgataagaatagcgagcttttccggaaatatgctttgttttctccatccgaccatcgtgtgccaaggatatacgttccactgaaagattgtccgcaggactttgtcgcgaggcccaaggactacgccaacaccctgtttatttgcagaattgttgactggaaagaggactgtaattttgccctgggccaattagccaagagtttggggcaggccggagagattgagccagagacagagggaatcctgacagaatatggcgtcgactttagtgacttctcttctgaagtgctagagtgtctacctcagggcctgccctggaccattcctccagaggaattcagcaaacgccgtgatctcaggaaggactgtatattcactatcgatcctagtaccgccagggatctggatgacgccctttcctgcaagccattggctgacggaaactttaaggtcggggtgcatattgctgacgtgagctacttcgttcccgaggggtctgatctggataaggtcgctgctgagagagccacatccgtctatctagtccagaaagtggttcctatgctgccacggctgctttgcgaggagctctgcagcctcaaccctatgagcgataaattgacgttctccgttatttggacgctcacaccagagggtaaaattctcgacgaatggttcggcaggacaataatcagaagctgcactaagttgtcctacgaacatgcccagtccatgatcgaatccccgaccgagaagatccctgccaaagagctgccgcctatcagcccagaacatagtagtgaggaggtccaccaggccgtgctgaatctccatggtatcgcaaaacagctgcgacagcagagatttgtagacggggcattgcggctcgaccaactaaagctagcctttaccctggaccatgagacaggactacctcaggggtgtcacatctacgagtacagggagtctaacaagctagtcgaagaattcatgttattagcgaatatggccgttgcacacaaaatacatcgcgcattcccagaacaagccttgctccgcaggcaccccccacctcaaactcgaatgttaagtgacttagtcgagttttgcgaccaaatggggctgcccgtcgacttttcctccgcaggtgcgttgaataaatcacttacccagaccttcggcgatgacaagtactctctagctcgcaaggaagtgcttaccaacatgtgttctcgcttaccagtcccaccgcattggctttag

SEQ ID NO: 243153 - DNA, 1860 bp, Artificial Sequence
  derived and/or modified sequence
atgtcacacccggactaccgaatgaatctacgtccattaggtaccccccgaggcgtgtcagcagtcgccggaccccacgatataggcgcttctcccggagacaaaaaaagtaagaaccgctccacaagaggcaagaaaaaatctattttcgagacatacatgagcaaggaggacgtgtcggaaggcctgaagaggggcaccctgattcagggagttcttcggattaatccaaagaagttccacgaggcgttcattccgagccctgatggcgaccgggatatttttatcgacggagtggttgccaggaacagggccctgaatggggatcttgtggttgtgaaactgcttcctgaggagcattggaaggtggttaagcccgagtctaatgacaaggaaactgaagcagcatatgaatctgatattccagaagaactgtgcggccatcacctaccacagcagtctcttaagagctataacgactctcccgacgtcatcgttgaagcccaatttgacggaagtgactcggaagatggtcacggcatcactcaaaacgttctagtggacggggttaaaaagctgtctgtctgcgtgtccgagaaaggaagagaagacggagacgctccggtcacaaaggatgagactacgtgtatcagtcaagatacgcgggctctttccgagaagtcgttacaacggtccgccaaggtggtctacatcttagagaagaagcatagccgggctgcaactggcttcctcaagctcctggctgacaagaattctgagctgtttcgcaagtacgccctcttctctccatccgatcatcgcgtccccaggatctacgtgcctttgaaagactgcccccaggatttcgtcgctcgcccaaaggactacgctaataccctgttcatttgtcgtatcgtcgattggaaggaggactgtaacttcgccctggggcaactggctaagagcttaggacaggctggcgagattgagcccgaaacagagggcatcctgacggaatacggggtagatttttctgattttagctctgaggttttagagtgtctgccccagggtctgccttggacaatccctcctgaggaattttcaaagaggcgggacctgagaaaagattgtatttttaccattgacccttccactgcacgggatctggatgatgctctttcatgcaagccgctggccgacggcaatttcaaagtcggcgtgcacattgccgacgtctcttactttgtgccagaggggtcagatctcgacaaagtagccgcagaacgggcaacgagtgtttatttggtccagaaagtggtacccatgctgccgaggttgctgtgcgaagagctttgctcactgaatccgatgtccgacaagttaactttctctgtgatttggactctgacacccgaaggtaaaatcctcgacgaatggttcggccgaacaattatacgctcttgcacgaagctctcctatgagcacgcacagagtatgattgaaagccctacggagaagatccccgctaaggaattacctcccatctccccagaacatagctccgaggaggtgcatcaggccgtgctgaacctccatggaattgcaaaacagttaagacagcagagattcgtggatggggctctaaggctggaccagctgaaactcgcattcaccctcgaccacgagaccgggttgccccagggctgccacatatatgaatacagagagagcaataagccttgctgtgctggcaccccaaggcccaaacaaggctgctcagtgacctggtggaactcggccacccgctggggctgtccctggacgtcagcgcctcaggagccatcaatgaaggcttag

SEQ ID NO: 243154 - DNA, 2658 bp, Artificial Sequence
  derived and/or modified sequence
atgagccaccccgactacagaatgaacctgagacccctgggcacccccagaggcgtgagcgccgtggccggcccccacgacatcggcgccagccccggcgacaagaagagcaagaacagaagcaccagaggcaagaagaagagcatcttcgagacctacatgagcaaggaggacgtgagcgagggcctgaagagaggcaccctgatccagggcgtgctgagaatcaaccccaagaagttccacgaggccttcatccccagccccgacggcgacagagacatcttcatcgacggcgtggtggccagaaacagagccctgaacggcgacctggtggtggtgaagctgctgcccgaggagcactggaaggtggtgaagcccgagagcaacgacaaggagaccgaggccgcctacgagagcgacatccccgaggagctgtgcggccaccacctgccccagcagagcctgaagagctacaacgacagccccgacgtgatcgtggaggcccagttcgacggcagcgacagcgaggacggccacggcatcacccagaacgtgctggtggacggcgtgaagaagctgagcgtgtgcgtgagcgagaagggcagagaggacggcgacgcccccgtgaccaaggacgagaccacctgcatcagccaggacaccagagccctgagcgagaagagcctgcagagaagcgccaaggtggtgtacatcctggagaagaagcacagcagagccgccaccggcttcctgaagctgctggccgacaagaacagcgagctgttcagaaagtacgccctgttcagccccagcgaccacagagtgcccagaatctacgtgcccctgaaggactgcccccaggacttcgtggccagacccaaggactacgccaacaccctgttcatctgcagaatcgtggactggaaggaggactgcaacttcgccctgggccagctggccaagagcctgggccaggccggcgagatcgagcccgagaccgagggcatcctgaccgagtacggcgtggacttcagcgacttcagcagcgaggtgctggagtgcctgccccagggcctgccctggaccatcccccccgaggagttcagcaagagaagagacctgagaaaggactgcatcttcaccatcgaccccagcaccgccagagacctggacgacgccctgagctgcaagcccctggccgacggcaacttcaaggtgggcgtgcacatcgccgacgtgagctacttcgtgcccgagggcagcgacctggacaaggtggccgccgagagagccaccagcgtgtacctggtgcagaaggtggtgcccatgctgcccagactgctgtgcgaggagctgtgcagcctgaaccccatgagcgacaagctgaccttcagcgtgatctggaccctgacccccgagggcaagatcctggacgagtggttcggcagaaccatcatcagaagctgcaccaagctgagctacgagcacgcccagagcatgatcgagagccccaccgagaagatccccgccaaggagctgccccccatcagccccgagcacagcagcgaggaggtgcaccaggccgtgctgaacctgcacggcatcgccaagcagctgagacagcagagattcgtggacggcgccctgagactggaccagctgaagctggccttcaccctggaccacgagaccggcctgccccagggctgccacatctacgagtacagagagagcaacaagctggtggaggagttcatgctgctggccaacatggccgtggcccacaagatccacagagccttccccgagcaggccctgctgagaagacacccccccccccagaccagaatgctgagcgacctggtggagttctgcgaccagatgggcctgcccgtggacttcagcagcgccggcgccctgaacaagagcctgacccagaccttcggcgacgacaagtacagcctggccagaaaggaggtgctgaccaacatgtgcagcagacccatgcagatggccctgtacttctgcagcggcctgctgcaggaccccgcccagttcagacactacgccctgaacgtgcccctgtacacccacttcaccagccccatcagaagattcgccgacgtgctggtgcacagactgctggccgccgccctgggctacagagagagactggacatggcccccgacaccctgcagaagcaggccgaccactgcaacgacagaagaatggccagcaagagagtgcaggagctgagcaccagcctgttcttcgccgtgctggtgaaggagagcggccccctggagagcgaggccatggtgatgggcatcctgaagcaggccttcgacgtgctggtgctgagatacggcgtgcagaagagaatctactgcaacgccctggccctgagaagccaccacttccagaaggtgggcaagaagcccgagctgaccctggtgtgggagcccgaggacatggagcaggagcccgcccagcaggtgatcaccatcttcagcctggtggaggtggtgctgcaggccgagagcaccgccctgaagtacagcgccatcctgaagagacccggcacccagggccacctgggccccgagaaggaggaggaggagagcgacggcgagcccgaggacagcagcaccagctag

SEQ ID NO: 243155 - DNA, 2028 bp, Artificial Sequence
  derived and/or modified sequence
atgagccaccccgactacagaatgaacctgagacccctgggcacccccagaggcgtgagcgccgtggccggcccccacgacatcggcgccagccccggcgacaagaagagcaagaacagaagcaccagaggcaagaagaagagcatcttcgagacctacatgagcaaggaggacgtgagcgagggcctgaagagaggcaccctgatccagggcgtgctgagaatcaaccccaagaagttccacgaggccttcatccccagccccgacggcgacagagacatcttcatcgacggcgtggtggccagaaacagagccctgaacggcgacctggtggtggtgaagctgctgcccgaggagcactggaaggtggtgaagcccgagagcaacgacaaggagaccgaggccgcctacgagagcgacatccccgaggagctgtgcggccaccacctgccccagcagagcctgaagagctacaacgacagccccgacgtgatcgtggaggcccagttcgacggcagcgacagcgaggacggccacggcatcacccagaacgtgctggtggacggcgtgaagaagctgagcgtgtgcgtgagcgagaagggcagagaggacggcgacgcccccgtgaccaaggacgagaccacctgcatcagccaggacaccagagccctgagcgagaagagcctgcagagaagcgccaaggtggtgtacatcctggagaagaagcacagcagagccgccaccggcttcctgaagctgctggccgacaagaacagcgagctgttcagaaagtacgccctgttcagccccagcgaccacagagtgcccagaatctacgtgcccctgaaggactgcccccaggacttcgtggccagacccaaggactacgccaacaccctgttcatctgcagaatcgtggactggaaggaggactgcaacttcgccctgggccagctggccaagagcctgggccaggccggcgagatcgagcccgagaccgagggcatcctgaccgagtacggcgtggacttcagcgacttcagcagcgaggtgctggagtgcctgccccagggcctgccctggaccatcccccccgaggagttcagcaagagaagagacctgagaaaggactgcatcttcaccatcgaccccagcaccgccagagacctggacgacgccctgagctgcaagcccctggccgacggcaacttcaaggtgggcgtgcacatcgccgacgtgagctacttcgtgcccgagggcagcgacctggacaaggtggccgccgagagagccaccagcgtgtacctggtgcagaaggtggtgcccatgctgcccagactgctgtgcgaggagctgtgcagcctgaaccccatgagcgacaagctgaccttcagcgtgatctggaccctgacccccgagggcaagatcctggacgagtggttcggcagaaccatcatcagaagctgcaccaagctgagctacgagcacgcccagagcatgatcgagagccccaccgagaagatccccgccaaggagctgccccccatcagccccgagcacagcagcgaggaggtgcaccaggccgtgctgaacctgcacggcatcgccaagcagctgagacagcagagattcgtggacggcgccctgagactggaccagctgaagctggccttcaccctggaccacgagaccggcctgccccagggctgccacatctacgagtacagagagagcaacaagctggtggaggagttcatgctgctggccaacatggccgtggcccacaagatccacagagccttccccgagcaggccctgctgagaagacacccccccccccagaccagaatgctgagcgacctggtggagttctgcgaccagatgggcctgcccgtggacttcagcagcgccggcgccctgaacaagagcctgacccagaccttcggcgacgacaagtacagcctggccagaaaggaggtgctgaccaacatgtgcagcagactgcccgtgcccccccactggctgtag

SEQ ID NO: 243156 - DNA, 1860 bp, Artificial Sequence
  derived and/or modified sequence
atgagccaccccgactacagaatgaacctgagacccctgggcacccccagaggcgtgagcgccgtggccggcccccacgacatcggcgccagccccggcgacaagaagagcaagaacagaagcaccagaggcaagaagaagagcatcttcgagacctacatgagcaaggaggacgtgagcgagggcctgaagagaggcaccctgatccagggcgtgctgagaatcaaccccaagaagttccacgaggccttcatccccagccccgacggcgacagagacatcttcatcgacggcgtggtggccagaaacagagccctgaacggcgacctggtggtggtgaagctgctgcccgaggagcactggaaggtggtgaagcccgagagcaacgacaaggagaccgaggccgcctacgagagcgacatccccgaggagctgtgcggccaccacctgccccagcagagcctgaagagctacaacgacagccccgacgtgatcgtggaggcccagttcgacggcagcgacagcgaggacggccacggcatcacccagaacgtgctggtggacggcgtgaagaagctgagcgtgtgcgtgagcgagaagggcagagaggacggcgacgcccccgtgaccaaggacgagaccacctgcatcagccaggacaccagagccctgagcgagaagagcctgcagagaagcgccaaggtggtgtacatcctggagaagaagcacagcagagccgccaccggcttcctgaagctgctggccgacaagaacagcgagctgttcagaaagtacgccctgttcagccccagcgaccacagagtgcccagaatctacgtgcccctgaaggactgcccccaggacttcgtggccagacccaaggactacgccaacaccctgttcatctgcagaatcgtggactggaaggaggactgcaacttcgccctgggccagctggccaagagcctgggccaggccggcgagatcgagcccgagaccgagggcatcctgaccgagtacggcgtggacttcagcgacttcagcagcgaggtgctggagtgcctgccccagggcctgccctggaccatcccccccgaggagttcagcaagagaagagacctgagaaaggactgcatcttcaccatcgaccccagcaccgccagagacctggacgacgccctgagctgcaagcccctggccgacggcaacttcaaggtgggcgtgcacatcgccgacgtgagctacttcgtgcccgagggcagcgacctggacaaggtggccgccgagagagccaccagcgtgtacctggtgcagaaggtggtgcccatgctgcccagactgctgtgcgaggagctgtgcagcctgaaccccatgagcgacaagctgaccttcagcgtgatctggaccctgacccccgagggcaagatcctggacgagtggttcggcagaaccatcatcagaagctgcaccaagctgagctacgagcacgcccagagcatgatcgagagccccaccgagaagatccccgccaaggagctgccccccatcagccccgagcacagcagcgaggaggtgcaccaggccgtgctgaacctgcacggcatcgccaagcagctgagacagcagagattcgtggacggcgccctgagactggaccagctgaagctggccttcaccctggaccacgagaccggcctgccccagggctgccacatctacgagtacagagagagcaacaagccctgctgcgccggcacccccagacccaagcagggctgcagcgtgacctggtggaacagcgccaccagatggggctgcccctggaccagcgccccccaggagcccagcatgaaggcctag

SEQ ID NO: 243157 - DNA, 3501 bp, Artificial Sequence
  derived and/or modified sequence
tttcgcccttgtcgcagctgaaccgccgactacgagctcctgcaccgcgcacacaccccgcgcgcttcgctctcggcctcgcccggccaccgtcgctctctagaacgccgcgcccgtgacccggaagagcattctccttagcaactgcgggactgcggcggcgccggcctccggggagaaacgcgaatgacaacagagctgctcaaggcgggaactctgagctaagcagtggaggtttctctggatctggagagaagagtgaccttggagccaataatgagccatcctgactacagaatgaacctccggcccctggggacccccagaggtgtgtctgctgtggctggtccacatgacattggtgcttcgccaggtgacaaaaagtcaaagaacaggtccacacgagggaagaaaaagagcatatttgaaacttacatgtccaaggaggatgtttcagaaggcttgaagagaggaacactcatccagggtgtattgagaattaatccaaagaagtttcatgaagccttcattccttccccggatggtgatcgagacatttttattgatggggttgttgctcgtaatagagccttaaatggggatctggtggtcgtgaaactgcttcccgaggagcattggaaggtagttaaaccagagagcaatgacaaagaaacagaagctgcgtatgaatcagatatccccgaggagctctgtggacaccatctcccgcaacagtccctgaaaagctataatgacagtcctgatgtcattgtagaggctcagtttgatggcagcgactcagaagatggacatggcatcacacaaaatgtgctggttgatggtgttaagaaactctcagtttgtgtttctgagaaaggaagagaggatggtgatgcaccggttacaaaagatgagaccacctgcatttcacaagacacaagagctttatcggagaaatccctgcaaagatcagcaaaggtggtttacatcttggagaaaaaacattctcgagcagcaaccggcttcctcaaactcttggctgataagaacagcgaactgtttaggaaatacgccctgttttctccctcagaccaccgagtgcctagaatttatgtgcctctcaaggactgtccccaggactttgtggcacggcctaaagattatgccaacacactgttcatctgccgcattgtggactggaaggaggactgcaattttgccctggggcagctggctaagagtcttgggcaggctggtgaaattgagcctgaaacagaaggaatactaacagagtatggcgtggatttctctgatttctcttcagaagttctagaatgtcttcctcaaggcctgccatggacaattccaccagaggagttcagcaagagaagggatttaagaaaagactgtatcttcaccattgacccatcaaccgcccgagacctcgatgatgccctctcctgcaagccactcgctgacggcaacttcaaagtgggagttcacattgctgacgtgagttactttgttccggagggatctgatctggataaagtggctgccgagagggctacaagcgtctacttggttcaaaaggtggtccccatgcttcccaggctgctgtgtgaggagctgtgcagcctcaaccccatgtccgacaagctgaccttctctgtgatctggacactgactccagagggcaagatccttgatgaatggtttggccggaccatcatccgctcctgcaccaaacttagctacgagcatgcacagagcatgattgaaagcccaactgagaaaatccctgcgaaagagctgccccccatttccccagagcatagcagcgaggaggtacaccaggccgtcttgaatctccacggaattgccaagcagttacgccagcagcgctttgtggacggcgcacttcgtttggatcagctaaagcttgctttcactctggaccacgagaccggattgcctcaaggatgtcatatctatgagtaccgcgagagcaacaagctcgtggaggagttcatgctcttggccaacatggcagtggcccacaagatccaccgcgccttccccgagcaggccctgctgcgccggcaccccccgccccaaacaaggatgctcagtgacctggtggaattctgcgaccagatggggctgcccgtggacttcagctccgcaggagccctcaataaaagcctgacccaaacatttggagatgacaagtactcactggcccgcaaggaggtgctcaccaacatgtgctcccggcccatgcagatggcactgtacttctgctcggggctgctgcaggacccagcgcagttccggcactacgcgctcaatgtgcccctgtacacacacttcacctcgcccatccgccgctttgccgacgtcctggtgcaccgcctcctggctgccgcgttaggctatagggagcgactagacatggcgcccgataccctgcagaaacaggcggaccactgtaacgaccgccgcatggcgtccaagcgcgtgcaggagctcagtaccagtctcttctttgctgttctggtcaaggagagtggccccctggagtcagaagccatggtgatgggcatcctgaagcaagccttcgacgtgctggtgctgcgctacggcgtgcagaagcgcatctactgcaacgcactggccctgcggtcccaccacttccagaaggtgggcaagaagccggaactcacgctggtctgggagcctgaggacatggagcaggagccagcacagcaggtcatcaccatcttcagcctggtggaggtggtcctgcaggcagagtccacagccctcaagtacagcgccatcctgaagcggccaggcacccagggccacctgggccctgagaaggaggaggaggagtctgacggtgagcccgaggactcaagcaccagctgagctccaccagccgcctgccccgcctgccccgcctgcctgtcccgccacactggctttaggacctgttgacacggaggggggtttttaatttggtttttaacaactcaggggtttgtttttatttttatttaatttttgcagctcaacttttaaacaaactgcaggggagagggtggggctggaaggaaggctgaggcctggtcagcagtgaccccagcagagcaggccccagtcctcctgggaggctggccccccttttttctgggccctactgccctcctctgcccaggaaatgggggggtttcagcaactcagtgtcacagaataaaatcaagtgtggagtgccatctggtgtgtagggcgcctctgggaagcctgggcagcagaatgccccttgcacccagggcaagggacccagttcaggcttcacccctcgctgctgagccgatgtcaacacctggaactttcctgtcagttccaacacgattcagagctggctgcctggcagatgattgatactggagtctcattctgcctgattaaaaatggaattagtatgcaacactg

SEQ ID NO: 243158 - DNA, 2658 bp, Artificial Sequence
  derived and/or modified sequence
atgagccatcctgactacagaatgaacctccggcccctggggacccccagaggtgtgtctgctgtggctggtccacatgacattggtgcttcgccaggtgacaaaaagtcaaagaacaggtccacacgagggaagaaaaagagcatatttgaaacttacatgtccaaggaggatgtttcagaaggcttgaagagaggaacactcatccagggtgtattgagaattaatccaaagaagtttcatgaagccttcattccttccccggatggtgatcgagacatttttattgatggggttgttgctcgtaatagagccttaaatggggatctggtggtcgtgaaactgcttcccgaggagcattggaaggtagttaaaccagagagcaatgacaaagaaacagaagctgcgtatgaatcagatatccccgaggagctctgtggacaccatctcccgcaacagtccctgaaaagctataatgacagtcctgatgtcattgtagaggctcagtttgatggcagcgactcagaagatggacatggcatcacacaaaatgtgctggttgatggtgttaagaaactctcagtttgtgtttctgagaaaggaagagaggatggtgatgcaccggttacaaaagatgagaccacctgcatttcacaagacacaagagctttatcggagaaatccctgcaaagatcagcaaaggtggtttacatcttggagaaaaaacattctcgagcagcaaccggcttcctcaaactcttggctgataagaacagcgaactgtttaggaaatacgccctgttttctccctcagaccaccgagtgcctagaatttatgtgcctctcaaggactgtccccaggactttgtggcacggcctaaagattatgccaacacactgttcatctgccgcattgtggactggaaggaggactgcaattttgccctggggcagctggctaagagtcttgggcaggctggtgaaattgagcctgaaacagaaggaatactaacagagtatggcgtggatttctctgatttctcttcagaagttctagaatgtcttcctcaaggcctgccatggacaattccaccagaggagttcagcaagagaagggatttaagaaaagactgtatcttcaccattgacccatcaaccgcccgagacctcgatgatgccctctcctgcaagccactcgctgacggcaacttcaaagtgggagttcacattgctgacgtgagttactttgttccggagggatctgatctggataaagtggctgccgagagggctacaagcgtctacttggttcaaaaggtggtccccatgcttcccaggctgctgtgtgaggagctgtgcagcctcaaccccatgtccgacaagctgaccttctctgtgatctggacactgactccagagggcaagatccttgatgaatggtttggccggaccatcatccgctcctgcaccaaacttagctacgagcatgcacagagcatgattgaaagcccaactgagaaaatccctgcgaaagagctgccccccatttccccagagcatagcagcgaggaggtacaccaggccgtcttgaatctccacggaattgccaagcagttacgccagcagcgctttgtggacggcgcacttcgtttggatcagctaaagcttgctttcactctggaccacgagaccggattgcctcaaggatgtcatatctatgagtaccgcgagagcaacaagctcgtggaggagttcatgctcttggccaacatggcagtggcccacaagatccaccgcgccttccccgagcaggccctgctgcgccggcaccccccgccccaaacaaggatgctcagtgacctggtggaattctgcgaccagatggggctgcccgtggacttcagctccgcaggagccctcaataaaagcctgacccaaacatttggagatgacaagtactcactggcccgcaaggaggtgctcaccaacatgtgctcccggcccatgcagatggcactgtacttctgctcggggctgctgcaggacccagcgcagttccggcactacgcgctcaatgtgcccctgtacacacacttcacctcgcccatccgccgctttgccgacgtcctggtgcaccgcctcctggctgccgcgttaggctatagggagcgactagacatggcgcccgataccctgcagaaacaggcggaccactgtaacgaccgccgcatggcgtccaagcgcgtgcaggagctcagtaccagtctcttctttgctgttctggtcaaggagagtggccccctggagtcagaagccatggtgatgggcatcctgaagcaagccttcgacgtgctggtgctgcgctacggcgtgcagaagcgcatctactgcaacgcactggccctgcggtcccaccacttccagaaggtgggcaagaagccggaactcacgctggtctgggagcctgaggacatggagcaggagccagcacagcaggtcatcaccatcttcagcctggtggaggtggtcctgcaggcagagtccacagccctcaagtacagcgccatcctgaagcggccaggcacccagggccacctgggccctgagaaggaggaggaggagtctgacggtgagcccgaggactcaagcaccagctga

SEQ ID NO: 243159 - DNA, 2298 bp, Artificial Sequence
  derived and/or modified sequence
attctccttagcaactgcgggactgcggcggcgccggcctccggggagaaacgcgaatgacaacagagctgctcaaggcgggaactctgagctaagcagtggaggtttctctggatctggagagaagagtgaccttggagccaataatgagccatcctgactacagaatgaacctccggcccctggggacccccagaggtgtgtctgctgtggctggtccacatgacattggtgcttcgccaggtgacaaaaagtcaaagaacaggtccacacgagggaagaaaaagagcatatttgaaacttacatgtccaaggaggatgtttcagaaggcttgaagagaggaacactcatccagggtgtattgagaattaatccaaagaagtttcatgaagccttcattccttccccggatggtgatcgagacatttttattgatggggttgttgctcgtaatagagccttaaatggggatctggtggtcgtgaaactgcttcccgaggagcattggaaggtagttaaaccagagagcaatgacaaagaaacagaagctgcgtatgaatcagatatccccgaggagctctgtggacaccatctcccgcaacagtccctgaaaagctataatgacagtcctgatgtcattgtagaggctcagtttgatggcagcgactcagaagatggacatggcatcacacaaaatgtgctggttgatggtgttaagaaactctcagtttgtgtttctgagaaaggaagagaggatggtgatgcaccggttacaaaagatgagaccacctgcatttcacaagacacaagagctttatcggagaaatccctgcaaagatcagcaaaggtggtttacatcttggagaaaaaacattctcgagcagcaaccggcttcctcaaactcttggctgataagaacagcgaactgtttaggaaatacgccctgttttctccctcagaccaccgagtgcctagaatttatgtgcctctcaaggactgtccccaggactttgtggcacggcctaaagattatgccaacacactgttcatctgccgcattgtggactggaaggaggactgcaattttgccctggggcagctggctaagagtcttgggcaggctggtgaaattgagcctgaaacagaaggaatactaacagagtatggcgtggatttctctgatttctcttcagaagttctagaatgtcttcctcaaggcctgccatggacaattccaccagaggagttcagcaagagaagggatttaagaaaagactgtatcttcaccattgacccatcaaccgcccgagacctcgatgatgccctctcctgcaagccactcgctgacggcaacttcaaagtgggagttcacattgctgacgtgagttactttgttccggagggatctgatctggataaagtggctgccgagagggctacaagcgtctacttggttcaaaaggtggtccccatgcttcccaggctgctgtgtgaggagctgtgcagcctcaaccccatgtccgacaagctgaccttctctgtgatctggacactgactccagagggcaagatccttgatgaatggtttggccggaccatcatccgctcctgcaccaaacttagctacgagcatgcacagagcatgattgaaagcccaactgagaaaatccctgcgaaagagctgccccccatttccccagagcatagcagcgaggaggtacaccaggccgtcttgaatctccacggaattgccaagcagttacgccagcagcgctttgtggacggcgcacttcgtttggatcagctaaagcttgctttcactctggaccacgagaccggattgcctcaaggatgtcatatctatgagtaccgcgagagcaacaagctcgtggaggagttcatgctcttggccaacatggcagtggcccacaagatccaccgcgccttccccgagcaggccctgctgcgccggcaccccccgccccaaacaaggatgctcagtgacctggtggaattctgcgaccagatggggctgcccgtggacttcagctccgcaggagccctcaataaaagcctgacccaaacatttggagatgacaagtactcactggcccgcaaggaggtgctcaccaacatgtgctcccgcctgcctgtcccgccacactggctttaggacctgttgacacggaggggggtttttaatttggtttttaacaactcaggggtttgtttttatttttatttaatttttgcagctcaacttttaaacaaactgcaggggagagggtggggctgga

SEQ ID NO: 243160 - DNA, 2133 bp, Artificial Sequence
  derived and/or modified sequence
tttcgcccttgtcgcagctgaaccgccgactacgagctcctgcaccgcgcacacaccccgcgcgcttcgctctcggcctcgcccggccaccgtcgctctctagaacgccgcgcccgtgacccggaagagcattctccttagcaactgcgggactgcggcggcgccggcctccggggagaaacgcgaatgacaacagagctgctcaaggcgggaactctgagctaagcagtggaggtttctctggatctggagagaagagtgaccttggagccaataatgagccatcctgactacagaatgaacctccggcccctggggacccccagaggtgtgtctgctgtggctggtccacatgacattggtgcttcgccaggtgacaaaaagtcaaagaacaggtccacacgagggaagaaaaagagcatatttgaaacttacatgtccaaggaggatgtttcagaaggcttgaagagaggaacactcatccagggtgtattgagaattaatccaaagaagtttcatgaagccttcattccttccccggatggtgatcgagacatttttattgatggggttgttgctcgtaatagagccttaaatggggatctggtggtcgtgaaactgcttcccgaggagcattggaaggtagttaaaccagagagcaatgacaaagaaacagaagctgcgtatgaatcagatatccccgaggagctctgtggacaccatctcccgcaacagtccctgaaaagctataatgacagtcctgatgtcattgtagaggctcagtttgatggcagcgactcagaagatggacatggcatcacacaaaatgtgctggttgatggtgttaagaaactctcagtttgtgtttctgagaaaggaagagaggatggtgatgcaccggttacaaaagatgagaccacctgcatttcacaagacacaagagctttatcggagaaatccctgcaaagatcagcaaaggtggtttacatcttggagaaaaaacattctcgagcagcaaccggcttcctcaaactcttggctgataagaacagcgaactgtttaggaaatacgccctgttttctccctcagaccaccgagtgcctagaatttatgtgcctctcaaggactgtccccaggactttgtggcacggcctaaagattatgccaacacactgttcatctgccgcattgtggactggaaggaggactgcaattttgccctggggcagctggctaagagtcttgggcaggctggtgaaattgagcctgaaacagaaggaatactaacagagtatggcgtggatttctctgatttctcttcagaagttctagaatgtcttcctcaaggcctgccatggacaattccaccagaggagttcagcaagagaagggatttaagaaaagactgtatcttcaccattgacccatcaaccgcccgagacctcgatgatgccctctcctgcaagccactcgctgacggcaacttcaaagtgggagttcacattgctgacgtgagttactttgttccggagggatctgatctggataaagtggctgccgagagggctacaagcgtctacttggttcaaaaggtggtccccatgcttcccaggctgctgtgtgaggagctgtgcagcctcaaccccatgtccgacaagctgaccttctctgtgatctggacactgactccagagggcaagatccttgatgaatggtttggccggaccatcatccgctcctgcaccaaacttagctacgagcatgcacagagcatgattgaaagcccaactgagaaaatccctgcgaaagagctgccccccatttccccagagcatagcagcgaggaggtacaccaggccgtcttgaatctccacggaattgccaagcagttacgccagcagcgctttgtggacggcgcacttcgtttggatcagctaaagcttgctttcactctggaccacgagaccggattgcctcaaggatgtcatatctatgagtaccgcgagagcaacaagccctgctgcgccggcaccccccgccccaaacaaggatgctcagtgacctggtggaattctgcgaccagatggggctgcccgtggacttcagctccgcaggagccctcaatgaaagcc

SEQ ID NO: 243161 - protein, 341 aa, Artificial Sequence
  derived and/or modified sequence
MSVLDALWEDRDVRFDLSAQQMKTRPGEVLIDCLDSIEDTKGNNGDRGRLLVTNLRILWHSLALSRVNVSVGYNCILNITTRTANSKLRGQTEALYILTKCNSTRFEFIFTNLVPGSPRLFTSVMAVHRAYETSKMYRDFKLRSALIQNKQLRLLPQEHVYDKINGVWNLSSDQGNLGTFFITNVRIVWHANMNDSFNVSIPYLQIRSIKIRDSKFGLALVIESSQQSGGYVLGFKIDPVEKLQESVKEINSLHKVYSASPIFGVDYEMEEKPQPLEALTVEQIQDDVEIDSDGHTDAFVAYFADGNKQQDREPVFSEELGLAIEKLKDGFTLQGLWEVMS

SEQ ID NO: 243162 - protein, 320 aa, Artificial Sequence
  derived and/or modified sequence
MSVLDALWEDRDVRFDLSAQQMKTRPGEVLIDCLDSIEDTKGNNGDRGRLLVTNLRILWHSLALSRVNVSVGYNCILNITTRTANSKLRGQTEALYILTKCNSTRFEFIFTNLVPGSPRLFTSVMAVHRAYETSKMYRDFKLRSALIQNKQLRLLPQEHVYDKINGVWNLSSDQGNLGTFFITNVRIVWHANMNDSFNVSIPYLQISGGYVLGFKIDPVEKLQESVKEINSLHKVYSASPIFGVDYEMEEKPQPLEALTVEQIQDDVEIDSDGHTDAFVAYFADGNKQQDREPVFSEELGLAIEKLKDGFTLQGLWEVMS

SEQ ID NO: 243163 - protein, 544 aa, Artificial Sequence
  derived and/or modified sequence
MSVLDALWEDRDVRFDLSAQQMKTRPGEVLIDCLDSIEDTKGNNGDRGRLLVTNLRILWHSLALSRVNVSVGYNCILNITTRTANSKLRGQTEALYILTKCNSTRFEFIFTNLVPGSPRLFTSVMAVHRAYETSKMYRDFKLRSALIQNKQLRLLPQEHVYDKINGVWNLSSDQGNLGTFFITNVRIVWHANMNDSFNVSIPYLQIRSIKIRDSKFGLALVIESSQQSGGYVLGFKIDPVEKLQESVKEINSLHKVYSASPIFGVDYEMEEKPQPLEALTVEQIQDDVEIDSDGHTDAFVAYFADGNKLDSIASEWVGLPPLPSARCLFGLGEVDDKIYVVAGKDLQTEASLDSVLCYDPVAAKWNEVKKLPIKVYGHNVISHKGMIYCLGGKTDDKKCTNRVFIFNPKKGDWKDLAPMKIPRSMFGVAVHKGKIVIAGGVTEDGLSASVEAFDLTTNKWDVMTEFPQERSSISLVSLAGSLYAIGGFAMIQLESKEFAPTEVNDIWKYEDDKKEWAGMLKEIRYASGASCLATRLNLFKLSKL

SEQ ID NO: 243164 - DNA, 1026 bp, Artificial Sequence
  derived and/or modified sequence
atgtcagtgctggacgctctgtgggaggatagagacgtcagattcgatttaagcgcccagcagatgaaaactagacctggcgaagtgctgattgattgcctggactctatagaggataccaagggaaataacggcgatagggggcgactgctcgtgaccaacctgcgcatcctctggcactcactggcactgtcgcgcgttaacgtgtctgtgggctataactgcattcttaatatcacaacccggacggctaatagcaaactgagggggcagacagaggcactgtatatcttgaccaaatgtaatagcacaagatttgagtttatttttaccaacctggtgcctggttctccccgcttgtttacaagtgtgatggcagtacatcgggcctacgagacatctaaaatgtatcgtgattttaaactccgcagcgccctgattcagaacaagcagctgaggctgcttccacaggagcacgtatacgacaagataaatggggtatggaatctgtcgagcgatcaggggaacctggggacattttttatcacaaatgtgcgcatcgtctggcacgctaacatgaatgacagctttaatgtctctattccttatctccagatccggtccataaagatccgcgattcaaagtttggactggccctggtgatcgaatcaagtcaacagtcagggggttatgtccttgggtttaaaattgacccagttgagaaattgcaagagtccgtgaaagaaattaatagtctacacaaggtttattctgccagccccattttcggcgttgactatgagatggaagagaaaccccaacctctggaagcgttaacagtcgaacaaattcaagatgatgtcgagatcgattcagacggacatacggacgcttttgtggcctattttgccgacggtaacaagcagcaggatcgtgaaccggttttttcagaagagctcggattggcgatcgagaagctgaaggacggttttaccctgcagggactgtgggaagtcatgagttag

SEQ ID NO: 243165 - DNA, 963 bp, Artificial Sequence
  derived and/or modified sequence
atgtcagtgctcgatgcactctgggaggatcgggatgtgcgctttgatctgtctgcccagcagatgaaaaccagacccggcgaagtgcttattgactgtcttgactctatagaagacaccaaaggtaacaacggagaccgagggcgtctgctggtaacgaatttgcgcatcctgtggcactctctggccctgtccagagttaacgtttccgtgggctataattgcatactgaacatcaccacacgcacggcaaactccaagctcagaggtcaaaccgaagctctatacatattgactaaatgcaacagcacacgattcgagtttattttcactaacctagttccaggttctccccgattatttacgtccgtcatggctgtgcaccgagcgtatgagacgtcgaaaatgtacagagatttcaaactaaggagtgctttaatacagaacaaacagctccggttgcttccccaagagcacgtgtatgataaaatcaacggtgtctggaatctctcttccgaccagggcaacctcggcacattcttcattaccaacgtgagaattgtctggcatgccaatatgaatgattcattcaatgtaagtatcccttaccttcaaattagcggcgggtatgttctgggtttcaagattgatccagtggagaaactgcaagagtcagttaaagaaatcaactcactccataaggtttacagtgcttcacccatctttggcgtcgactacgagatggaagagaagccgcaaccactggaagccttaacagtggaacagatccaggacgatgtggagatcgattccgatgggcacacggacgcattcgttgcctatttcgcagacggcaacaagcagcaggaccgcgagcccgtcttttcagaagagctcggattggcgatcgagaaactgaaggacggttttacactccagggactatgggaggtgatgtcttag

SEQ ID NO: 243166 - DNA, 1635 bp, Artificial Sequence
  derived and/or modified sequence
atgagtgttcttgacgctctctgggaagatcgggacgtccgcttcgatctttcagctcagcagatgaagacacgtcccggcgaagttttaatcgattgtctggactctatagaggacactaagggaaacaacggcgacagagggcgtctcctcgtcacaaatctgaggatactgtggcattcgctcgccttgtcacgagttaatgtaagtgttggctataattgtatcttgaatatcacaacgcgaactgcaaattcaaaattacggggccagacagaggctttgtatatcctgaccaaatgcaactccactaggtttgagtttatctttacaaacctggtacccggctcacccaggttgtttacgtccgtgatggctgtgcatcgggcctacgaaacctcaaagatgtatcgggatttcaaactaagatcagccctaatccaaaacaagcagttgaggctactacctcaggaacacgtgtatgacaaaattaatggagtctggaacctctcttccgatcagggtaatttgggaacttttttcatcactaacgtcaggatagtgtggcacgcaaatatgaatgatagctttaatgtgtcaatcccatacctccagataaggtctataaagatcagagactccaagttcggattagctttggtcattgagtcatcacagcagagcggcggctacgtactcggttttaagatagaccccgttgagaaactgcaagagtctgtcaaagaaatcaactccttgcacaaagtttactcagccagccctatatttggggtcgactatgaaatggaggagaaaccacagcccctagaagcactcaccgtagagcagatacaggacgacgtcgaaatcgattctgacggtcataccgacgcttttgtagcctacttcgctgacggtaacaagttagatagcattgcttctgaatgggtgggactgcctccactgccatcagccagatgcctgttcgggttaggagaggtcgatgacaaaatttacgtcgtggctggcaaggatctgcagaccgaagcatcccttgattctgtgctctgttacgaccctgtggccgcaaagtggaacgaggtgaagaagctccctatcaaggtctacgggcacaacgtgatctcccacaaggggatgatctattgtctgggcggcaagactgacgacaaaaagtgcacgaacagagtctttattttcaaccccaagaagggcgattggaaggacttggctcccatgaaaattcctagatcaatgtttggagtggctgtacacaaagggaaaatcgtgattgctggtggggtgacggaggacggcctctccgctagtgtcgaggcctttgacctgaccactaacaagtgggatgtgatgaccgaattccctcaggagcgtagcagcattagtctggtctcgctcgccggaagcctgtatgccatcggaggcttcgcaatgatccaactcgaatcgaaagagtttgctcctactgaagtgaatgacatctggaagtatgaagatgataagaaggaatgggctggaatgctgaaggaaattaggtatgcttccggcgcatcttgtttagcaactcgactgaatttatttaaattgagcaagctgtag

SEQ ID NO: 243167 - DNA, 1026 bp, Artificial Sequence
  derived and/or modified sequence
atgtctgtgctggatgccctgtgggaggacagagatgtgcgctttgacctgagcgcccagcagatgaagaccaggcctggagaggtgctgattgactgcctggacagcattgaggacaccaagggcaacaacggggaccggggccgcctgctggtgaccaacctgcgcatcctgtggcacagcctggccctgagccgggtgaatgtgtctgtgggctacaactgcatcctgaacatcaccaccaggacagccaacagcaagctgcggggccagacagaggccctgtacatcctgaccaagtgcaacagcaccaggtttgagttcatcttcaccaacctggtgcccggcagccccaggctcttcacctctgtgatggctgtgcaccgggcctatgagaccagcaagatgtacagagacttcaagctgcggagcgccctgatccagaacaagcagctgcggctgctgccccaggagcacgtgtatgacaagatcaatggagtgtggaacctgagcagtgaccagggcaacctgggcaccttcttcatcaccaacgtgagaattgtgtggcacgccaacatgaatgacagcttcaacgtgtccatcccctacctgcagatccgcagcatcaagatccgggacagcaagtttggcctggccctggtgattgagagcagccagcagagcggcggctacgtgctgggcttcaagattgatcctgtggagaagctgcaggagagcgtgaaggagatcaacagcctgcacaaggtgtacagcgccagccccatctttggagtggactatgagatggaggagaagccccagcccctggaggccctgactgtggagcagatccaggatgatgtggagattgacagtgatggccacacagatgcctttgtggcctactttgctgatggcaacaagcagcaggaccgggagcccgtcttcagcgaggagctgggcctggccatcgagaagctgaaggatggcttcaccctgcagggcctgtgggaggtgatgtcctag

SEQ ID NO: 243168 - DNA, 963 bp, Artificial Sequence
  derived and/or modified sequence
atgtctgtgctggatgccctgtgggaggacagagatgtgcgctttgacctgagcgcccagcagatgaagaccaggcctggagaggtgctgattgactgcctggacagcattgaggacaccaagggcaacaacggggaccggggccgcctgctggtgaccaacctgcgcatcctgtggcacagcctggccctgagccgggtgaatgtgtctgtgggctacaactgcatcctgaacatcaccaccaggacagccaacagcaagctgcggggccagacagaggccctgtacatcctgaccaagtgcaacagcaccaggtttgagttcatcttcaccaacctggtgcccggcagccccaggctcttcacctctgtgatggctgtgcaccgggcctatgagaccagcaagatgtacagagacttcaagctgcggagcgccctgatccagaacaagcagctgcggctgctgccccaggagcacgtgtatgacaagatcaatggagtgtggaacctgagcagtgaccagggcaacctgggcaccttcttcatcaccaacgtgagaattgtgtggcacgccaacatgaatgacagcttcaacgtgtccatcccctacctgcagatcagcggcggctacgtgctgggcttcaagattgatcctgtggagaagctgcaggagagcgtgaaggagatcaacagcctgcacaaggtgtacagcgccagccccatcttcggcgtggactatgagatggaggagaagccccagcccctggaggccctgactgtggagcagatccaggatgatgtggagattgacagtgatggccacacagatgcctttgtggcctactttgctgatggcaacaagcagcaggaccgggagcctgtgttcagcgaggagctgggcctggccatcgagaagctgaaggatggcttcaccctgcagggcctgtgggaggtgatgtcctag

SEQ ID NO: 243169 - DNA, 1635 bp, Artificial Sequence
  derived and/or modified sequence
atgtctgtgctggatgccctgtgggaggacagagatgtgcgctttgacctgagcgcccagcagatgaagaccaggcctggagaggtgctgattgactgcctggacagcattgaggacaccaagggcaacaacggggaccggggccgcctgctggtgaccaacctgcgcatcctgtggcacagcctggccctgagccgggtgaatgtgtctgtgggctacaactgcatcctgaacatcaccaccaggacagccaacagcaagctgcggggccagacagaggccctgtacatcctgaccaagtgcaacagcaccaggtttgagttcatcttcaccaacctggtgcccggcagccccaggctcttcacctctgtgatggctgtgcaccgggcctatgagaccagcaagatgtacagagacttcaagctgcggagcgccctgatccagaacaagcagctgcggctgctgccccaggagcacgtgtatgacaagatcaatggagtgtggaacctgagcagtgaccagggcaacctgggcaccttcttcatcaccaacgtgagaattgtgtggcacgccaacatgaatgacagcttcaacgtgtccatcccctacctgcagatccgcagcatcaagatccgggacagcaagtttggcctggccctggtgattgagagcagccagcagagcggcggctacgtgctgggcttcaagattgatcctgtggagaagctgcaggagagcgtgaaggagatcaacagcctgcacaaggtgtacagcgccagccccatctttggagtggactatgagatggaggagaagccccagcccctggaggccctgactgtggagcagatccaggatgatgtggagattgacagtgatggccacacagatgcctttgtggcctactttgctgatggcaacaagctggacagcatcgccagcgagtgggtgggcctgccccccctgcccagcgcccgctgcctgtttggcctgggggaggtggatgacaagatctacgtggtggccggcaaggacctgcagacagaggccagcctggacagcgtgctgtgctatgaccctgtggccgccaagtggaatgaggtgaagaagctgcccatcaaggtgtatggccacaacgtcatcagccacaagggcatgatctactgcctgggcggcaagacagatgacaagaagtgcaccaacagagtcttcatcttcaaccccaagaagggggactggaaggacctggcccccatgaagatccccaggtccatgtttggagtggccgtgcacaagggcaagatcgtgattgctgggggcgtgacagaagatggcctgagcgcctctgtggaggcctttgacctgaccaccaacaagtgggatgtgatgacagagttcccccaggagaggagcagcatcagcctggtgtccctggccggcagcctgtatgccatcggcggctttgccatgatccagctggagagcaaggagtttgcccccacagaggtgaatgacatctggaagtatgaagatgacaagaaggagtgggccggcatgctgaaggagatccgctatgccagcggggccagctgcctggccacccggctgaacctcttcaagctgagcaagctgtag

SEQ ID NO: 243170 - DNA, 1026 bp, Artificial Sequence
  derived and/or modified sequence
atgagcgtgctggacgccctgtgggaggaccgggacgtgcggttcgatctgtcggctcaacagatgaagactcggcctggcgaagttctgatcgattgcttggattctatcgaggatactaaagggaacaatggcgatcgtggtcgactgttggttaccaatctgcgaatactctggcactccctggctttatctcgcgtcaacgtgtctgtggggtataattgtatcctaaacatcactaccaggactgccaacagcaagcttagaggccagacggaagccctgtatatcctcacaaagtgtaactcaacccgcttcgagtttatctttaccaacctagtgcccgggtcgcctcggttattcaccagcgttatggctgtacatcgtgcatacgagacctccaaaatgtacagggattttaaattgcgcagtgcccttattcagaacaaacagctgcggctgctcccccaggaacatgtctatgataagatcaatggtgtgtggaatctatccagcgatcagggtaatctggggacattctttattacaaatgtgcgaatcgtgtggcacgctaatatgaacgacagttttaacgttagcatcccctatcttcagattcgctcaattaaaattcgtgacagtaaattcggtctcgctttagtgatcgaatcgtcccagcagagcgggggatatgtgcttggcttcaaaatcgatcctgtcgaaaaactgcaggaaagcgtcaaggagatcaactcgctccacaaagtgtactctgccagtcctatctttggagtagactatgagatggaagagaaaccacaaccattggaagcactaactgtagaacagattcaagacgacgttgagatcgattctgatggacacactgacgcctttgtagcttatttcgcggatggaaataagcagcaggaccgcgaacctgtattctctgaggaactcggactggctatcgagaagcttaaggacgggttcactttacagggtctctgggaggtcatgtcctag

SEQ ID NO: 243171 - DNA, 963 bp, Artificial Sequence
  derived and/or modified sequence
atgagcgtgctggacgccctgtgggaggaccgggacgtgcggttcgatctgagcgcacagcagatgaagacgcggccgggcgaggttctaatcgactgcctggacagcatcgaagatactaaagggaacaacggtgaccggggccggctgcttgtcaccaacttgcggatcctctggcactccctcgccttgtctcgggtcaacgtgtcagttggatacaattgcatcctgaatatcaccacacggaccgccaacagtaagcttaggggccagacggaagcgttgtatattctgacaaaatgcaattcaactagattcgagttcatcttcactaatttggttcctggctctccccggctatttacgtcagttatggcggtgcatcgcgcatatgaaacaagcaagatgtaccgggactttaaactgcggagcgcgctcatacaaaataagcaactacgattgttgcctcaggaacatgtgtacgataaaattaatggcgtgtggaatctctccagtgatcagggcaatcttggcacattttttatcacaaatgtgcgaatcgtatggcacgccaatatgaacgatagctttaacgtgtctatcccctatctgcaaatctctggaggatacgtgctgggcttcaagatcgaccctgtggaaaagctacaggaaagcgttaaggagattaattcattgcacaaggtctacagcgccagccctatcttcggggtcgattacgagatggaggagaagccacagccactggaggccctgactgtggagcagattcaggacgatgtggagattgattctgacggtcatacggatgcgttcgtagcttatttcgcagacggcaataaacagcaggatagagagccggtcttctctgaggaattaggtttggctatagaaaagctcaaagacggctttacactccagggcctgtgggaggtcatgagctag

SEQ ID NO: 243172 - DNA, 1635 bp, Artificial Sequence
  derived and/or modified sequence
atgagcgtgctggacgccctgtgggaggaccgggacgtgcggttcgatctgagtgctcagcagatgaaaaccaggcccggcgaagtactgatagactgtttggacagtattgaggatactaagggcaataacggggaccgagggcgactgttggtgaccaatttgagaatactgtggcattccttggccctatccagggtgaatgtttcagtggggtataattgtatactgaatatcactacaaggactgccaactctaagctgaggggacagacggaagcgctgtacatcctaactaaatgtaacagtacaagatttgagttcatcttcaccaatctggtcccagggtccccacgcctattcacaagtgtgatggccgtccacagggcatacgagacttccaagatgtatcgagatttcaagcttcgctcggctctaatccagaataagcagctcaggctgcttccgcaagaacatgtgtacgataagatcaatggggtatggaacctgtcttctgatcaggggaacttgggtacattctttataacgaacgtgagaatcgtgtggcacgccaacatgaacgattcatttaacgtgagtataccatatctccaaatcagatctatcaaaatccgcgattcaaagttcgggctcgctttggtaatcgaatcaagccagcagtctggcggctacgtcctgggattcaagattgacccagtggaaaagctgcaggagagtgttaaggagatcaactctttgcacaaggtgtactccgccagtcccatcttcggagtcgactatgaaatggaagaaaagcctcagcccctcgaagctcttacagtggagcaaatacaagatgacgtagaaattgacagcgacggccacactgacgccttcgttgcgtactttgctgacgggaacaagctggacagcatcgcttcggaatgggtgggtctgccacctttaccctctgcgaggtgcctctttgggcttggggaggtggatgacaagatctatgttgtggcaggtaaagacctgcagacagaagcgtctctggacagtgtgctctgttatgatcctgtcgccgcaaaatggaacgaggtgaagaagttgccgattaaggtttatggacataacgtgataagccacaagggcatgatatactgcctgggcggtaaaactgatgacaagaagtgcacaaatcgtgtgttcattttcaaccccaagaaaggagattggaaggatttagcgcctatgaagatccccaggtctatgttcggtgtggctgtgcataagggcaagatcgtcatcgcaggtggtgtcacggaggatggactatccgcatcggttgaggcattcgatcttactaccaataagtgggacgtaatgaccgagtttccgcaggagagatcgtcaatctctcttgtgtcactcgccgggagtctctacgctattggagggttcgccatgatccaactggagtcaaaagaatttgctcctactgaggttaacgatatttggaaatacgaagacgataaaaaagaatgggctggaatgctaaaggaaataaggtatgcttccggggccagttgtctggctactagacttaacctgttcaagctcagcaaactttag

SEQ ID NO: 243173 - DNA, 1026 bp, Artificial Sequence
  derived and/or modified sequence
atgtctgtactagacgctttgtgggaagatagggatgtcagatttgacctttccgcacagcagatgaaaactcggccaggggaagtccttattgactgcctggacagcattgaggacaccaaaggcaataacggagatcgaggtagactcctagtaactaatcttagaatcttgtggcattctcttgccctatcacgggtcaacgtctccgtcgggtataattgtatcctcaacataaccactcgcactgccaattcgaagctgaggggtcagactgaggccttatacattttaacgaaatgtaactctaccaggttcgaatttattttcactaacctggtgcccggttcaccccgtttgtttacaagcgtaatggccgtgcacagagcatacgagacttcaaaaatgtaccgggatttcaagttacggagcgcactcatacagaacaaacagctccgtctcttaccccaggaacatgtatacgacaaaatcaatggtgtgtggaatttgtcctctgatcaggggaacttagggacattctttataaccaatgtccgcatcgtgtggcatgccaatatgaacgacagtttcaatgttagtatcccgtacctccagattagatctataaagattcgcgattccaaatttggactagctcttgtcatcgaaagttctcaacagtccggcggatacgttcttggattcaagatcgaccctgtggagaagctgcaggagtcagtaaaggaaattaactccctgcataaagtgtattccgcctcaccaattttcggggtggactatgagatggaggagaagccacagccgctcgaagccttgactgtggagcagatccaggacgacgtcgaaatcgactccgacggtcatactgatgccttcgtggcgtatttcgctgatggcaataaacagcaggatcgcgagccagtcttttctgaagagctagggctagccattgagaagctgaaggacgggttcactctacagggcctctgggaagttatgagttag

SEQ ID NO: 243174 - DNA, 963 bp, Artificial Sequence
  derived and/or modified sequence
atgtccgttctggacgctctctgggaggacagagacgtcagattcgatttgtccgctcagcagatgaagacccgcccaggcgaagtgttgatcgattgcctggactcaatcgaggatactaaaggcaacaacggagaccgcggtcgcctgcttgtgaccaatcttaggatactgtggcactctctagcattaagtagagttaatgtgtctgtcgggtataactgtattcttaacattaccacccgtacagcaaattccaagctgcggggacagaccgaagcactttacatcctgaccaagtgtaacagcacaaggtttgagttcatctttactaacctcgtcccaggctctccccgactcttcaccagcgtaatggccgtgcacagagcatacgaaacttccaagatgtaccgcgattttaagctgaggtccgcactgatccagaacaagcagctacggctactgccccaggaacacgtttacgataagataaatggtgtttggaacctcagctcggaccaggggaacctggggaccttctttataactaatgtcagaattgtatggcacgctaatatgaacgattcttttaacgtgtccattccatatctccagatttctgggggttatgtcctcggtttcaagattgatcccgtggagaaattacaggagtccgtcaaggaaatcaacagcctgcacaaggtctactccgcctctccaatctttggagtggattacgaaatggaagagaagccccagcctctcgaagcccttaccgttgaacagatacaggacgatgtagagattgattccgatggccatacggatgcattcgtcgcctattttgcagatggcaacaaacagcaggatcgcgaacccgtattctctgaagagctgggcctggcaattgagaagctgaaggatggatttaccctccaggggctctgggaagtcatgtcgtag

SEQ ID NO: 243175 - DNA, 1635 bp, Artificial Sequence
  derived and/or modified sequence
atgtctgtactcgacgccctgtgggaggatcgcgatgtgcgatttgacttgtcagctcaacaaatgaagacaaggcctggggaggtccttatcgattgcctcgattctatcgaagataccaagggcaacaacggagaccgtgggaggcttcttgttaccaatttaaggattctgtggcactccctcgctttaagtcgggtgaacgtgagcgtaggttacaactgtatacttaatatcaccaccaggacggccaactccaaactgcgcggacagaccgaagccctgtatatcttaaccaaatgcaattctacccggtttgagtttatattcaccaacttggtccctggctctccgaggctgttcacctctgtaatggccgttcatagggcttacgagacttccaaaatgtaccgcgattttaagctgaggagtgccctgatccagaataagcaactcagactgctgccacaggaacatgtctacgataaaatcaacggagtgtggaatctcagcagtgatcaaggaaacctgggtacttttttcattactaatgtaagaatcgtatggcacgccaacatgaatgatagctttaacgtttctattccctacctgcaaatcaggagcattaaaatcagagactctaaattcggtctcgctcttgtgatcgagagttcccagcaatccggagggtacgtgctggggtttaaaattgatcctgtggagaagctgcaggagtccgtgaaggagattaattccctgcataaggtgtattccgcttctccgatcttcggggtcgattacgaaatggaggaaaagcctcaacccctagaagccctgactgttgagcagatccaggatgacgtggagatagactcagacgggcacactgacgcttttgtcgcctactttgctgacggtaacaaacttgattccattgccagcgaatgggtgggcctgccccctctgcctagcgcccgttgcctttttgggctgggagaagtggatgacaagatatatgtggtcgctggaaaagacctgcagaccgaagccagccttgattccgtcctttgctatgacccagttgcggcaaagtggaatgaagtgaaaaagctacctatcaaagtatatggtcacaacgtgatatctcacaaagggatgatttactgcttgggcggaaagacagacgacaagaagtgcaccaaccgtgtgtttatcttcaaccccaaaaagggcgactggaaagatcttgccccaatgaaaatccccaggtcaatgtttggcgtggccgtgcataagggtaaaatagttattgcgggtggcgtgactgaggatggtctgtctgcctccgtcgaggcctttgatcttaccacaaataaatgggatgtgatgaccgaatttccccaggagagaagttcaatctctcttgtgtctcttgctggtagcctgtacgcaatcggaggattcgcaatgatccagcttgagtcaaaggaatttgctccaaccgaagtcaacgatatttggaaatatgaagacgataagaaagagtgggccggtatgctcaaagagattcgctatgcaagtggtgcaagctgccttgctacacgcttaaatctgtttaagctatccaaactgtag

SEQ ID NO: 243176 - DNA, 3475 bp, Artificial Sequence
  derived and/or modified sequence
aaactgcagggattacaggcagaagccaccatgcccggctaataacctgaatctcttgacggtgaagagaaataaggagaggggtaaaatggctaaaggatgtctgtttggaggcaaggaaggtcgcccagaggtcaggcacgctccccttggcggacacagctgggcttctcagagactcctaaatcctgcctcgcatctcaaatcggcttaacgacgcgaaagagctgggcgacgcgcgcgcactctcgcggaagcttgagtctcggcgcccgccgtagacgtcgtgacagaggcggcccgttgccttggagccagagagacgcagctaggcctgcacggctgtggagagatcctgccacgggccttgttcaccatgtcggtgctggatgcgctttgggaggatcgggatgtccgtttcgacctgtccgcgcagcaaatgaaaacaagacctggagaagtccttattgattgtttagattccattgaagacaccaaaggaaataatggagatagaggtagactcttggtaacaaatttaagaattctctggcactctttggcattatcaagagtcaatgtttctgtcggttacaattgcatattgaatattacaacaaggactgctaactctaaattacgaggccaaactgaagctctctatatactaacaaaatgtaacagtactcgttttgaatttatatttacaaatttggttcctggaagccctagactttttacttctgtgatggcagtacacagagcttatgaaacttctaaaatgtatcgtgattttaaattaagaagtgcactaattcagaacaagcaactaagactgttgccacaagaacatgtatatgataaaataaatggagtttggaatttatccagtgatcagggcaatttaggaaccttttttattaccaatgtgagaattgtgtggcatgcaaatatgaatgatagttttaatgtcagtataccatatctgcaaattcgttcaataaagattagagattcaaaatttggtttagctcttgtcatagaaagctctcagcagagtggtggatatgttcttggctttaaaatagatcctgtggaaaaactacaagaatcagttaaggaaatcaattcacttcacaaagtctattctgccagtcccatatttggagttgattatgagatggaagaaaagccccagccgctcgaagctctgacagtcgaacaaattcaagatgatgtagaaatagactctgatggtcacacggatgcttttgtggcttattttgctgatggcaataagcaacaagatcgtgaacctgtattttcagaagaactggggcttgcaatagagaaattgaaggatggattcaccctacagggactttgggaagtaatgagttgattgaccttgagttgagatggatttctattaaagatatctctagtttaaagatactagtcacctgccataagtcatggaatagtttttatatttacagcttttatatttaaaacttgtaagagtttttttaatgattgaggaaaaagtcatttagaaaacttcagttttcggccagcgcgtcgagggaggggccagcgacacatggcctagtaaccgtccggccgcggcgctggcttaagccatggctgagggtagctggattcctcaggcccgggcgctcctacagcagtgcctgcacgcccggctgcaaattcgcccagccaatggggacgttgcggcccagtgggtggaggtccaaagaggactggtgatctacgtgtgctttttcaagggagctgataaagaacttcttcccaaaatggccgaagctggactgtactgctgccatctctggctcactgcaacctccctgcctgattctcctgcctcagcctgccgagtgcctgcgattacaggcgcgcgccgccacacctgactggttttcgtatttttttggtggagacggggtttcgctgtgttggccgggctggtctccagctcctaaccgcgagtgatccgccagcctcggcctcccgaggtgccgggattgcagacggagtctggttcacttagtgctcaatggtgcccaggctggagtgcagtggcgtgatctccgctcgctacaacctccacctcccagctgcctgccttggcctcccgaagtgccaagagtgcagcctctgcccggccgccaccccgtctgggaagtgaggagcgtctctgcctggctgcccattgtctgggacgtgagcagcccctctgcctggctgcccagtctggaaagtgaggagcgtctctgcccggccgccatcccatctaggaagtgaggagcgcctcttcccacccgccatcccatctaggaagtgaggagcttctctgcctggccgcccatcgtctgagatgtggggagcacctctgcccggccgcgaccccatttgggaggtgaggagcaactctgcccagccgccccgtctgagaagtgaggagaccctccgcctggcaaccgccccgtctgataagtaaggagcccctctgcccagcagccgccccgtctgagaagtgaggagcccctctgcccagcagccaccctgtctgggaagtgaggagcgtctccgcccggcagccacccagtccgggagggaggtgggggggtcagtcccccgtccggccagccgccccgtccgggaggtgaggggcgcctctgcccagctgcccctactgggaagtgaggagcccctctgccccgccagccaccccgtccgggagggaggtgggggggtcagccccccgcccggccagccgccccgtccgggagggaggtgggggatcagccccccgcccggctagccgccccgtccgggaggcgaggggcgcctctgcccggctgcccctactgggaagtgaggagcccctctgcccggccagccgccccgtccaggagggaggtgggggggtcagccccccgcccggccagccgcccggtccgggagggaggtgggggggtcagccccccgcccggccagccgccccgtccgggaggttaggggcgcctctgcccggccgcccctactgggaagtgaggagcccctctgcccggccaccaccccgtctgggaggtgtacccaacagctcattgagagcgggcgatgatgacagtggcggctttgtggagtggaggtggggggaaggtggggaaaagattgagaaatcggatggttgccgtgtctgtgtagaaagaagtagacatgggagacttttcattttgttctgtactaagaaaaattcttaccctaaaacttaaagtataataaaaaaaaaaaaacttcagttttctaaaaattatatttaaaattgtaatcaaaatgtacctagtttataaatgtttattttgtacttaatacctgtaaagtcttagttttcagacattaagtgactgtatcatgttcggtttaataaagaatttatgcagcacca

SEQ ID NO: 243177 - DNA, 3107 bp, Artificial Sequence
  derived and/or modified sequence
gccttggagccagagagacgcagctaggcctgcacggctgtggagagatcctgccacgggccttgttcaccatgtcggtgctggatgcgctttgggaggatcgggatgtccgtttcgacctgtccgcgcagcaaatgaaaacaagacctggagaagtccttattgattgtttagattccattgaagacaccaaaggaaataatggagatagaggtagactcttggtaacaaatttaagaattctctggcactctttggcattatcaagagtcaatgtttctgtcggttacaattgcatattgaatattacaacaaggactgctaactctaaattacgaggccaaactgaagctctctatatactaacaaaatgtaacagtactcgttttgaatttatatttacaaatttggttcctggaagccctagactttttacttctgtgatggcagtacacagagcttatgaaacttctaaaatgtatcgtgattttaaattaagaagtgcactaattcagaacaagcaactaagactgttgccacaagaacatgtatatgataaaataaatggagtttggaatttatccagtgatcagggcaatttaggaaccttttttattaccaatgtgagaattgtgtggcatgcaaatatgaatgatagttttaatgtcagtataccatatctgcaaattagtggtggatatgttcttggctttaaaatagatcctgtggaaaaactacaagaatcagttaaggaaatcaattcacttcacaaagtctattctgccagtcccatatttggagttgattatgagatggaagaaaagccccagccgctcgaagctctgacagtcgaacaaattcaagatgatgtagaaatagactctgatggtcacacggatgcttttgtggcttattttgctgatggcaataagcaacaagatcgtgaacctgtattttcagaagaactggggcttgcaatagagaaattgaaggatggattcaccctacagggactttgggaagtaatgagttgattgaccttgagttgagatggatttctattaaagatatctctagtttaaagatactagtcacctgccataagtcatggaatagtttttatatttacagcttttatatttaaaacttgtaagagtttttttaatgattgaggaaaaagtcatttagaaaacttcagttttcggccagcgcgtcgagggaggggccagcgacacatggcctagtaaccgtccggccgcggcgctggcttaagccatggctgagggtagctggattcctcaggcccgggcgctcctacagcagtgcctgcacgcccggctgcaaattcgcccagccaatggggacgttgcggcccagtgggtggaggtccaaagaggactggtgatctacgtgtgctttttcaagggagctgataaagaacttcttcccaaaatggccgaagctggactgtactgctgccatctctggctcactgcaacctccctgcctgattctcctgcctcagcctgccgagtgcctgcgattacaggcgcgcgccgccacacctgactggttttcgtatttttttggtggagacggggtttcgctgtgttggccgggctggtctccagctcctaaccgcgagtgatccgccagcctcggcctcccgaggtgccgggattgcagacggagtctggttcacttagtgctcaatggtgcccaggctggagtgcagtggcgtgatctccgctcgctacaacctccacctcccagctgcctgccttggcctcccgaagtgccaagagtgcagcctctgcccggccgccaccccgtctgggaagtgaggagcgtctctgcctggctgcccattgtctgggacgtgagcagcccctctgcctggctgcccagtctggaaagtgaggagcgtctctgcccggccgccatcccatctaggaagtgaggagcgcctcttcccacccgccatcccatctaggaagtgaggagcttctctgcctggccgcccatcgtctgagatgtggggagcacctctgcccggccgcgaccccatttgggaggtgaggagcaactctgcccagccgccccgtctgagaagtgaggagaccctccgcctggcaaccgccccgtctgataagtaaggagcccctctgcccagcagccgccccgtctgagaagtgaggagcccctctgcccagcagccaccctgtctgggaagtgaggagcgtctccgcccggcagccacccagtccgggagggaggtgggggggtcagtcccccgtccggccagccgccccgtccgggaggtgaggggcgcctctgcccagctgcccctactgggaagtgaggagcccctctgccccgccagccaccccgtccgggagggaggtgggggggtcagccccccgcccggccagccgccccgtccgggagggaggtgggggatcagccccccgcccggctagccgccccgtccgggaggcgaggggcgcctctgcccggctgcccctactgggaagtgaggagcccctctgcccggccagccgccccgtccaggagggaggtgggggggtcagccccccgcccggccagccgcccggtccgggagggaggtgggggggtcagccccccgcccggccagccgccccgtccgggaggttaggggcgcctctgcccggccgcccctactgggaagtgaggagcccctctgcccggccaccaccccgtctgggaggtgtacccaacagctcattgagagcgggcgatgatgacagtggcggctttgtggagtggaggtggggggaaggtggggaaaagattgagaaatcggatggttgccgtgtctgtgtagaaagaagtagacatgggagacttttcattttgttctgtactaagaaaaattcttaccctaaaacttaaagtataataaaaaaaaaaaaacttcagttttctaaaaattatatttaaaattgtaatcaaaatgtacctagtttataaatgtttattttgtacttaatacctgtaaagtcttagttttcagacattaagtgactgtatcatgttcggtttaataaagaatttatgcagcacca

SEQ ID NO: 243178 - DNA, 1935 bp, Artificial Sequence
  derived and/or modified sequence
gttgccttggagccagagagacgcagctaggcctgcacggctgtggagagatcctgccacgggccttgttcaccatgtcggtgctggatgcgctttgggaggatcgggatgtccgtttcgacctgtccgcgcagcaaatgaaaacaagacctggagaagtccttattgattgtttagattccattgaagacaccaaaggaaataatggagatagaggtagactcttggtaacaaatttaagaattctctggcactctttggcattatcaagagtcaatgtttctgtcggttacaattgcatattgaatattacaacaaggactgctaactctaaattacgaggccaaactgaagctctctatatactaacaaaatgtaacagtactcgttttgaatttatatttacaaatttggttcctggaagccctagactttttacttctgtgatggcagtacacagagcttatgaaacttctaaaatgtatcgtgattttaaattaagaagtgcactaattcagaacaagcaactaagactgttgccacaagaacatgtatatgataaaataaatggagtttggaatttatccagtgatcagggcaatttaggaaccttttttattaccaatgtgagaattgtgtggcatgcaaatatgaatgatagttttaatgtcagtataccatatctgcaaattcgttcaataaagattagagattcaaaatttggtttagctcttgtcatagaaagctctcagcagagtggtggatatgttcttggctttaaaatagatcctgtggaaaaactacaagaatcagttaaggaaatcaattcacttcacaaagtctattctgccagtcccatatttggagttgattatgagatggaagaaaagccccagccgctcgaagctctgacagtcgaacaaattcaagatgatgtagaaatagactctgatggtcacacggatgcttttgtggcttattttgctgatggcaataagctcgatagcatagcatctgaatgggttggacttccacctctgccttcagccaggtgtctcttcggtctgggagaggtggatgataaaatctatgtagttgcaggcaaagaccttcaaacagaggcttcgctggattcagtattatgctatgatcctgtggctgcaaaatggaacgaagtaaaaaaactccctatcaaagtctatggccataatgtgatttcacataaagggatgatatattgtctaggaggaaagacagatgacaaaaaatgtacaaacagggtgtttatcttcaaccccaaaaaaggagattggaaagatctggctccaatgaaaattcctcgttccatgtttggagtagcagtccataaaggcaaaattgtgattgcaggaggtgtcactgaagatggtctttcagcttcagttgaagcttttgaccttacaacaaataaatgggatgtaatgaccgaatttccccaagaaagaagctccatcagtttggtcagcctggctggatctctgtatgcaattggtggttttgctatgattcaactggagtctaaagaatttgcacccactgaagtcaatgacatatggaagtatgaagatgataaaaaagaatgggctgggatgttgaaggaaatacgttatgcttcaggagctagttgcctagcaacacgtttaaatctcttcaaactgtctaaactgtgaacaaggtgacaaaacataatagattgggaggtggtttgtttggtgaatggggctttaatttattctgttttttaaaagcttgtacagacactcatgtagaaattattcaagaagttattgtctaagagatgagcagtaggtaagaaaacctcagtcattgactcttcaatgtaatgatcagagtttaaaaccattttctaataataaattaaatcttcagttgaac

SEQ ID NO: 243179 - DNA, 1026 bp, Artificial Sequence
  derived and/or modified sequence
atgagcgtgctggacgccctgtgggaggacagagacgtgagattcgacctgagcgcccagcagatgaagaccagacccggcgaggtgctgatcgactgcctggacagcatcgaggacaccaagggcaacaacggcgacagaggcagactgctggtgaccaacctgagaatcctgtggcacagcctggccctgagcagagtgaacgtgagcgtgggctacaactgcatcctgaacatcaccaccagaaccgccaacagcaagctgagaggccagaccgaggccctgtacatcctgaccaagtgcaacagcaccagattcgagttcatcttcaccaacctggtgcccggcagccccagactgttcaccagcgtgatggccgtgcacagagcctacgagaccagcaagatgtacagagacttcaagctgagaagcgccctgatccagaacaagcagctgagactgctgccccaggagcacgtgtacgacaagatcaacggcgtgtggaacctgagcagcgaccagggcaacctgggcaccttcttcatcaccaacgtgagaatcgtgtggcacgccaacatgaacgacagcttcaacgtgagcatcccctacctgcagatcagaagcatcaagatcagagacagcaagttcggcctggccctggtgatcgagagcagccagcagagcggcggctacgtgctgggcttcaagatcgaccccgtggagaagctgcaggagagcgtgaaggagatcaacagcctgcacaaggtgtacagcgccagccccatcttcggcgtggactacgagatggaggagaagccccagcccctggaggccctgaccgtggagcagatccaggacgacgtggagatcgacagcgacggccacaccgacgccttcgtggcctacttcgccgacggcaacaagcagcaggacagagagcccgtgttcagcgaggagctgggcctggccatcgagaagctgaaggacggcttcaccctgcagggcctgtgggaggtgatgagctag

SEQ ID NO: 243180 - DNA, 963 bp, Artificial Sequence
  derived and/or modified sequence
atgagcgtgctggacgccctgtgggaggacagagacgtgagattcgacctgagcgcccagcagatgaagaccagacccggcgaggtgctgatcgactgcctggacagcatcgaggacaccaagggcaacaacggcgacagaggcagactgctggtgaccaacctgagaatcctgtggcacagcctggccctgagcagagtgaacgtgagcgtgggctacaactgcatcctgaacatcaccaccagaaccgccaacagcaagctgagaggccagaccgaggccctgtacatcctgaccaagtgcaacagcaccagattcgagttcatcttcaccaacctggtgcccggcagccccagactgttcaccagcgtgatggccgtgcacagagcctacgagaccagcaagatgtacagagacttcaagctgagaagcgccctgatccagaacaagcagctgagactgctgccccaggagcacgtgtacgacaagatcaacggcgtgtggaacctgagcagcgaccagggcaacctgggcaccttcttcatcaccaacgtgagaatcgtgtggcacgccaacatgaacgacagcttcaacgtgagcatcccctacctgcagatcagcggcggctacgtgctgggcttcaagatcgaccccgtggagaagctgcaggagagcgtgaaggagatcaacagcctgcacaaggtgtacagcgccagccccatcttcggcgtggactacgagatggaggagaagccccagcccctggaggccctgaccgtggagcagatccaggacgacgtggagatcgacagcgacggccacaccgacgccttcgtggcctacttcgccgacggcaacaagcagcaggacagagagcccgtgttcagcgaggagctgggcctggccatcgagaagctgaaggacggcttcaccctgcagggcctgtgggaggtgatgagctag

SEQ ID NO: 243181 - DNA, 1635 bp, Artificial Sequence
  derived and/or modified sequence
atgagcgtgctggacgccctgtgggaggacagagacgtgagattcgacctgagcgcccagcagatgaagaccagacccggcgaggtgctgatcgactgcctggacagcatcgaggacaccaagggcaacaacggcgacagaggcagactgctggtgaccaacctgagaatcctgtggcacagcctggccctgagcagagtgaacgtgagcgtgggctacaactgcatcctgaacatcaccaccagaaccgccaacagcaagctgagaggccagaccgaggccctgtacatcctgaccaagtgcaacagcaccagattcgagttcatcttcaccaacctggtgcccggcagccccagactgttcaccagcgtgatggccgtgcacagagcctacgagaccagcaagatgtacagagacttcaagctgagaagcgccctgatccagaacaagcagctgagactgctgccccaggagcacgtgtacgacaagatcaacggcgtgtggaacctgagcagcgaccagggcaacctgggcaccttcttcatcaccaacgtgagaatcgtgtggcacgccaacatgaacgacagcttcaacgtgagcatcccctacctgcagatcagaagcatcaagatcagagacagcaagttcggcctggccctggtgatcgagagcagccagcagagcggcggctacgtgctgggcttcaagatcgaccccgtggagaagctgcaggagagcgtgaaggagatcaacagcctgcacaaggtgtacagcgccagccccatcttcggcgtggactacgagatggaggagaagccccagcccctggaggccctgaccgtggagcagatccaggacgacgtggagatcgacagcgacggccacaccgacgccttcgtggcctacttcgccgacggcaacaagctggacagcatcgccagcgagtgggtgggcctgccccccctgcccagcgccagatgcctgttcggcctgggcgaggtggacgacaagatctacgtggtggccggcaaggacctgcagaccgaggccagcctggacagcgtgctgtgctacgaccccgtggccgccaagtggaacgaggtgaagaagctgcccatcaaggtgtacggccacaacgtgatcagccacaagggcatgatctactgcctgggcggcaagaccgacgacaagaagtgcaccaacagagtgttcatcttcaaccccaagaagggcgactggaaggacctggcccccatgaagatccccagaagcatgttcggcgtggccgtgcacaagggcaagatcgtgatcgccggcggcgtgaccgaggacggcctgagcgccagcgtggaggccttcgacctgaccaccaacaagtgggacgtgatgaccgagttcccccaggagagaagcagcatcagcctggtgagcctggccggcagcctgtacgccatcggcggcttcgccatgatccagctggagagcaaggagttcgcccccaccgaggtgaacgacatctggaagtacgaggacgacaagaaggagtgggccggcatgctgaaggagatcagatacgccagcggcgccagctgcctggccaccagactgaacctgttcaagctgagcaagctgtag

SEQ ID NO: 243182 - protein, 399 aa, Artificial Sequence
  derived and/or modified sequence
MAELLRSLQDSQLVARFQRRCGLFPAPDEGPRENGADPTERAARVPGVEHLPAANGKGGEAPANGLRRAAAPEAYVQKYVVKNYFYYYLFQFSAALGQEVFYITFLPFTHWNIDPYLSRRLIIIWVLVMYIGQVAKDVLKWPRPSSPPVVKLEKRLIAEYGMPSTHAMAATAIAFTLLISTMDRYQYPFVLGLVMAVVFSTLVCLSRLYTGMHTVLDVLGGVLITALLIVLTYPAWTFIDCLDSASPLFPVCVIVVPFFLCYNYPVSDYYSPTRADTTTILAAGAGVTIGFWINHFFQLVSKPAESLPVIQNIPPLTTYMLVLGLTKFAVGIVLILLVRQLVQNLSLQVLYSWFKVVTRNKEARRRLEIEVPYKFVTYTSVGICATTFVPMLHRFLGLP

SEQ ID NO: 243183 - DNA, 1200 bp, Artificial Sequence
  derived and/or modified sequence
atggccgagctgctgagaagcctgcaggacagccagctggtggccagattccagagaagatgcggcctgttccccgcccccgacgagggccccagagagaacggcgccgaccccaccgagagagccgccagagtgcccggcgtggagcacctgcccgccgccaacggcaagggcggcgaggcccccgccaacggcctgagaagagccgccgcccccgaggcctacgtgcagaagtacgtggtgaagaactacttctactactacctgttccagttcagcgccgccctgggccaggaggtgttctacatcaccttcctgcccttcacccactggaacatcgacccctacctgagcagaagactgatcatcatctgggtgctggtgatgtacatcggccaggtggccaaggacgtgctgaagtggcccagacccagcagcccccccgtggtgaagctggagaagagactgatcgccgagtacggcatgcccagcacccacgccatggccgccaccgccatcgccttcaccctgctgatcagcaccatggacagataccagtaccccttcgtgctgggcctggtgatggccgtggtgttcagcaccctggtgtgcctgagcagactgtacaccggcatgcacaccgtgctggacgtgctgggcggcgtgctgatcaccgccctgctgatcgtgctgacctaccccgcctggaccttcatcgactgcctggacagcgccagccccctgttccccgtgtgcgtgatcgtggtgcccttcttcctgtgctacaactaccccgtgagcgactactacagccccaccagagccgacaccaccaccatcctggccgccggcgccggcgtgaccatcggcttctggatcaaccacttcttccagctggtgagcaagcccgccgagagcctgcccgtgatccagaacatcccccccctgaccacctacatgctggtgctgggcctgaccaagttcgccgtgggcatcgtgctgatcctgctggtgagacagctggtgcagaacctgagcctgcaggtgctgtacagctggttcaaggtggtgaccagaaacaaggaggccagaagaagactggagatcgaggtgccctacaagttcgtgacctacaccagcgtgggcatctgcgccaccaccttcgtgcccatgctgcacagattcctgggcctgccctag

SEQ ID NO: 243184 - DNA, 1200 bp, Artificial Sequence
  derived and/or modified sequence
atggccgagctgctacgcagccttcaggacagccaacttgtggcccggtttcagcggaggtgcggactctttccagcacccgacgaaggtccaagagagaatggggctgacccaactgaacgtgccgccagggtgcccggcgttgagcaccttccagcagccaacgggaagggcggcgaggcgccagctaacggcctgagacgggcagctgctcccgaggcctatgtccagaagtacgtagtgaagaattatttctactattatttatttcagttctctgcagccctggggcaagaggtattttacatcacgttcctgcccttcacccattggaacatcgacccctatctgtcgcggaggctgatcatcatatgggttctcgtgatgtatatcggtcaggtggcgaaagacgtgctcaagtggccaagaccctccagccccccagtggtgaaattagagaagagactgatcgccgaatacgggatgccgagtactcacgccatggcagctaccgccattgcgtttaccctactcatctccacaatggataggtaccaatacccttttgtgctcggactggtcatggcagtggtattttctacactggtgtgtttgagcagactgtacaccggcatgcacaccgtactggatgtgctcgggggggtgctgatcactgccttgttgattgtcctgacctatccagcctggacctttattgattgtctcgacagcgcctcacctctcttccccgtgtgtgtcattgtggttccgttcttcctctgctacaactatcccgtctcagattattactccccaacaagagcagataccactactatcctggcagccggtgcaggcgtcaccattggcttctggatcaaccacttctttcagcttgtgtccaagcctgctgagtctctccctgttatacagaatattcctcccttaaccacctatatgttagttcttggcctgaccaagtttgctgtggggatcgtgctgatcctgctcgtcaggcaactggtgcagaacctgtcgctgcaagtactctacagctggtttaaggtggtaacccgaaacaaagaagcacgtcggagactagagattgaggtcccatacaaattcgttacgtatacatcggtgggcatttgtgctacaacctttgtcccaatgcttcatcgctttctgggcctaccctag

SEQ ID NO: 243185 - DNA, 1200 bp, Artificial Sequence
  derived and/or modified sequence
atggccgagctgctgcggagcctgcaggacagccagctggtggcccgcttccagaggcgctgtggcctcttccctgccccagatgagggccccagagaaaatggagctgaccccacagagcgggccgcccgggtgcctggggtggagcacctgcctgctgccaatggaaaaggaggagaggccccagccaacggcctgcggcgggccgccgcccctgaggcctacgtgcagaagtatgtggtgaagaactacttctactactacctgttccagttctctgctgccctgggccaggaggtgttctacatcaccttcctgcccttcacccactggaacatcgacccctacctgagcagaagactcatcatcatctgggtgctggtgatgtacatcggccaggtggccaaggatgtgctgaagtggccccggcccagcagcccccctgtggtgaagctggagaagaggctgattgctgaatatggcatgcccagcacccacgccatggccgccacagccatcgccttcaccctgctgatcagcaccatggaccgctaccagtacccctttgtgctgggcctggtgatggctgtggtgttcagcaccctggtgtgcctgagccggctgtacacaggcatgcacacagtgctggatgtgctgggcggcgtgctgatcacagccctgctgattgtgctgacctacccagcctggaccttcatcgactgcctggacagcgccagccccctcttccctgtgtgtgtgattgtggtgcccttcttcctgtgctacaactaccctgtgtctgactactacagccccaccagggctgacaccaccaccatcctggccgccggggccggcgtgaccatcggcttctggatcaaccacttcttccagctggtgtccaagccagctgagagcctgcccgtcatccagaacatcccccccctgaccacctacatgctggtgctgggcctgaccaagtttgctgtgggcatcgtgctgatcctgctggtgcggcagctggtgcagaacctgagcctgcaggtgctgtacagctggttcaaggtggtgaccaggaacaaggaggcccggcggcggctggagattgaggtgccctacaagtttgtgacctacacctctgtgggcatctgtgccaccacctttgtgcccatgctgcaccgcttcctgggcctgccctag

SEQ ID NO: 243186 - DNA, 1200 bp, Artificial Sequence
  derived and/or modified sequence
atggccgagctgctgcggagcctgcaggacagccagctggtggccaggttccagaggcgttgcggcctcttccctgcccccgacgaaggaccccgtgagaacggcgccgaccccaccgagcgagcagcccgggtaccaggtgtggaacaccttcccgccgccaacggcaaaggaggcgaggccccagccaacggtctgaggcgcgccgcggcccccgaagcgtacgtgcagaaatacgtggtaaaaaattacttttactattacctctttcaattttcggccgcactgggccaggaggtgttctacatcactttcctgccatttacccattggaacattgacccctacctatctagaagactaatcattatctgggtcctggtgatgtacattgggcaagtggccaaggatgttctgaagtggccgcgcccgtcatccccccctgtggtcaagttagaaaaaagactcatcgctgaatacggcatgcccagcacacatgcaatggcagcgactgccattgccttcaccctgctgatttccactatggaccgctatcagtacccgtttgtactgggcctggttatggctgtagttttcagtaccctggtttgtctgagccgcctgtacaccggaatgcatacagtactcgacgtgctggggggagtcttaattactgccttgctcatagttttaacatatccagcatggactttcattgattgtcttgactctgcaagtcctctcttccccgtgtgtgtcatagtcgtgccattcttcctttgctacaactatccagtgtccgattattattctccaactcgggctgacacaacgactatactagctgcaggcgccggtgtgacaattggattctggatcaatcacttttttcagttggtgtccaagcctgcggagagcctgcctgtgatacagaacatcccacccctcactacttacatgctggttctaggcctgaccaagttcgcggtagggatcgtcctcatacttttggtgcgccagctggtgcagaacctatcattacaggtcctctattcctggtttaaggttgtgacaagaaataaggaggcccggcgaagactcgagatcgaagtgccttataagttcgtgacatatacctcggtgggaatttgtgccactaccttcgtgcccatgctgcaccgttttctgggcttgccctag

SEQ ID NO: 243187 - DNA, 1200 bp, Artificial Sequence
  derived and/or modified sequence
atggcagaactcttgaggtctttgcaggactcacagttggtggccaggtttcagaggaggtgcgggctgttcccagctcccgacgagggtcccagggagaacggagcagatccaactgagagggccgctcgggtccccggagtcgagcatctgcccgctgccaacgggaaaggaggagaggctcccgcaaatggcctccgcagagcggcagcacctgaagcctatgttcaaaagtatgttgtgaaaaattacttctattattatctgtttcaatttagcgctgcactgggacaggaggttttttatattactttcctcccatttacgcattggaacatcgacccttacctgagtagacgcttaattataatctgggttcttgtgatgtatattggacaggtcgccaaggacgtcttgaagtggcctcggccatcatctccacccgtcgtaaagttggaaaaacgccttattgcggagtatgggatgccctctacacatgcgatggcagccaccgccatcgcattcactctgctcatttccaccatggatcgctaccagtaccctttcgtgctgggactggtgatggcggtggttttttctacgctggtttgcctgagccggctctacaccggtatgcacacggtgctagatgttctgggcggtgtgctgatcacggccctgcttattgtgctgacttatcccgcatggacattcatcgactgcctggacagtgcctctccattgtttcccgtgtgtgtgatcgttgtgccgttcttcctttgctataactaccctgtttctgattattactctccaaccagggcagatacgaccactatactggccgctggagccggtgtgacgattgggttttggatcaatcacttctttcagctggtcagtaaaccggcagaatctctgccagtgatacaaaatatcccccctctgacaacatatatgctggtgctgggtcttactaagtttgccgtggggatcgtactaatacttctggttagacagctggtgcagaatctgagcttgcaggttctgtactcttggttcaaagtcgtcaccaggaataaggaagcaaggcggaggctcgaaatcgaggtaccttacaaatttgtgacatacacttctgtgggcatttgcgccacaacgtttgtgcccatgctacaccgatttctcggtctgccatag

SEQ ID NO: 243188 - DNA, 3336 bp, Artificial Sequence
  derived and/or modified sequence
ggcgggggcgaggcgggagtggcggtgccagcggagggcaccggcccggcgtggcagcggcggcggagcgcggccccgggcacaccatggccgagctgctgcggagcctgcaggattcccagctcgtcgcccgcttccagcgccgctgcgggctcttccccgctccggatgaaggcccccgggagaacggcgcggaccccacggagcgcgcggcgcgggtccccggggtcgagcatctccccgcagccaacggcaagggcggcgaggctccggccaacgggctgcgcagagccgcggcgccggaggcttatgtacagaagtacgtcgtgaagaattatttctactattacctattccaattttcagctgctttgggccaagaagtgttctacatcacgtttcttccattcactcactggaatattgacccttatttatccagaagattgatcatcatatgggttttggtgatgtatattggccaagtggccaaggatgtcttgaagtggccccgtccctcctcccctccagttgtaaaactggaaaagagactgatcgctgaatatggaatgccatccacccacgccatggcggccactgccattgccttcaccctccttatctctactatggacagataccagtatccatttgtgttgggactggtgatggccgtggtgttttccaccttggtgtgtctcagcaggctctacactgggatgcatacggtcctggatgtgctgggtggcgtcctgatcaccgcactcctcatcgtcctcacctaccctgcctggaccttcatcgactgcctggactcggccagccccctcttccccgtgtgtgtcatagttgtgccattcttcctgtgttacaattaccctgtttctgattactacagcccaacccgggcggacaccaccaccattctggctgccggggctggagtgaccataggattctggatcaaccatttcttccagcttgtatccaagcccgctgaatctctccctgttattcagaacatcccaccactcaccacctacatgttagttttgggtctgaccaaatttgcagtgggaattgtgttgatcctcttggttcgtcagcttgtacaaaatctctcactgcaagtattatactcatggttcaaggtggtcaccaggaacaaggaggccaggcggagactggagattgaagtgccttacaagtttgttacctacacatctgttggcatctgcgctacaacctttgtgccgatgcttcacaggtttctgggattaccctgagtctcaaacagttggaaactagcccactggacatgaaagccaagacataggaaagttattggtaggcaaatcttgacaacttatttttctttaacaacaacaaaaagtcatacggctgtcttgctactaccagataaatgatgctgctgtgtgaaaggaagaactgtctcatagcggtcattggtcgtccgtggtggttggttgtgctacagttgaacccaggctaaagaccataatccggatctttaaaggcacacaccgcgccccccccccccccgcccggcccctgctcctctcgctgttgcacgggctttggatctagtcatgggctggcaggaattgtggcctggcttaggaatagctatgagccccactgggttctggagagccagtagagatggggtgatctgggaggctggaggtagagcctttcttttccgttacaaccttgcctagcatggagttatttctaaaatgggaactttggtctaggagaaggggtggcaccatatgaaacggcattccttggacagggtgacttccttatcgtttatttggtgattttttgttttgttttgtttgagacaggatcttgctctgtttcccaggctgtattacagtggcacaatctcagctcactgcaaactctgcctcccgggctcaagcaatcctcctgcctgagccaactgagtagctgggactgtaagcatagaccaccatgtgcccagctaatttttgtagagacagggtttctccatgttgcccaggtacgtctgaaactcctgggcttaagtgatccacccacctcagcctcccaaagtgctgggattataggcatgagccactgtgcccggcctcctccttgttatgatcaaattagactgtgcctggttgggtggtaagatcactctgaaagaaagctcactgtgaagagatgaaaggtggaggcagagctgtgaggtcatggggaaaagcctgctttccttataagtcctgctgttcatgttggaataaggatctgctcttccttgtttccatgcattttgcaggattccaggtaccattaccacactcttctgacccatgaaaccaactggctgctcacacatcaccaaacaggttgggggttagccttcagcacaggtggatacatctgggattcactgagattcctgccctctcctgcttcctagtggtttgggacaggccctctgcccatcgtcagcagttttttgctttcatacaaacctggaaggcactggcatctgcctaggaaagtggatctgtgaagaacagatgaactcaatcctttctggagtctgacaaagaagggataggcttccttgacattgcctgtcctgacaaggcctccctgacattactcctccaatttcacagttaccttctgtaaatctattttctcatctactgaatagaatcaggcgccctttttgtcttcccacctcttatctcttggcaattttaaggggaattaatgcaagaacaactttagtgtctcttgggaaaacaagccaaccaaatacaaaacccattaagcctactagggtgagtcctcttaacatgggaaggcgatgattatgcaaacaccggagttccctcctcttcagttcctaagaataaagaacaggtatcaagaactttctttaaagttagtgtaactatagttaacaaagtatccattgaagtttagtgcctgtaggactgagccagtgctttatcaacccaacacatcatcaccatgtgcatactctagaaaaaaaaatagcttccttaaaagttacagaggctcttaacgtgttaaaaccgaaaaatcacatttttcttgatttcaaatatgttctacggccttactgttgggatgatatttagtatgtaacttagcattccaatttctcaagaatttttaggccgggtgcggtggctcatgcctgtaatcccagcactttgggaggccgaggtgggcggaccacgaggtcaggagatcgagaccatcctggctaacacggtaccccgtctctactgaaaatac

SEQ ID NO: 243189 - protein, 313 aa, Artificial Sequence
  derived and/or modified sequence
MRTDSGARLEEGHLRPPRALPPVPSIDDIPLSRPKKKKTQPAELQYANELGVEDEDIITDEQTTVEQQSVFTAPTGISQPVGKVFVEKSRRFQAADRSELIKTTENIDVSMDVKPSWTTRDVALTVHRAFRMIGLFSHGFLAGCAVWNIVVIYVLAGDQLSNLSNLLQQYKTLAYPFQSLLYLLLALSTISAFDRIDFAKISVAIRNFLALDPTALASFLYFTALILSLSQQMTSDRIHLYTPSSVNGSLWEAGIEEQILQPWIVVNLVVALLVGLSWLFLSYRPGMDLSEELMFSSEVEEYPDKEKEIKASS

SEQ ID NO: 243190 - protein, 400 aa, Artificial Sequence
  derived and/or modified sequence
MGKNPVRPPRALPPVPSQDDIPLSRPKKKKPRTKNTPASASLEGLAQTAGRRPSEGNEPSTKELKEHPEAPVQRRQKKTRLPLELETSSTQKKSSSSSLLRNENGIDAEPAEEAVIQKPRRKTKKTQPAELQYANELGVEDEDIITDEQTTVEQQSVFTAPTGISQPVGKVFVEKSRRFQAADRSELIKTTENIDVSMDVKPSWTTRDVALTVHRAFRMIGLFSHGFLAGCAVWNIVVIYVLAGDQLSNLSNLLQQYKTLAYPFQSLLYLLLALSTISAFDRIDFAKISVAIRNFLALDPTALASFLYFTALILSLSQQMTSDRIHLYTPSSVNGSLWEAGIEEQILQPWIVVNLVVALLVGLSWLFLSYRPGMDLSEELMFSSEVEEYPDKEKEIKASS

SEQ ID NO: 243191 - protein, 430 aa, Artificial Sequence
  derived and/or modified sequence
MTHCACARDRREGWGARCLGRRPPRPAKRRMGKNPVRPPRALPPVPSIDDIPLSRPKKKKPRTKNTPASASLEGLAQTAGRRPSEGNEPSTKELKEHPEAPVQRRQKKTRLPLELETSSTQKKSSSSSLLRNENGIDAEPAEEAVIQKPRRKTKKTQPAELQYANELGVEDEDIITDEQTTVEQQSVFTAPTGISQPVGKVFVEKSRRFQAADRSELIKTTENIDVSMDVKPSWTTRDVALTVHRAFRMIGLFSHGFLAGCAVWNIVVIYVLAGDQLSNLSNLLQQYKTLAYPFQSLLYLLLALSTISAFDRIDFAKISVAIRNFLALDPTALASFLYFTALILSLSQQMTSDRIHLYTPSSVNGSLWEAGIEEQILQPWIVVNLVVALLVGLSWLFLSYRPGMDLSEELMFSSEVEEYPDKEKEIKASS

SEQ ID NO: 243192 - DNA, 942 bp, Artificial Sequence
  derived and/or modified sequence
atgagaaccgacagcggcgccagactggaggagggccacctgagaccccccagagccctgccccccgtgcccagcatcgacgacatccccctgagcagacccaagaagaagaagacccagcccgccgagctgcagtacgccaacgagctgggcgtggaggacgaggacatcatcaccgacgagcagaccaccgtggagcagcagagcgtgttcaccgcccccaccggcatcagccagcccgtgggcaaggtgttcgtggagaagagcagaagattccaggccgccgacagaagcgagctgatcaagaccaccgagaacatcgacgtgagcatggacgtgaagcccagctggaccaccagagacgtggccctgaccgtgcacagagccttcagaatgatcggcctgttcagccacggcttcctggccggctgcgccgtgtggaacatcgtggtgatctacgtgctggccggcgaccagctgagcaacctgagcaacctgctgcagcagtacaagaccctggcctaccccttccagagcctgctgtacctgctgctggccctgagcaccatcagcgccttcgacagaatcgacttcgccaagatcagcgtggccatcagaaacttcctggccctggaccccaccgccctggccagcttcctgtacttcaccgccctgatcctgagcctgagccagcagatgaccagcgacagaatccacctgtacacccccagcagcgtgaacggcagcctgtgggaggccggcatcgaggagcagatcctgcagccctggatcgtggtgaacctggtggtggccctgctggtgggcctgagctggctgttcctgagctacagacccggcatggacctgagcgaggagctgatgttcagcagcgaggtggaggagtaccccgacaaggagaaggagatcaaggccagcagctag

SEQ ID NO: 243193 - DNA, 1203 bp, Artificial Sequence
  derived and/or modified sequence
atgggcaagaaccccgtgagaccccccagagccctgccccccgtgcccagccaggacgacatccccctgagcagacccaagaagaagaagcccagaaccaagaacacccccgccagcgccagcctggagggcctggcccagaccgccggcagaagacccagcgagggcaacgagcccagcaccaaggagctgaaggagcaccccgaggcccccgtgcagagaagacagaagaagaccagactgcccctggagctggagaccagcagcacccagaagaagagcagcagcagcagcctgctgagaaacgagaacggcatcgacgccgagcccgccgaggaggccgtgatccagaagcccagaagaaagaccaagaagacccagcccgccgagctgcagtacgccaacgagctgggcgtggaggacgaggacatcatcaccgacgagcagaccaccgtggagcagcagagcgtgttcaccgcccccaccggcatcagccagcccgtgggcaaggtgttcgtggagaagagcagaagattccaggccgccgacagaagcgagctgatcaagaccaccgagaacatcgacgtgagcatggacgtgaagcccagctggaccaccagagacgtggccctgaccgtgcacagagccttcagaatgatcggcctgttcagccacggcttcctggccggctgcgccgtgtggaacatcgtggtgatctacgtgctggccggcgaccagctgagcaacctgagcaacctgctgcagcagtacaagaccctggcctaccccttccagagcctgctgtacctgctgctggccctgagcaccatcagcgccttcgacagaatcgacttcgccaagatcagcgtggccatcagaaacttcctggccctggaccccaccgccctggccagcttcctgtacttcaccgccctgatcctgagcctgagccagcagatgaccagcgacagaatccacctgtacacccccagcagcgtgaacggcagcctgtgggaggccggcatcgaggagcagatcctgcagccctggatcgtggtgaacctggtggtggccctgctggtgggcctgagctggctgttcctgagctacagacccggcatggacctgagcgaggagctgatgttcagcagcgaggtggaggagtaccccgacaaggagaaggagatcaaggccagcagctag

SEQ ID NO: 243194 - DNA, 1293 bp, Artificial Sequence
  derived and/or modified sequence
atgacccactgcgcctgcgccagagacagaagagagggctggggcgccagatgcctgggcagaagaccccccagacccgccaagagaagaatgggcaagaaccccgtgagaccccccagagccctgccccccgtgcccagcatcgacgacatccccctgagcagacccaagaagaagaagcccagaaccaagaacacccccgccagcgccagcctggagggcctggcccagaccgccggcagaagacccagcgagggcaacgagcccagcaccaaggagctgaaggagcaccccgaggcccccgtgcagagaagacagaagaagaccagactgcccctggagctggagaccagcagcacccagaagaagagcagcagcagcagcctgctgagaaacgagaacggcatcgacgccgagcccgccgaggaggccgtgatccagaagcccagaagaaagaccaagaagacccagcccgccgagctgcagtacgccaacgagctgggcgtggaggacgaggacatcatcaccgacgagcagaccaccgtggagcagcagagcgtgttcaccgcccccaccggcatcagccagcccgtgggcaaggtgttcgtggagaagagcagaagattccaggccgccgacagaagcgagctgatcaagaccaccgagaacatcgacgtgagcatggacgtgaagcccagctggaccaccagagacgtggccctgaccgtgcacagagccttcagaatgatcggcctgttcagccacggcttcctggccggctgcgccgtgtggaacatcgtggtgatctacgtgctggccggcgaccagctgagcaacctgagcaacctgctgcagcagtacaagaccctggcctaccccttccagagcctgctgtacctgctgctggccctgagcaccatcagcgccttcgacagaatcgacttcgccaagatcagcgtggccatcagaaacttcctggccctggaccccaccgccctggccagcttcctgtacttcaccgccctgatcctgagcctgagccagcagatgaccagcgacagaatccacctgtacacccccagcagcgtgaacggcagcctgtgggaggccggcatcgaggagcagatcctgcagccctggatcgtggtgaacctggtggtggccctgctggtgggcctgagctggctgttcctgagctacagacccggcatggacctgagcgaggagctgatgttcagcagcgaggtggaggagtaccccgacaaggagaaggagatcaaggccagcagctag

SEQ ID NO: 243195 - DNA, 942 bp, Artificial Sequence
  derived and/or modified sequence
atgcggacggattctggcgcccggctcgaggaaggccatctacggccccctagagccctccctccagtcccatcaattgatgatattccactatccaggcctaaaaaaaaaaagacacagcctgctgagctgcagtacgccaatgagctgggggtggaggacgaggatatcataacggacgagcaaaccaccgtggaacagcagtctgtttttaccgctcccaccggaatttcacagccagtggggaaagtttttgttgagaaatcccgcagattccaggccgcggaccgctctgagctgattaagaccacagagaacatcgacgtaagtatggacgtgaagccatcctggacgacaagggatgtggcgttgacagtgcaccgggccttcaggatgatcggactgttctcgcacggattcctggccggctgcgctgtctggaatatcgtagttatatatgtgcttgctggtgatcagttgtcaaatcttagtaacttgctgcagcagtacaaaaccctcgcgtaccctttccagagcctgctctatctcctcctggccttgtctactatcagcgcctttgataggatcgactttgcgaagatatcggtggccatccgaaattttttggctctcgacccgacggcccttgcttccttcctatacttcaccgcccttattctgtcattaagccaacagatgaccagtgacagaatacacctttacaccccttcaagcgtcaacgggagcctatgggaagcaggcattgaagagcagattctccagccttggattgttgtcaacctcgtagtcgccttgcttgtcggtctctcctggttgttcttgtcgtatcggccaggcatggatctgtcggaagagctaatgttctcctcggaggtcgaagaataccctgataaagagaaagagatcaaggcctcttcttag

SEQ ID NO: 243196 - DNA, 1203 bp, Artificial Sequence
  derived and/or modified sequence
atgggcaagaatcccgtgaggccacctcgcgctcttccgccagttccctcgcaggatgacatcccattgagcagaccaaagaagaagaaacccagaactaagaataccccagcatccgcttccctcgaaggtctggcccaaacagctggccgtagacccagcgaaggcaatgaaccttctacgaaagagctgaaagagcaccctgaggcccccgtgcagaggcgtcaaaagaagacccggctgcctctcgaactcgagacttcatccacacagaagaaatcaagttccagctcgcttttgcgcaacgaaaatggtattgatgcggagccagcagaggaagccgtgattcagaagcctcgccgcaagacaaagaaaactcagccggcagagctccagtacgccaatgaacttggggtggaggacgaagacattatcactgatgagcagacaactgttgaacaacaaagtgtgttcacggctccaactggcatctcccaacccgtaggcaaggtctttgtcgaaaaatcaaggaggtttcaagcagccgaccgctcagaattgataaaaaccaccgagaatatcgacgtaagcatggacgtgaagccttcctggactacaagagatgtggctctcacggtacatagagcgttccgaatgattggtctgttttctcacgggtttttggctgggtgcgcagtctggaacatcgtggtaatctacgtattggcgggagatcagctgtcaaatctgtccaatttgctgcagcaatacaagaccctcgcctatccttttcagagtctgctctacctgttactagccttgagcactatttctgcatttgatcggatagatttcgcaaagatcagtgtcgctattcgaaattttcttgcacttgatcccaccgccttagcgagttttctgtacttcacagctctcatcctctcactctcacagcagatgacctccgacaggatccatctgtatactccatcctcagtcaacggttccctctgggaagccggcatcgaagaacaaattctgcagccgtggattgtggttaacttggttgtggctttacttgtcgggttgtcttggctgtttctctcctataggcctgggatggatctttctgaggagctcatgtttagtagcgaggtggaagaataccccgataaggaaaaggagatcaaagccagcagctag

SEQ ID NO: 243197 - DNA, 1293 bp, Artificial Sequence
  derived and/or modified sequence
atgacccactgtgcatgcgctagggatagacgagagggctggggtgcccgctgtctgggaaggaggccacctaggccggctaagagacggatgggtaagaaccccgtgcgtccacctagggcgctcccacctgtgccttcaatcgacgatatacccctgagcagacctaagaagaagaaacccaggacgaagaacaccccagccagtgcctcactggagggcctggcacagacagccggccggcggccttccgaaggcaatgaaccctcaacaaaggagctgaaggaacatcccgaggcacccgtgcagaggcgccagaaaaagacccgactgccactcgagctggagacgagctccacccagaaaaagtcgtcctcatctagtttgctgcgcaatgagaacggcatagatgctgagcctgctgaagaagctgtcatccaaaagccccggcgcaagaccaagaagacacagcccgccgaactgcagtacgccaatgagctaggagtagaggatgaagacatcattactgatgaacagaccacagttgagcagcagtccgtattcactgcccctacaggcataagccagcctgtcgggaaggtgtttgttgagaaatctcgtagatttcaggccgccgataggtcagaattgattaagacaaccgagaatatcgacgtaagcatggacgtgaagccctcctggactacacgtgatgtagccctgacagtacaccgggcattccgtatgataggacttttctcccacgggtttctggctggttgtgccgtttggaacattgtggtcatctatgtcttggccggggatcaattatccaacctgagtaatctgctgcagcagtacaaaaccctggcctatcccttccaaagccttctgtacctcctgcttgccttgtccaccatttccgcgtttgaccgtattgacttcgctaaaattagtgtggccattcgcaattttctggcccttgaccccactgccctggccagctttttatactttaccgcattaatactgagcttaagccagcagatgacctctgataggattcacctctacacgcctagttcagttaacgggagtctgtgggaagcgggcattgaggagcagatcctccagccttggatcgtggtgaacttagtcgtggctctgcttgtaggtctgagttggctgttcctgtcatacagaccaggaatggatctgagcgaggaactgatgttctcttccgaggtggaagagtacccagataaagagaaagagatcaaggcgagctcatag

SEQ ID NO: 243198 - DNA, 942 bp, Artificial Sequence
  derived and/or modified sequence
atgaggacagattctggggcccggctggaggagggccacctgcggcccccccgggccctgccccctgtgcccagcattgatgacatccccctgagccggcccaagaagaagaagacccagcctgctgagctgcagtatgccaatgagctgggcgtggaggatgaggacatcatcacagatgagcagaccaccgtggagcagcagagcgtcttcaccgcccccaccggcatcagccagcctgtgggcaaggtgtttgtggagaagagccgccgcttccaggccgctgacagaagtgagctgatcaagaccacagaaaatattgatgtgtccatggatgtgaagcccagctggaccaccagagatgtggccctgactgtgcaccgggccttcaggatgattggcctcttcagccacggcttcctggccggctgtgctgtgtggaacatcgtggtgatctacgtgctggccggggaccagctgagcaacctgagcaacctgctgcagcagtacaagaccctggcctaccccttccagagcctgctgtacctgctgctggccctgagcaccatcagcgcctttgacagaattgactttgccaagatctctgtggccatccggaacttcctggccctggaccccacagccctggccagcttcctgtacttcaccgccctgatcctgagcctgagccagcagatgaccagtgaccgcatccacctgtacacccccagctctgtgaatggcagcctgtgggaggccggcatcgaggagcagatcctgcagccctggatcgtggtgaacctggtggtggccctgctggtgggcctgtcctggctgttcctgagctacagacctggcatggacctgtctgaggagctgatgttcagcagcgaggtggaggagtacccagacaaggagaaggagatcaaggccagcagctag

SEQ ID NO: 243199 - DNA, 1203 bp, Artificial Sequence
  derived and/or modified sequence
atgggcaagaaccctgtgcggcccccccgggccctgccccctgtgcccagccaggatgacatccccctgagccggcccaagaagaagaagcccaggaccaagaacaccccagccagcgccagcctggagggcctggcccagacagctggaagaagacccagcgagggcaatgagcccagcaccaaggagctgaaggagcaccctgaggcccctgtgcagaggcggcagaagaagacccggctgcccctggagctggagaccagcagcacccagaagaagagcagcagcagcagcctgctgagaaatgaaaatggaattgatgctgagcctgctgaggaggccgtcatccagaagcccaggaggaagaccaagaagacccagcctgctgagctgcagtatgccaatgagctgggcgtggaggatgaggacatcatcacagatgagcagaccaccgtggagcagcagagcgtcttcaccgcccccaccggcatcagccagcctgtgggcaaggtgtttgtggagaagagccgccgcttccaggccgctgacagaagtgagctgatcaagaccacagagaacattgatgtgtccatggatgtgaagcccagctggaccaccagagatgtggccctgactgtgcaccgggccttcaggatgattggcctcttcagccacggcttcctggccggctgtgctgtgtggaacatcgtggtgatctacgtgctggccggggaccagctgagcaacctgagcaacctgctgcagcagtacaagaccctggcctaccccttccagagcctgctgtacctgctgctggccctgagcaccatcagcgcctttgacagaattgactttgccaagatctctgtggccatccggaacttcctggccctggaccccacagccctggccagcttcctgtacttcaccgccctgatcctgagcctgagccagcagatgaccagtgaccgcatccacctgtacacccccagctctgtgaatggcagcctgtgggaggccggcatcgaggagcagatcctgcagccctggatcgtggtgaacctggtggtggccctgctggtgggcctgtcctggctgttcctgagctaccggcccggcatggacctgtctgaggagctgatgttcagcagcgaggtggaggagtacccagacaaggagaaggagatcaaggccagcagctag

SEQ ID NO: 243200 - DNA, 1293 bp, Artificial Sequence
  derived and/or modified sequence
atgacccactgtgcctgtgcccgggaccggcgggagggctggggcgcccgctgcctgggcagaagaccacccaggcctgccaagaggaggatgggcaagaaccctgtgcggcccccccgggccctgccccctgtgcccagcattgatgacatccccctgagccggcccaagaagaagaagcccaggaccaagaacaccccagccagcgccagcctggagggcctggcccagacagctggaagaagacccagcgagggcaatgagcccagcaccaaggagctgaaggagcaccctgaggcccctgtgcagaggcggcagaagaagacccggctgcccctggagctggagaccagcagcacccagaagaagagcagcagcagcagcctgctgagaaatgaaaatggaattgatgctgagcctgctgaggaggccgtcatccagaagcccaggaggaagaccaagaagacccagcctgctgagctgcagtatgccaatgagctgggcgtggaggatgaggacatcatcacagatgagcagaccaccgtggagcagcagagcgtcttcaccgcccccaccggcatcagccagcctgtgggcaaggtgtttgtggagaagagccgccgcttccaggccgctgacagaagtgagctgatcaagaccacagagaacattgatgtgtccatggatgtgaagcccagctggaccaccagagatgtggccctgactgtgcaccgggccttcaggatgattggcctcttcagccacggcttcctggccggctgtgctgtgtggaacatcgtggtgatctacgtgctggccggggaccagctgagcaacctgagcaacctgctgcagcagtacaagaccctggcctaccccttccagagcctgctgtacctgctgctggccctgagcaccatcagcgcctttgacagaattgactttgccaagatctctgtggccatccggaacttcctggccctggaccccacagccctggccagcttcctgtacttcaccgccctgatcctgagcctgagccagcagatgaccagtgaccgcatccacctgtacacccccagctctgtgaatggcagcctgtgggaggccggcatcgaggagcagatcctgcagccctggatcgtggtgaacctggtggtggccctgctggtgggcctgtcctggctgttcctgagctaccggcccggcatggacctgtctgaggagctgatgttcagcagcgaggtggaggagtacccagacaaggagaaggagatcaaggccagcagctag

SEQ ID NO: 243201 - DNA, 942 bp, Artificial Sequence
  derived and/or modified sequence
atgcggaccgacagcggcgcccggctggaggagggccacctgcggcccccgcgcgcactgccccctgtcccttctatcgatgatatcccgctgagtagaccgaagaaaaaaaaaacccagcccgccgaactgcaatatgccaacgaactgggagtagaagacgaggatatcattaccgatgaacagactaccgtcgagcagcagtctgtgtttaccgctcccaccggcatctcacagcctgtaggaaaggtgttcgtcgaaaagagcaggcgatttcaggctgccgatcgcagtgagctgatcaaaaccacagaaaatatcgacgtgagcatggacgtaaaacctagttggactacacgggacgtcgcattaactgttcatcgggcattccggatgattgggctgttttcacatggcttccttgccggctgtgcagtctggaacatcgtggtgatttacgtgctagctggggatcagctgagcaatctctcaaaccttctgcaacagtataagacactggcgtatcctttccagtcactactctatctcctcctcgctctgtccacgattagtgctttcgaccgcattgacttcgccaagatcagtgtggcaatccggaattttttggccctggatccaaccgctctggcatcatttctgtatttcacagccctcattctctctttgagtcagcaaatgacaagtgatcgtatccatctttatactccttcctccgtgaatggctccctctgggaggcagggatcgaggagcagatattgcagccttggattgtggtgaatcttgtcgtggctcttctcgtcggcctgtcgtggctgtttctctcgtataggcccggcatggacctgtccgaggaacttatgttttcttctgaagttgaggagtaccctgacaaagagaaggaaatcaaagcctctagttag

SEQ ID NO: 243202 - DNA, 1203 bp, Artificial Sequence
  derived and/or modified sequence
atgggcaagaaccccgtgcggcccccccgggccctgccccccgtgcccagccaggacgatatccccttatccaggccaaagaagaagaaaccacggactaagaacacacccgcttctgcatccctggagggactcgcccagacggctggaaggcggccctcagaggggaacgaaccttccaccaaagaactcaaagaacatcctgaagcccccgtgcagcgacgtcagaaaaaaactagactcccactagaattggagacaagttctacacagaagaagtcctcgagctccagcctcctgcggaacgaaaatgggatcgatgcggaacctgccgaagaggccgtaattcaaaaaccccgcaggaagacaaagaaaacgcagccagccgagctgcagtatgcgaacgaattaggcgtggaggatgaggatattatcactgacgagcagaccactgtagagcagcagtcggtgttcactgcgcctactggtattagtcaacctgtgggcaaggtctttgttgagaagtcaagaaggtttcaggctgccgatcggtctgagctcatcaagactacggagaatattgatgtgtcgatggacgttaagcccagttggactactcgagatgtggccttgaccgtccatagagccttcagaatgatcggactgttcagccacggtttcttggcgggatgcgcagtatggaacatcgtggtaatctatgtgctggctggcgaccagctctctaacctgtctaatctgctgcaacagtataaaaccctggcctatccattccagtccctcttgtacctattgctggccctgtcaacaatatcagcttttgacaggatcgattttgcgaagatcagcgttgctatccggaattttctggctctggatccgactgcactcgcctcctttctgtactttaccgcactcattctctcactctcccagcagatgacttcggaccgaatccacctttacacacctagttccgtaaacggcagcttatgggaggccgggattgaggagcagatcctgcaaccatggattgtggtcaacctggtcgttgccctgcttgttggcctttcctggctgtttctgtcctataggcctggaatggatctctccgaagaactgatgttctcctccgaggtagaagaatatccagataaagaaaaagagattaaagcctcctcttag

SEQ ID NO: 243203 - DNA, 1293 bp, Artificial Sequence
  derived and/or modified sequence
atgacccactgcgcctgcgcccgggaccggcgggagggctggggcgcgagatgcttgggtcgacgtcctccaagacctgctaagcgcagaatgggcaaaaacccggtgcgcccaccccgagcccttcccccagttccatcaatagacgacataccactgtcccgcccgaaaaaaaaaaaacccagaacgaagaacactccagccagtgcatctctcgagggcctggcccaaaccgctgggagaagaccctcagaggggaatgagccttcaaccaaagagctcaaagaacatccagaggctccggtgcagcgacgccagaagaagactcggctacctcttgaactggagacctcctctacacagaagaaatcgagctcctcaagcctgctgagaaatgaaaacggcatcgatgccgagcccgccgaagaggccgtaatccaaaagccccggcgcaaaacaaaaaaaactcaacctgcagaactgcagtacgcaaatgagctgggagtggaggacgaggatatcattactgacgagcaaaccactgtggaacagcagagtgtgttcacagcccctacgggaatctctcagccagtcggaaaggttttcgtcgagaaaagcagacgattccaagcagccgaccgtagcgagctaataaagactaccgaaaacatcgatgtgtcaatggatgtgaaaccttcatggacgaccagagacgtggccttaaccgtgcaccgagcctttcgcatgattggcctgttctctcacggattcttagccggttgtgctgtctggaacatcgtcgtcatatacgttttagccggagaccagctttctaatctttctaacctgctccaacagtataaaacgctggcttatcctttccaatcccttctctatctgctccttgcactgtcaaccatcagtgcattcgacaggatcgactttgctaagatctcagtggccattaggaacttcctggctctagaccccactgccctggcctcatttctttactttactgccctgatactgagcctgtcccagcaaatgacttccgaccgtatccatttatacaccccatcaagcgtaaatggcagcctctgggaggctggcattgaagaacaaatcctccagccttggattgttgtgaacctcgtagtcgcactgcttgtcggtctttcttggttattcttatcgtaccgacctggcatggacttgtccgaggagctgatgttctcctccgaggtcgaagaatatcctgacaaggagaaggagattaaggcctcgagctag

SEQ ID NO: 243204 - DNA, 942 bp, Artificial Sequence
  derived and/or modified sequence
atgaggacagattccggagccaggctggaagaggggcatctgcgccctccgagagccctacctccagtaccctcaatcgatgatattcctctgagccggcctaaaaagaaaaaaacccagcctgctgaactccagtacgcgaacgaactgggagtggaagacgaggatattataactgatgagcagactacagttgagcaacagtcggtgttcacagcgccaacggggataagtcagccagtcgggaaagtgtttgtggagaagagtcgcaggttccaggccgctgatagaagtgagctgatcaagactactgagaacattgacgtatcaatggacgtcaagccgagctggaccactcgggacgtggccctcacagtgcatagagccttccggatgattggcctattttctcacggatttcttgcagggtgcgccgtatggaacatcgtggttatttacgttctggccggagatcagttgtctaacctatcaaacctactgcagcagtataagactcttgcataccccttccaaagtctcctgtacctcttattggctcttagcacaataagcgcttttgaccggatcgacttcgctaaaatatccgttgcgatccgcaattttctcgccttggaccctaccgctctcgctagcttcttatactttacggcgctcatcctctcactgtcccagcagatgactagcgaccgcatacatctgtacactcccagtagtgtaaacggttccctgtgggaagccggtattgaggagcagattctgcaaccttggatcgtcgttaacctcgtcgttgcactccttgtcggcctttcgtggcttttccttagctatcgcccaggcatggaccttagcgaagagctgatgttctcgtccgaagtcgaagaataccccgataaagagaaagagatcaaagcttcctcctag

SEQ ID NO: 243205 - DNA, 1203 bp, Artificial Sequence
  derived and/or modified sequence
atgggcaagaatcccgtgaggccaccgcgtgcgctgcctcccgtgccaagccaggacgatatccccctgtctcgtcccaaaaagaagaagccacgcactaagaacacccccgcaagtgcctcactggagggactggcgcagactgctgggagaaggccttcagagggaaacgagccttccacgaaggagcttaaagagcaccctgaggcacccgtgcaacgtagacaaaagaaaacacgcctgcccctcgaactggaaacatcctctacccagaaaaaaagctcctcaagctccctgctaaggaatgagaacggtatagacgccgaacccgctgaagaagccgtgatccaaaaacctcggaggaagactaagaaaacccagccagcggagctccagtacgcaaacgagttgggtgtggaggacgaagacatcatcacggatgagcagacaacggtggagcagcagagcgtttttactgctccaaccgggatcagccaacccgtgggtaaggtcttcgtcgaaaaaagtaggcgcttccaggcggctgatcgatccgaacttatcaagacgacggagaacatcgacgtgtctatggacgtgaaacctagttggacaacgcgtgacgttgctttaacggtacatcgcgctttcaggatgatcggcctgttctcacacggcttccttgcgggttgtgccgtgtggaacatagtcgtgatctacgtcctggcaggcgatcagttgtccaatctatcaaatctgcttcagcagtacaagaccctcgcctatccgttccagtctttactgtatcttcttctcgctctgtctacaatctccgcctttgatcgtatcgacttcgccaaaatatctgtggctataaggaactttctcgcattagacccaacagccctcgccagcttcctctattttacagcacttattttaagtcttagtcaacagatgacctcagaccgcattcatctgtatactccttcctcagtcaatggatccctttgggaagcgggaattgaggagcagatcctgcagccttggatcgtagtgaacctggtcgtggctttattggtgggactgtcctggctctttctctcctacagaccgggaatggaccttagcgaggagctcatgttcagctcagaggtagaggagtacccagacaaggagaaggagattaaagcttcctcttag

SEQ ID NO: 243206 - DNA, 1293 bp, Artificial Sequence
  derived and/or modified sequence
atgactcattgcgcttgcgcaagagataggagagaaggatggggagctaggtgtctgggccgaaggcccccacgtcccgcaaagagacgcatggggaaaaatcctgtgcgaccaccacgggcacttccccctgtaccctccatcgatgatatacccctcagccgccctaaaaaaaaaaagcctaggactaagaatacccccgcttccgccagtctggagggattggcgcagacagccggacggcgaccctcagagggcaatgaaccctctacaaaggaattaaaagagcacccggaagcaccagtccagcgcagacaaaaaaagacacggcttcctttggaactagagacttcatcaactcagaagaaaagctcctcctcctcgttgctcaggaatgaaaacgggattgacgctgagcccgctgaagaggcagtgatccaaaaacctcgcaggaagaccaagaaaacacagcctgcagaattacagtatgcaaatgagctgggtgtcgaggacgaggacatcatcaccgatgagcagacaacagtggaacagcagtccgtctttacagcaccgaccgggattagccagccagttggaaaagtcttcgtcgagaagagtagaaggtttcaagcagccgaccgatccgagcttatcaaaaccacagaaaatatcgatgtttctatggatgttaaaccttcatggactacacgtgatgtcgctcttacagttcacagggccttcagaatgatcggcctattttctcatgggttcctggctggctgcgcagtgtggaacattgtggtaatctatgtcctggccggagaccagcttagcaacctctctaatctgttgcagcagtataagacattagcttatccttttcagagtctactctatctgctacttgctctgtcaacaatcagcgccttcgataggatagactttgccaaaattagcgtagccattcgaaacttcctcgccctggacccaaccgcccttgcctcattcttgtactttaccgcgctgatcttgagcctcagccaacagatgacatcggaccgaatccacctctacaccccatcttctgtcaatggcagcctgtgggaggctggcattgaagaacagatactgcagccttggatcgtggtgaatttggtagtggccctactcgttggactttcatggctgtttctctcctatcggcctgggatggatctgagcgaggagctgatgttcagcagcgaggtagaagaataccctgacaaagaaaaggaaattaaggcttcaagttag

SEQ ID NO: 243207 - DNA, 1378 bp, Artificial Sequence
  derived and/or modified sequence
acgaagccccggcgtcccacaggtcccggaggccgctgcgtcgcggggagctgggctcgggccgccggcggttgcgccggggcagccccgcggggagagcaccatgaggactgactcgggggctcggctggaggagggccacctgcgtcctccacgagctcttccacctgtgccaagtatagatgatattccacttagtcgtcctaagaaaaagaaaacccagccagcagaattacagtatgccaatgagctaggagtagaagatgaagacataatcactgatgagcaaactactgtggaacagcagtctgtattcactgcacccactggcattagccagcctgtaggcaaagtatttgtggaaaaaagccggagattccaggctgctgatcgttcagagttgataaagaccacagaaaacatagatgtgtcaatggacgtgaagccttcctggaccaccagagatgtggcacttacagtgcaccgggctttcaggatgattggtctcttttctcatggattcttggctggctgtgctgtgtggaatattgttgtgatatatgttctagcaggagatcagctatccaacctctcaaaccttctgcaacaatacaagaccctagcgtatccattccagagtcttctgtacttgcttttggctctgagtacaatttcagcttttgacaggattgactttgctaaaatatcagtagcaatccgaaattttttggccctggatcctacagctttagcatctttcttgtactttactgctcttatactatctctgagtcagcaaatgacaagtgacagaatccacctttacacaccttcttctgttaatggtagcctctgggaagcaggaattgaggaacagattctccagccatggattgtggtgaatctcgtggtggctcttctggttggattatcttggctatttttgtcttataggccaggcatggatcttagtgaagagttaatgttctcctcagaggtggaagaatatcctgataaagagaaagaaatcaaagcctcttcataataccagctcacctttggaggaataatgacccagtatttgtcccatttttgtttttaaatgtatttttataagatgtatacatgtgtatttgtaatagattttttgattatataatactgaaacatctctcaatattatgaaaaatgttaaaattgtgtttgctgtttatgtctaaacattaatttgtctagcattatcatcttaatgacaaagggaataatgaactagaaaccagcaagtgaaagtgtttatttcctattttctcaaaacagttgtatttataactattaccttaaaaagcactggtttagaaaaagccataacttaaatagt

SEQ ID NO: 243208 - DNA, 5592 bp, Artificial Sequence
  derived and/or modified sequence
ttcccgcaaacaaatcaccgccaccacttaggaaaccacgggaaagctgtgattgcagcgccacggtcgccagatttctgctcctgggcacattacccccaactccgaggccccctttttggcagggctagtctggactggccaatccaggtccctgcacgcctctcaccgcaacatccccgcagggcgctgcgcgcggggtactagccaggcggcgcggcccgatgacgcattgcgcctgcgcgcgcgaccgagccgggaggggtggggcgccaggtgcttgggggccggcggccgccgaggccggctaaacgcagaatggggaagaatcctgtgcgtcctccacgagctcttccacctgtgccaagtcaagatgatattccacttagtcgtcctaagaaaaagaagcccagaacaaaaaacacaccagcaagtgcttctttggaaggccttgctcagactgctggtcgaaggccctctgagggcaatgagccatcaactaaagaactcaaagagcacccagaggctcctgttcaaagaagacagaaaaagacaaggctacctcttgaattggagacttcctccacccaaaagaagtcatctagttcatctttattacgaaatgaaaatggtattgatgcggagccagctgaggaggcagttattcaaaaacctcggaggaagacaaagaaaacccagccagcagaattacagtatgccaatgagctaggagtagaagatgaagacataatcactgatgagcaaactactgtggaacagcagtctgtattcactgcacccactggcattagccagcctgtaggcaaagtatttgtggaaaaaagccggagattccaggctgctgatcgttcagagttgataaagaccacagaaaacatagatgtgtcaatggacgtgaagccttcctggaccaccagagatgtggcacttacagtgcaccgggctttcaggatgattggtctcttttctcatggattcttggctggctgtgctgtgtggaatattgttgtgatatatgttctagcaggagatcagctatccaacctctcaaaccttctgcaacaatacaagaccctagcgtatccattccagagtcttctgtacttgcttttggctctgagtacaatttcagcttttgacaggattgactttgctaaaatatcagtagcaatccgaaattttttggccctggatcctacagctttagcatctttcttgtactttactgctcttatactatctctgagtcagcaaatgacaagtgacagaatccacctttacacaccttcttctgttaatggtagcctctgggaagcaggaattgaggaacagattctccagccatggattgtggtgaatctcgtggtggctcttctggttggattatcttggctatttttgtcttataggccaggcatggatcttagtgaagagttaatgttctcctcagaggtggaagaatatcctgataaagagaaagaaatcaaagcctcttcataataccagctcacctttggaggaataatgacccagtatttgtcccatttttgtttttaaatgtatttttataagatgtatacatgtgtatttgtaatagattttttgattatataatactgaaacatctctcaatattatgaaaaatgttaaaattgtgtttgctgtttatgtctaaacattaatttgtctagcattatcatcttaatgacaaagggaataatgaactagaaaccagcaagtgaaagtgtttatttcctattttctcaaaacagttgtatttataactattaccttaaaaagcactggtttagaaaaagccataacttaaatagtgttataaaatatatatcaggtttaaacataaatttagcgaatatggtagaagggaaaaaagccttcatttttgacctccccttactgaataaattgaaatatgaagtttgtcttttctgaaactggcttagtgattgagtatcatgtaataattataatataatttagcttgaaagatgctctacattatgaccaataaaaagggaatgtatgttttgtttgaaaaattatataacctaaattttttacctagaagtaactaaaaagttgcttctcattataatctgtactagtggttctcatatctggttgtacatcaggatcatagagggagattttaaaaatctatgtagcaaaagaggctgagcagggcaaggctcaggggaataaaggagagacctgtgagcttgtgggctcccagttgacatctgcagtaccctttcctctgtcccttttttctgagtgacaagaaataggagtagaaattcaccatctctgttctccagctctttgtcagagaggtttctggttttccaggaaatccccctcttgagatgggtcctgcactgggaaagatctcttcagaactatatccaatggtacctcagctgttgtatatgagaccctaaagctcaagttgaggagaagactagctatgggaaaaaatgtttcaaaggctgttgagcacatcaataaaactattgagcctgccctgattagcaagcacctgaatgttatagaacagaagaggattgacaaattgatgatagagacagttgaccctgacaataggtctaaatttggagtgaacattatactgggaatctcttttgctgtttgtaaggctggagctgccgaaaagggattctccctgctgtcacagaattgtgaatttgctggcaattctgaaggcatcctgctagttccagctttcactgtgaccagcaatggttctcaatctggcaataagctggcagtataggagttcataatcttccccgtcagcaaacttcagggaagccatgctcgttagagccaaggcttagcacacttgagccgtgtcatcaaagagaaatgtgagaaagctgctgccaatgtgggggattgtggtaggctgcataatgtctcctaaagatgtccatgtcctaatccctggaacttgtgaatatactactttacttggccaaagggatttgcagatatgattaaggttatgaaccttaaaacggggacattatcctgtattatccagaagggtccagtgtaatcttatgagtccttaaaagcagagaagaaagccttttatgtctgtggtcagagaggtcagaagttatgatattgctggctttgaagatggaagagggggccatgagccaaggagagtgatgaccttgcagctgagtacggcccttggccaacaatgagcaaggaaatggatttcagtcacataaccacaaggaactgagttctatgagtatcccaaatgagcaaggaaacaaatcctcccctagagccaagaaaggaaggcagctctgtggataccttggttttggcctggtgctgcccatgtcatacttttgacatacagaactgtaagatagcaagtgtatgttgactaagctgctaaattggtggtgattgcttatggcagcaatagaaagctatatatcctagagaataaagaaggctagagctgctgtggaatgcacttgggaaagctggctacattgataatatgtaactgccatgggcatagttgcctttgtattcttccaggtctgggaagtacaacttagacttcagatctcgtaatgacccaggaggcatataaacctgagcagctagtggccctgtacaagtccttcatcagggaaaaacattgagtattccctgattaaggacttgtacagaggactctgttttccctggtgtttctggtgtgtctcaaaaattgtttgactgtgatgacagggaagtttggaagaagttcactgctaatgcatgtctccaggaagcagggaatgatctcacagtgacacttgaggcacattgctgaggccgtcgatgagaattcatgtaactttctccagcttacagtggactagattgacatgcaagctgatccagtccaattggtagggcatcatggtttctcattactcactgacttaaaatacttttattgccatcctggtgaagcactgcactgggtagataacacaggggcaccttgctgatcagagcccttggccaggtacaaagagctcagtttctaaaactctgtcatttcaataatgttataaattgaatcatacagtatgtaattttatgggattcgctttttttctgttgatctctttttttctgagtcatctcagctgttgtgtgtatcaatagttcatttccttttactgttttgtttggtttaactcattgacctattgaaggatatctgggctcattccagtctgtgaataatgctgctgtggacattcatgtgcaagtttttgtgtgaacattaagttttcatttctttaagataaatgcccaggagtgaaactgatgggttgtatgtagttacaaactgccaagctgttttccagagttggcggtaccattctaatttcccatgacaattttttgaagagtccaagctagttgctttagagtgcctcacctacattttttaattgtctgactttttcctaatgacatcacttaatttgttcctcaatctcctgaatttcctatagactggaggttaggtctggtggtttgattagattttttaaaaaaatatgacttcatctgtgatgctgtgtactttatgttgcataacatgaaccctaagaacagagtgagctgctggacagcaagtttcatggggtgcagtaattaacacaccacatagtataaatctgaaataatgacaaatgtgttaagggccttgggatattgggccatgtactctgaggagcacaaggtgaggtgcaggttcctgcccctaaagaactctatcttttgagattagcaactaacagtgtgagcccactaataggatgtgaaagttgtcaaaatcaagttctggtcattgtgttaaaaatcctaacaaatagagctggggaaggccgtgaaaggacgattttcatgcacagatgtctgataatgaggactatcattaaaagactgcacaaaaccacaccttgcacaaaggccatcacaacctgacacacacaaaaaatacttctatgaggacatttgcccagcaactccctgtccaatgtccaactggcaacatccttgttattgatccttgtagccaaggataattctctcaaaacaatcatttttgctttaaaaaccgttgtcttccttgacctccctgtatatgcacatagtttactgtggcacttgtattcttattgcaatgcctactcctgaataaacatcattttctttcagagagtctccctctctgttatttaggctgacaaggatatgccaagaagtagcttggatatagcagttaactctgcctttaggatatgtgtatggggatataagagttaactaaaagctgacctttgagttggtccttgaataaaagaagaatagattccaaaaataagaggaataaataatgatcctgagctaggagagtacattttgcagacctttggtttccatattaagaaattcagatttttatgtacaataaagaagttctggaattctctg

SEQ ID NO: 243209 - DNA, 5364 bp, Artificial Sequence
  derived and/or modified sequence
atgacgcattgcgcctgcgcgcgcgaccgacgggaggggtggggcgccaggtgcttggggcggcggccgccgaggccggctaaacgcagaatggggaagaatcctgtgcgtcctccacgagctcttccacctgtgccaagtatagatgatattccacttagtcgtcctaagaaaaagaagcccagaacaaaaaacacaccagcaagtgcttctttggaaggccttgctcagactgctggtcgaaggccctctgagggcaatgagccatcaactaaagaactcaaagagcacccagaggctcctgttcaaagaagacagaaaaagacaaggctacctcttgaattggagacttcctccacccaaaagaagtcatctagttcatctttattacgaaatgaaaatggtattgatgcggagccagctgaggaggcagttattcaaaaacctcggaggaagacaaagaaaacccagccagcagaattacagtatgccaatgagctaggagtagaagatgaagacataatcactgatgagcaaactactgtggaacagcagtctgtattcactgcacccactggcattagccagcctgtaggcaaagtatttgtggaaaaaagccggagattccaggctgctgatcgttcagagttgataaagaccacagaaaacatagatgtgtcaatggacgtgaagccttcctggaccaccagagatgtggcacttacagtgcaccgggctttcaggatgattggtctcttttctcatggattcttggctggctgtgctgtgtggaatattgttgtgatatatgttctagcaggagatcagctatccaacctctcaaaccttctgcaacaatacaagaccctagcgtatccattccagagtcttctgtacttgcttttggctctgagtacaatttcagcttttgacaggattgactttgctaaaatatcagtagcaatccgaaattttttggccctggatcctacagctttagcatctttcttgtactttactgctcttatactatctctgagtcagcaaatgacaagtgacagaatccacctttacacaccttcttctgttaatggtagcctctgggaagcaggaattgaggaacagattctccagccatggattgtggtgaatctcgtggtggctcttctggttggattatcttggctatttttgtcttataggccaggcatggatcttagtgaagagttaatgttctcctcagaggtggaagaatatcctgataaagagaaagaaatcaaagcctcttcataataccagctcacctttggaggaataatgacccagtatttgtcccatttttgtttttaaatgtatttttataagatgtatacatgtgtatttgtaatagattttttgattatataatactgaaacatctctcaatattatgaaaaatgttaaaattgtgtttgctgtttatgtctaaacattaatttgtctagcattatcatcttaatgacaaagggaataatgaactagaaaccagcaagtgaaagtgtttatttcctattttctcaaaacagttgtatttataactattaccttaaaaagcactggtttagaaaaagccataacttaaatagtgttataaaatatatatcaggtttaaacataaatttagcgaatatggtagaagggaaaaaagccttcatttttgacctccccttactgaataaattgaaatatgaagtttgtcttttctgaaactggcttagtgattgagtatcatgtaataattataatataatttagcttgaaagatgctctacattatgaccaataaaaagggaatgtatgttttgtttgaaaaattatataacctaaattttttacctagaagtaactaaaaagttgcttctcattataatctgtactagtggttctcatatctggttgtacatcaggatcatagagggagattttaaaaatctatgtagcaaaagaggctgagcagggcaaggctcaggggaataaaggagagacctgtgagcttgtgggctcccagttgacatctgcagtaccctttcctctgtcccttttttctgagtgacaagaaataggagtagaaattcaccatctctgttctccagctctttgtcagagaggtttctggttttccaggaaatccccctcttgagatgggtcctgcactgggaaagatctcttcagaactatatccaatggtacctcagctgttgtatatgagaccctaaagctcaagttgaggagaagactagctatgggaaaaaatgtttcaaaggctgttgagcacatcaataaaactattgagcctgccctgattagcaagcacctgaatgttatagaacagaagaggattgacaaattgatgatagagacagttgaccctgacaataggtctaaatttggagtgaacattatactgggaatctcttttgctgtttgtaaggctggagctgccgaaaagggattctccctgctgtcacagaattgtgaatttgctggcaattctgaaggcatcctgctagttccagctttcactgtgaccagcaatggttctcaatctggcaataagctggcagtataggagttcataatcttccccgtcagcaaacttcagggaagccatgctcgttagagccaaggcttagcacacttgagccgtgtcatcaaagagaaatgtgagaaagctgctgccaatgtgggggattgtggtaggctgcataatgtctcctaaagatgtccatgtcctaatccctggaacttgtgaatatactactttacttggccaaagggatttgcagatatgattaaggttatgaaccttaaaacggggacattatcctgtattatccagaagggtccagtgtaatcttatgagtccttaaaagcagagaagaaagccttttatgtctgtggtcagagaggtcagaagttatgatattgctggctttgaagatggaagagggggccatgagccaaggagagtgatgaccttgcagctgagtacggcccttggccaacaatgagcaaggaaatggatttcagtcacataaccacaaggaactgagttctatgagtatcccaaatgagcaaggaaacaaatcctcccctagagccaagaaaggaaggcagctctgtggataccttggttttggcctggtgctgcccatgtcatacttttgacatacagaactgtaagatagcaagtgtatgttgactaagctgctaaattggtggtgattgcttatggcagcaatagaaagctatatatcctagagaataaagaaggctagagctgctgtggaatgcacttgggaaagctggctacattgataatatgtaactgccatgggcatagttgcctttgtattcttccaggtctgggaagtacaacttagacttcagatctcgtaatgacccaggaggcatataaacctgagcagctagtggccctgtacaagtccttcatcagggaaaaacattgagtattccctgattaaggacttgtacagaggactctgttttccctggtgtttctggtgtgtctcaaaaattgtttgactgtgatgacagggaagtttggaagaagttcactgctaatgcatgtctccaggaagcagggaatgatctcacagtgacacttgaggcacattgctgaggccgtcgatgagaattcatgtaactttctccagcttacagtggactagattgacatgcaagctgatccagtccaattggtagggcatcatggtttctcattactcactgacttaaaatacttttattgccatcctggtgaagcactgcactgggtagataacacaggggcaccttgctgatcagagcccttggccaggtacaaagagctcagtttctaaaactctgtcatttcaataatgttataaattgaatcatacagtatgtaattttatgggattcgctttttttctgttgatctctttttttctgagtcatctcagctgttgtgtgtatcaatagttcatttccttttactgttttgtttggtttaactcattgacctattgaaggatatctgggctcattccagtctgtgaataatgctgctgtggacattcatgtgcaagtttttgtgtgaacattaagttttcatttctttaagataaatgcccaggagtgaaactgatgggttgtatgtagttacaaactgccaagctgttttccagagttggcggtaccattctaatttcccatgacaattttttgaagagtccaagctagttgctttagagtgcctcacctacattttttaattgtctgactttttcctaatgacatcacttaatttgttcctcaatctcctgaatttcctatagactggaggttaggtctggtggtttgattagattttttaaaaaaatatgacttcatctgtgatgctgtgtactttatgttgcataacatgaaccctaagaacagagtgagctgctggacagcaagtttcatggggtgcagtaattaacacaccacatagtataaatctgaaataatgacaaatgtgttaagggccttgggatattgggccatgtactctgaggagcacaaggtgaggtgcaggttcctgcccctaaagaactctatcttttgagattagcaactaacagtgtgagcccactaataggatgtgaaagttgtcaaaatcaagttctggtcattgtgttaaaaatcctaacaaatagagctggggaaggccgtgaaaggacgattttcatgcacagatgtctgataatgaggactatcattaaaagactgcacaaaaccacaccttgcacaaaggccatcacaacctgacacacacaaaaaatacttctatgaggacatttgcccagcaactccctgtccaatgtccaactggcaacatccttgttattgatccttgtagccaaggataattctctcaaaacaatcatttttgctttaaaaaccgttgtcttccttgacctccctgtatatgcacatagtttactgtggcacttgtattcttattgcaatgcctactcctgaataaacatcattttctttcagagagtctccctctctgttatttaggctgacaaggatatgccaagaagtagcttggatatagcagttaactctgcctttaggatatgtgtatggggatataagagttaactaaaagctgacctttgagttggtccttgaataaaagaagaatagattccaaaaataagaggaataaataatgatcctgagctaggagagtacattttgcagacctttggtttccatattaagaaattcagatttttatgtacaataaagaagttctggaattctctg

SEQ ID NO: 243210 - protein, 164 aa, Artificial Sequence
  derived and/or modified sequence
MMLTQAPSSVVRSRNSRNHTVNSGGSCLSASTVAIPAINDSSAAMSACSTISAQPASSMDTQMHSPKKQERVNKRVIWGIEVAEELHWKGWELGKETTRNLVLKNRSLKLQKMKYRYQYKGSRTQCHSLEPRKQALFKTKQNKQKKPLTCHIKASECLKYVQYE

SEQ ID NO: 243211 - DNA, 495 bp, Artificial Sequence
  derived and/or modified sequence
atgatgctgacgcaggcgcccagtagtgtagtccggtcgcgtaactccaggaatcatacggtcaactctggggggtcatgtctgagtgcgagcactgtcgctatccccgcgatcaacgattcatccgcagccatgtccgcctgcagtacgatctctgcccaaccggcatctagcatggacacccagatgcattcacctaagaagcaggagcgcgttaataaacgtgtgatttggggaattgaggtggccgaagagctgcactggaaaggctgggagcttggcaaggagacaacaaggaatctggtgctgaaaaaccgaagcctgaagcttcagaagatgaagtaccggtaccaatacaaaggctctaggactcaatgtcatagcctcgagccacggaaacaggcgctgtttaagaccaagcaaaataaacagaaaaaacccttgacttgtcacatcaaggctagcgagtgtcttaagtacgttcagtacgagtag

SEQ ID NO: 243212 - DNA, 495 bp, Artificial Sequence
  derived and/or modified sequence
atgatgcttacgcaagccccttcgagcgtggttagatccagaaacagcaggaatcacaccgtcaactcgggaggctcgtgcttgtccgcttccaccgtcgccatacccgccatcaatgactctagtgctgccatgtctgcatgttccactatcagcgcccaaccagccagtagcatggacacccagatgcatagtcctaaaaagcaggaaagggtgaataaacgcgttatatggggaattgaggtggctgaagaactccattggaaaggatgggagctggggaaggagaccacaagaaatctggtgctcaagaaccgctctctgaaattacagaagatgaaatacaggtatcagtataaggggtccaggacccagtgtcactctctcgagccccggaagcaggccctgttcaagaccaagcagaataagcagaagaagcctctcacctgtcacattaaggcgtctgaatgtctcaaatacgttcagtacgaatag

SEQ ID NO: 243213 - DNA, 495 bp, Artificial Sequence
  derived and/or modified sequence
atgatgctgacccaggcccccagctctgtggtgcgcagcaggaacagcaggaaccacacagtgaacagcggcggcagctgcctgagcgccagcacagtggccatcccagccatcaatgacagcagcgctgccatgtctgcctgcagcaccatcagcgcccagcctgccagctccatggacacccagatgcacagccccaagaagcaggagcgggtgaacaagagggtcatctggggcatcgaggtggccgaggagctgcactggaagggctgggagctgggcaaggagaccaccaggaacctggtgctgaagaacagaagcctgaagctgcagaagatgaagtaccgctaccagtacaagggcagcaggacccagtgccacagcctggagcccaggaagcaggccctcttcaagaccaagcagaacaagcagaagaagcccctgacctgccacatcaaggccagcgagtgcctgaagtatgtgcagtatgaatag

SEQ ID NO: 243214 - DNA, 495 bp, Artificial Sequence
  derived and/or modified sequence
atgatgctgacccaggcccccagcagcgtggtgcggagccggaacagtcggaatcatacagtgaactccggcgggtcctgcttgagcgcaagtaccgtagccatccccgctatcaatgactctagcgccgctatgagtgcatgcagcaccatctcggcacagcctgcatcttctatggacacccaaatgcactccccgaaaaaacaagagcgagtgaacaagcgtgttatatgggggattgaggtggcggaagaactacactggaaaggatgggagctcggaaaagaaacgactcgcaacttggtgctcaagaacaggagtctcaaattgcagaagatgaaatataggtatcagtacaagggcagtaggacgcagtgtcattccctagaaccccgcaaacaggctttgttcaagaccaagcagaataagcagaaaaaaccattgacttgccacatcaaagcctccgaatgcctgaagtacgtgcagtatgaatag

SEQ ID NO: 243215 - DNA, 495 bp, Artificial Sequence
  derived and/or modified sequence
atgatgctgacccaggcccccagcagcgtggtgcggagccggaactctcgcaatcacacagtcaattccgggggatcctgcctctcagcctctactgttgcaataccggccatcaacgacagctctgccgcaatgtctgcctgttctaccatttctgcccagccagcctcatcgatggacacccaaatgcacagtcctaaaaaacaggagagggtgaataagcgcgtgatctggggcatcgaagtggccgaggagctccattggaagggatgggagctagggaaggaaacaactcgcaatctggtgttgaagaaccggtccctgaaactacagaagatgaagtacaggtaccaatacaaaggctccagaacacaatgccactccctggaaccgcgaaagcaggccttgtttaagacaaaacaaaacaagcagaagaagcctttgacttgccatatcaaggccagtgagtgtctcaagtatgtgcagtacgagtag

SEQ ID NO: 243216 - DNA, 495 bp, Artificial Sequence
  derived and/or modified sequence
atgatgctgacacaagcccctagtagcgtggtgcgatctaggaacagccgtaaccacaccgtgaactccgggggatcctgtcttagcgccagtacagtggctattcccgcaatcaacgactcatcagcagcaatgagcgcttgctctaccatcagcgctcagccagcttcctccatggatacacaaatgcactcccccaagaaacaggagagggttaacaagagggtgatttgggggatcgaggtggccgaagaattacactggaaggggtgggagctgggcaaagaaacaacccgtaatcttgtgttaaagaaccgcagtttaaaactgcaaaagatgaaatacagatatcagtacaaaggctctcgaacacagtgtcatagtctagagcccaggaaacaagcactcttcaaaacgaagcagaataaacagaaaaaaccgctaacctgtcatattaaggcaagcgaatgcttgaaatacgtgcaatatgagtag

SEQ ID NO: 243217 - DNA, 495 bp, Artificial Sequence
  derived and/or modified sequence
atgatgctaactcaggcacccagctctgtcgtccgcagtagaaattctaggaaccacactgtgaactccggtggcagttgtctgagtgctagcactgtggctattcctgccataaacgattcctcggcagccatgtccgcctgttctaccatcagcgcacagcccgcttccagtatggacacccaaatgcactcacctaaaaagcaggaacgcgtcaacaaaagagtcatctgggggatcgaggtcgcggaggagctgcactggaagggatgggaactgggcaaggagaccactaggaacctagtgctaaagaatagatccctcaaactccaaaagatgaaataccgttaccagtataaaggcagccgaactcagtgtcacagcctggagccgcgaaagcaggcgctgtttaagaccaagcagaacaagcagaaaaagcccctcacctgtcatatcaaggcctccgaatgcctgaagtacgtgcaatacgagtag

SEQ ID NO: 243218 - DNA, 2259 bp, Artificial Sequence
  derived and/or modified sequence
gtcctgtatctatggagacggcaatatggaggcgatcttacatttctttgatttcatctgaacgtccagttcacaattggagctccatactcagagtgctccctttggactgtgtcccaaggacatgatgctcacccaggctccaagctccgtcgtgaggtccaggaacagcaggaaccacaccgtgaactctggtggatcctgcctgagtgccagcacagtggccatccctgccatcaacgacagcagtgcagccatgagtgcctgcagcaccatcagcgcccagcccgcaagctccatggacactcagatgcactccccaaagaagcaggagagagtgaacaagagggtcatctggggcattgaggtggctgaggagctgcattggaaaggctgggagctaggaaaggagaccacaaggaatctggttctgaaaaatcgatccttgaaactccagaagatgaagtacaggtaccagtataagggatcaaggacccagtgccacagccttgagccccgaaagcaggctctcttcaaaacaaaacaaaacaaacaaaaaaaacctttaacatgccatataaaagccagtgagtgtttaaaatacgtgcagtatgaataattatgcagctataatccattatttttcattgtggtatagtgtcccaatgtgtgcctgtaccataatgtattcatccagaatgaaggaagtttgggctgtttctatttgggactgttggcattcgtgtatatgtgtccagttacataagtacaagagtttttctggggaataccaggtactatgaaggctcacgtgattttggagtcttatgaaggttttttttttttttttcctgcgtagttgttaaattggtgaccttgcgggatggaaccttctattccaccaccttgctccaccttctgtcttttctggggaatagacgcaggagtagaattgcggaggcttgggccatgtacctgttcacttgctgtagataaaccaaactatttcccaaagtgcatggatttctttagacacccaccagcagcattagagagttcccattcctccacatccttaccaataactgctattgtcagaatttaaaatttttgccagtaatggtaacttgtggttttaatttgcatttccctgattactaatgaatgaggatgagtgtctttttgtaggttattgacactttgcatttcttcatgtgtgaaatttatgatcaagtctgtggccatttttctcttacattatcttgtcttttttctttttggtataagttcttatcccaattacaaactctttgccagttatgcgttgtggatatcttctctcatcttatgatttgtctttactccctttattgtgtcttttgaagaataaaagttcaaagttgaattttaaaggtatcaactttatcagtctttttattttatgattggtgcttttttatgcttctcctaagaagtccttctctacccctaggtcattaagatattttcctctagtatcttctaaagactttatatttttgccttttatatttgtcttttgtctatatggaattgatttttatgaatagtaagtcttgatagctggtagtatacgtcctcctacttaattcttcttcaagattgtcttggctattcttggccctccctttgatctcttacataaatattcaaatcagcttatcatacatgcacataaaacacttcttgagattttgattgggatttaattggacctatagatgaatatgaggagaaatgatatcattataatattgagtcttttactccatgaacatgggctatttctgtattcattaggttatctttcctgtctctcaatagagtgtaaagttttctccatagacatttagcacatccttagttagatttattcataagtattttatatttttgctgttgttatatatgacatattttttagttgttttatttctgtttgttgctagtttttaaaatgtcatttttatataggtattatgttcagtgatcttggcaaatcctcttattctaataatttatttgttaattttcttgttttttcatgcacacatttgtattttaaatggaaaatgacatttttttttctttctagtccttacacctttggctttccttactgcattgttaaatagaaaagtgttgaacagaagtggttatagaggcatctttgttttgtttatcatctcagagtaaaggactgcaatgtttcactattaa

SEQ ID NO: 243219 - DNA, 1174 bp, Artificial Sequence
  derived and/or modified sequence
ggaaaacagacatgtatgcatacatagcatctggcatatacatagcatctggcatatatacaaatatatgtgccacatatatttgcatatgatttcagctacagtcatcgaggatccctctgctctggagatggattgacttatgctttgattgatttatttcagtgatgtttaccttaaccggttgtagactggtggagaaaacccagaaggtggagaatccatcagtctcatttgcctcttctttcccccttattcctcttctcctaagaggcaagagtgttcagaagaaacaagcagagagtaaaagccagataaaggtaatgcacacacttcagtaacacccactggagcttgctgagcagtgccaagtgtggccatggaggggcctagtggggtgggccttgtccccaagtccctctttggagtgccttccctgagggtgagtccctgggctcccaggcaaagccctggatctcgtgtacagcctcattcctcatggtgccaggtagcacctgttgccagagctgggaagcagaccctctcctccatgacaaggatggccatgagagtctcctccctcagcctctctttctcatgtcactcctgtctcctctcccctctgctctcttcccagctccatactcagagtgctccctttggactgtgtcccaaggacatgatgctcacccaggctccaagctccgtcgtgaggtccaggaacagcaggaaccacaccgtgaactctggtggatcctgcctgagtgccagcacagtggccatccctgccatcaacgacagcagtgcagccatgagtgcctgcagcaccatcagcgcccagcccgcaagctccatggacactcagatgcactccccaaagaagcaggagagagtgaacaagagggtcatctggggcattgaggtggctgaggagctgcattggaaaggctgggagctaggaaaggagaccacaaggaatctggttctgaaaaatcgatccttgaaactccagaagatgaagtacaggtaccagtataagggatcaaggacccagtgccacagccttgagccccgaaagcaggctctcttcaaaacaaaacaaaacaaacaaaaaaaacctttaacatgccatataaaagccagtgagtgtttaaaatacgtgcagtatgaataa

SEQ ID NO: 243220 - DNA, 495 bp, Artificial Sequence
  derived and/or modified sequence
atgatgctgacccaggcccccagcagcgtggtgagaagcagaaacagcagaaaccacaccgtgaacagcggcggcagctgcctgagcgccagcaccgtggccatccccgccatcaacgacagcagcgccgccatgagcgcctgcagcaccatcagcgcccagcccgccagcagcatggacacccagatgcacagccccaagaagcaggagagagtgaacaagagagtgatctggggcatcgaggtggccgaggagctgcactggaagggctgggagctgggcaaggagaccaccagaaacctggtgctgaagaacagaagcctgaagctgcagaagatgaagtacagataccagtacaagggcagcagaacccagtgccacagcctggagcccagaaagcaggccctgttcaagaccaagcagaacaagcagaagaagcccctgacctgccacatcaaggccagcgagtgcctgaagtacgtgcagtacgagtag

SEQ ID NO: 243221 - protein, 297 aa, Artificial Sequence
  derived and/or modified sequence
MEPRALVTALSLGLSLCSLGLLVTAIFTDHWYETDPRRHKESCERSRAGADPPDQKNRLMPLSHLPLRDSPPLGRRLLPGGPGRADPESWRSLLGLGGLDAECGRPLFATYSGLWRKCYFLGIDRDIDTLILKGIAQRCTAIKYHFSQPIRLRNIPFNLTKTIQQDEWHLLHLRRITAGFLGMAVAVLLCGCIVATVSFFWEESLTQHVAGLLFLMTGIFCTISLCTYAASISYDLNRLPKLIYSLPADVEHGYSWSIFCAWCSLGFIVAAGGLCIAYPFISRTKIAQLKSGRDSTV

SEQ ID NO: 243222 - protein, 111 aa, Artificial Sequence
  derived and/or modified sequence
MEPRALVTALSLGLSLCSLGLLVTAIFTDHWYETDPRRHKESCERSRAGADPPDQKNRLMPLSHLLGPLEEVLLPGHRPGHRHPHPERYCAAMHGHQVPLFSAHPLAKHSF

SEQ ID NO: 243223 - DNA, 894 bp, Artificial Sequence
  derived and/or modified sequence
atggagcccagagccctggtgaccgccctgagcctgggcctgagcctgtgcagcctgggcctgctggtgaccgccatcttcaccgaccactggtacgagaccgaccccagaagacacaaggagagctgcgagagaagcagagccggcgccgacccccccgaccagaagaacagactgatgcccctgagccacctgcccctgagagacagcccccccctgggcagaagactgctgcccggcggccccggcagagccgaccccgagagctggagaagcctgctgggcctgggcggcctggacgccgagtgcggcagacccctgttcgccacctacagcggcctgtggagaaagtgctacttcctgggcatcgacagagacatcgacaccctgatcctgaagggcatcgcccagagatgcaccgccatcaagtaccacttcagccagcccatcagactgagaaacatccccttcaacctgaccaagaccatccagcaggacgagtggcacctgctgcacctgagaagaatcaccgccggcttcctgggcatggccgtggccgtgctgctgtgcggctgcatcgtggccaccgtgagcttcttctgggaggagagcctgacccagcacgtggccggcctgctgttcctgatgaccggcatcttctgcaccatcagcctgtgcacctacgccgccagcatcagctacgacctgaacagactgcccaagctgatctacagcctgcccgccgacgtggagcacggctacagctggagcatcttctgcgcctggtgcagcctgggcttcatcgtggccgccggcggcctgtgcatcgcctaccccttcatcagcagaaccaagatcgcccagctgaagagcggcagagacagcaccgtgtag

SEQ ID NO: 243224 - DNA, 894 bp, Artificial Sequence
  derived and/or modified sequence
atggaacctcgcgccctggtgaccgcactgtccttaggcctgtcactgtgcagcctcgggctcctggtgaccgccatttttacagatcactggtacgaaacagaccctaggagacacaaggaatcgtgtgaacgctcgcgcgccggagcggatcctccagaccagaaaaataggttgatgcccctctcccacctgccactgcgagattctcctccactgggtaggagactgctgccaggaggaccggggcgggcagacccagagtcttggcgttcgctgttgggcttggggggcctcgacgcagagtgtggaagaccactgtttgccacttattcagggctctggcgcaaatgctatttcctgggtattgaccgggacattgacaccctgatactgaaaggaattgctcagagatgcaccgctatcaaataccacttctcccagcccatccggcttcggaacattccgttcaacctgacaaagactattcagcaggatgaatggcatttactccacttacggaggatcacggcgggtttcctgggcatggcagtggccgtgcttctatgcggctgtatcgtggccaccgtctccttcttctgggaggaatctctgacccagcatgtcgcggggctgctatttctgatgaccgggattttctgcactatttcactgtgcacatacgccgcatcaatcagctatgatctcaatagactgcctaagctgatttactccctgccagccgatgtggagcatggatactcatggagcatcttttgcgcttggtgtagtctcggattcatcgtggctgccggaggattgtgcattgcatacccttttatctctaggactaaaatcgcccagttgaaaagcggtagagactcaaccgtgtag

SEQ ID NO: 243225 - DNA, 894 bp, Artificial Sequence
  derived and/or modified sequence
atggagccccgggccctggtgacagccctgagcctgggcctgagcctgtgcagcctgggcctgctggtgacagccatcttcacagaccactggtatgaaacagaccccaggaggcacaaggagagctgtgagaggagccgggccggggctgaccccccagaccagaagaaccggctgatgcccctgagccacctgcccctgcgggacagcccccccctgggccgccgcctgctgcccggcggccctggccgggctgaccctgagagctggaggagcctgctgggcctgggcggcctggatgctgaatgtggccggcccctgtttgccacctacagcggcctgtggaggaagtgctacttcctgggcatcgaccgggacatcgacaccctcatcctgaagggcatcgcccagcgctgcacagccatcaagtaccacttcagccagcccatccggctgaggaacatccccttcaacctgaccaagaccatccagcaggatgagtggcacctgctgcacctgcggcgcatcacagctggcttcctgggcatggctgtggccgtgctgctgtgtggctgcatcgtggccaccgtgtccttcttctgggaggagagcctgacccagcacgtggccggcctgctcttcctgatgacaggcatcttctgcaccatcagcctgtgcacctatgctgccagcatctcctatgacctgaaccggctgcccaagctgatctacagcctgcctgcagatgtggagcacggctacagctggagcatcttctgtgcctggtgcagcctgggcttcatcgtggccgccggcggcctgtgcatcgcctaccccttcatcagcaggaccaagatcgcccagctgaagagcggccgggacagcacagtgtag

SEQ ID NO: 243226 - DNA, 894 bp, Artificial Sequence
  derived and/or modified sequence
atggagccccgggccctggtgaccgccctgagcctgggcctgagcctgtgttccttaggcctcttagtgacggccatcttcaccgaccactggtatgagactgatccacggagacacaaggaatcttgcgagcggagccgggccggtgcagaccccccggatcagaagaaccgcctcatgcctctgagtcacctccctttaagagattcgccacccttggggaggcgtctcttaccgggtgggcccgggagagccgacccagaatcttggcgcagtctgcttgggctgggcggtctggacgccgagtgcggtcgccccttgtttgcaacctattcaggcctgtggcgcaaatgctattttctaggaatcgatagagacattgacacgctcattctgaagggcatcgcccaacgctgtactgctatcaaataccacttctcgcaaccaataagattaagaaatatcccattcaacctgaccaaaacaatccagcaggatgagtggcatctccttcatctacggcggatcacggccggatttttaggaatggctgtagctgttctgctgtgcgggtgcatcgtcgccaccgtttcgtttttttgggaagagagccttacccaacatgtagcgggcctgctgttcctaatgaccgggattttttgcacaatcagcttatgcacgtatgccgcctctatctcctatgacctcaatcggctgcccaagctgatatattcgctgcctgcggatgttgaacacggatacagttggagtatattctgtgcatggtgctccctggggtttatagtggctgccggcggcttgtgcattgcctatccattcatcagccggacaaagatcgctcagctaaagagcgggcgcgatagcactgtatag

SEQ ID NO: 243227 - DNA, 894 bp, Artificial Sequence
  derived and/or modified sequence
atggagcccagagccttggtaacagcgctgagcttggggctctctctgtgcagccttggcctgctagtgaccgccatattcaccgatcactggtacgaaacagatcccagaaggcacaaagagagctgcgagcgaagtagagcaggcgctgatcctccagaccagaagaatcgtcttatgcctctcagtcaccttccacttagagactctcccccactcggaagacggttgctgccagggggtcccggaagggctgatccagaatcttggcgcagcctgctgggactcggcggtctggatgccgagtgcgggcgaccactctttgcgacgtattccgggctgtggcggaagtgttacttcctaggcatcgatagagacatcgataccctaatcctgaaaggaatcgctcagcgctgtacagcgattaaatatcactttagccaacctatcagacttagaaatattcccttcaacctcacaaagactatccagcaggacgagtggcacctgctgcacctgagaaggattactgcaggcttccttggcatggccgtggcagttcttctgtgtgggtgcattgtcgctacagtgtccttcttctgggaggaatccctcacccaacacgttgcaggactgctctttctaatgaccgggattttttgtactatctccttgtgtacgtatgcagcctccattagttacgatctcaatcgtctgcctaagctaatctatagcttgcctgccgacgtcgaacacggctattcatggtctatattctgcgcgtggtgctcacttggttttatcgtggctgcgggagggctctgtattgcataccctttcatctctcgcaccaaaatcgcgcagctaaagtctggccgtgatagcaccgtgtag

SEQ ID NO: 243228 - DNA, 1662 bp, Artificial Sequence
  derived and/or modified sequence
attgtgtctggcggcggcgcgcgagcccaccggcggctgcggcggggcgggaagccatggagccgcgggcgctcgtcacggcgctcagcctcggcctcagcctgtgctccctggggctgctcgtcacggccatcttcaccgaccactggtacgagaccgacccccggcgccacaaggagagctgcgagcgcagccgcgcgggcgccgaccccccggaccagaagaaccgcctgatgccgctgtcgcacctgccgctgcgggactcgcccccgctggggcgccggctgctcccgggcggcccggggcgcgccgaccccgagtcctggcgctcgctcctggggctcggcgggctggacgccgagtgcggccggcccctcttcgccacctactcgggcctctggaggaagtgctacttcctgggcatcgaccgggacatcgacaccctcatcctgaaaggtattgcgcagcgatgcacggccatcaagtaccacttttctcagcccatccgcttgcgaaacattccttttaatttaaccaagaccatacagcaagatgagtggcacctgcttcatttaagaagaatcactgctggcttcctcggcatggccgtagccgtccttctctgcggctgcattgtggccacagtcagtttcttctgggaggagagcttgacccagcacgtggctggactcctgttcctcatgacagggatattttgcaccatttccctctgtacttatgccgccagtatctcgtatgatttgaaccggctcccaaagctaatttatagcctgcctgctgatgtggaacatggttacagctggtccatcttttgcgcctggtgcagtttaggctttattgtggcagctggaggtctctgcatcgcttatccgtttattagccggaccaagattgcacagctaaagtctggcagagactccacggtatgactgtcctcactgggcctgtccacagtgcgagcgactcctgaggggaacagcgcggagttcaggagtccaagcacaaagcggtcttttacattccaacctgttgcctgccagccctttctggattactgatagaaaatcatgcaaaacctcccaacctttctaaggacaagactactgtggattcaagtgctttaatgactatttatgcgttgactgtgagaatagggagcagtgccatgggacatttctaggtgtagagaaagaagaaactgcaatggaaaaatttgtatgatttccatttatttcagaaagtttgtatgtaacaattacccgagagtcatttctacttgcaaaaggattcgtaacaaagcgagtataattttcttgtcattgtatcatgcttgttaaattttaatgcagcatcttcagaacttgtcctgatggtgtcttattgtgtcagcaccaaatatttgtgcattatttgtggacgttccttgtcacaggaagattcttcttctgttgccttattgtttttttttttttaagtctcttctctgtctttgtactggaatcgaaatcataagataaacagatcaaacgtgcttaagagctaactcgtgacactatgcagtattgtttgaagacctgttgttcaacctctgtctctttatgttaactggatttctgcattaaatgactgcccccttgttaa

SEQ ID NO: 243229 - DNA, 1467 bp, Artificial Sequence
  derived and/or modified sequence
atggagccgcgggcgctcgtcacggcgctcagcctcggcctcagcctgtgctccctggggctgctcgtcacggccatcttcaccgaccactggtacgagaccgacccccggcgccacaaggagagctgcgagcgcagccgcgcgggcgccgaccccccggaccagaagaaccgcctgatgccgctgtcgcacctactcgggcctctggaggaagtgctacttcctgggcatcgaccgggacatcgacaccctcatcctgaaaggtattgcgcagcgatgcacggccatcaagtaccacttttctcagcccatccgcttgcgaaacattccttttaatttaaccaagaccatacagcaagatgagtggcacctgcttcatttaagaagaatcactgctggcttcctcggcatggccgtagccgtccttctctgcggctgcattgtggccacagtcagtttcttctgggaggagagcttgacccagcacgtggctggactcctgttcctcatgacagggatattttgcaccatttccctctgtacttatgccgccagtatctcgtatgatttgaaccggctcccaaagctaatttatagcctgcctgctgatgtggaacatggttacagctggtccatcttttgcgcctggtgcagtttaggctttattgtggcagctggaggtctctgcatcgcttatccgtttattagccggaccaagattgcacagctaaagtctggcagagactccacggtatgactgtcctcactgggcctgtccacagtgcgagcgactcctgaggggaacagcgcggagttcaggagtccaagcacaaagcggtcttttacattccaacctgttgcctgccagccctttctggattactgatagaaaatcatgcaaaacctcccaacctttctaaggacaagactactgtggattcaagtgctttaatgactatttatgcgttgactgtgagaatagggagcagtgccatgggacatttctaggtgtagagaaagaagaaactgcaatggaaaaatttgtatgatttccatttatttcagaaagtttgtatgtaacaattacccgagagtcatttctacttgcaaaaggattcgtaacaaagcgagtataattttcttgtcattgtatcatgcttgttaaattttaatgcagcatcttcagaacttgtcctgatggtgtcttattgtgtcagcaccaaatatttgtgcattatttgtggacgttccttgtcacaggaagattcttcttctgttgccttattgtttttttttttttaagtctcttctctgtctttgtactggaatcgaaatcataagataaacagatcaaacgtgcttaagagctaactcgtgacactatgcagtattgtttgaagacctgttgttcaacctctgtctctttatgttaactggatttctgcattaaatgactgcccccttgtt

SEQ ID NO: 243230 - protein, 202 aa, Artificial Sequence
  derived and/or modified sequence
MEAALLGLCNWSTLGVCAALKLPQISAVLAARSARGLSLPSLLLELAGFLVFLRYQCYYGYPPLTYLEYPILIAQDVILLLCIFHFNGNVKQATPYIAVLVSSWFILALQKWIIDLAMNLCTFISAASKFAQLQCLWKTRDSGTVSALTWSLSSYTCATRIITTLMTTNDFTILLRFVIMLALNIWVTVTVLRYRKTAIKAE

SEQ ID NO: 243231 - DNA, 609 bp, Artificial Sequence
  derived and/or modified sequence
atggaggccgccctgctgggcctgtgcaactggagcaccctgggcgtgtgcgccgccctgaagctgccccagatcagcgccgtgctggccgccagaagcgccagaggcctgagcctgcccagcctgctgctggagctggccggcttcctggtgttcctgagataccagtgctactacggctacccccccctgacctacctggagtaccccatcctgatcgcccaggacgtgatcctgctgctgtgcatcttccacttcaacggcaacgtgaagcaggccaccccctacatcgccgtgctggtgagcagctggttcatcctggccctgcagaagtggatcatcgacctggccatgaacctgtgcaccttcatcagcgccgccagcaagttcgcccagctgcagtgcctgtggaagaccagagacagcggcaccgtgagcgccctgacctggagcctgagcagctacacctgcgccaccagaatcatcaccaccctgatgaccaccaacgacttcaccatcctgctgagattcgtgatcatgctggccctgaacatctgggtgaccgtgaccgtgctgagatacagaaagaccgccatcaaggccgagtag

SEQ ID NO: 243232 - DNA, 609 bp, Artificial Sequence
  derived and/or modified sequence
atggaagctgccctgctggggctgtgtaactggtccacccttggcgtatgcgctgcactgaagctcccgcagatcagcgccgtcctggctgccaggtctgccagggggcttagcctaccctcattgctcctggagctcgctggatttttagtgttcttgcggtaccaatgctactatggttaccccccactgacttacctcgagtacccaatcctgatcgcccaggacgttatcctgttgttatgtatctttcatttcaatggcaacgtcaagcaggccacaccgtatatcgcagtgctggtgtcgtcttggtttatcctcgccctgcagaagtggataatcgatctggccatgaatctctgcacctttatatccgcggcctcgaagttcgcgcaactgcagtgcctgtggaagactcgtgactccggaacagtgtccgcccttacctggtccctgtcatcctatacatgtgccactcgcattatcactaccctcatgacaacaaatgatttcaccatcctgctccgatttgttatcatgctagcgctaaatatctgggtgacggtcacggtgcttcgctacagaaagaccgccattaaggctgagtag

SEQ ID NO: 243233 - DNA, 609 bp, Artificial Sequence
  derived and/or modified sequence
atggaggccgccctgctgggcctgtgcaactggagcaccctgggcgtgtgtgccgccctgaagctgccccagatctctgctgtgctggccgcccggagcgcccggggcctgagcctgcccagcctgctgctggagctggccggcttcctggtgttcctgcgctaccagtgctactacggctacccacccctgacctacctggagtaccccatcctgattgcccaggacgtcatcctgctgctgtgcatcttccacttcaatggaaatgtgaagcaggccaccccctacatcgctgtgctggtgtcctcctggttcatcctggccctgcagaagtggatcatcgacctggccatgaacctgtgcaccttcatctctgctgccagcaagtttgcccagctgcagtgcctgtggaagacccgggacagcggcaccgtgtctgccctgacctggagcctgagcagctacacctgtgccacccgcatcatcaccaccctgatgaccaccaatgacttcaccatcctgctgcgctttgtgatcatgctggccctgaacatctgggtgacagtgacagtgctgcgctacaggaagacagccatcaaggccgagtag

SEQ ID NO: 243234 - DNA, 609 bp, Artificial Sequence
  derived and/or modified sequence
atggaggccgccctgctgggcctgtgcaactggagcaccctgggcgtttgtgcggctctcaaactgccacaaatatccgccgtcctcgctgctaggtccgccaggggcttgtccctgccctctctgctgttagaattggctggttttcttgtgtttttgcgataccagtgttactacggctacccaccattgacatacctcgagtatcccatactaatcgctcaggacgtgatacttctattatgcatcttccatttcaacggtaatgtgaaacaggccactccgtatatagccgtgctggtcagttcctggtttatcctagcattacagaaatggatcattgacctggccatgaacctgtgtaccttcatttcggccgctagcaagttcgcacagcttcagtgcctgtggaaaaccagggactctggtaccgtgtcggcgctcacctggtctctgtcctcctatacctgtgctaccagaattatcactacgttaatgacaaccaatgactttactattctgctcaggttcgtgatcatgttggcccttaacatctgggtgacagtcactgttctgcggtatcgcaagaccgcaattaaagccgaatag

SEQ ID NO: 243235 - DNA, 1830 bp, Artificial Sequence
  derived and/or modified sequence
aggggaggggcggagcgaggcgggtccggggcctggcggcgcgcggaggggcgggccctggccgggtggtcccgggcggatcccgggaaggcggaaggcttcggcagagctgcgccgccgaggctgagcggtcccttctcgctgcggccgcccaggtgcccgcgcccgtggcgctatggaggcggcgctgctggggctgtgtaactggagcacgctgggcgtgtgcgccgcgctgaagctgccgcagatctccgctgtgctagcggcgcgcagcgcgcggggcctcagccttccgagtttacttctggagctggcaggattcctggtgtttctgcggtaccagtgttactatgggtatccgccgctgacctacctggagtaccccatcctcatcgcgcaagatgtcatcctcctgctctgtatctttcattttaacgggaacgtgaagcaggccactccttacatcgctgtattggtgtcttcttggttcatccttgccctgcagaagtggatcatagacctggccatgaatctatgtactttcatcagcgcggccagtaagtttgcacagctccagtgtctgtggaagacgagagactcaggaactgtgagtgcgctgacttggagcctctcttcctatacctgtgcaacaagaataatcacaaccttaatgaccaccaatgattttacaattcttctacgttttgtgatcatgctggctttaaatatatgggtaacagtgacagtacttcgctaccggaagaccgctataaaggctgaatgatggatacattattccttcacacagtggattttgagtaactgaaccaaaggaaaaagaagctctttgctaaattaaggtcttttataaatttagtaaatcagtttataatctttaaagccaaaggtttttttagacttgaaagaaagagccacttaaattcttgtttaaaaataccaatttgcctcctccttcctcacttcgttaggttatggtagtgctcagacatctgcagtgttgaggccagtcactgttggaagtcatccaagaagcccattttgaggccattttgagccttactcttaagttctctatgaagaactacattgatttgttggctttcagaatcttttaggaaataaatcctctccaggacaaaaatgaacatgaatggagtggcattttgttccaagtcagaggtgggcacctataataaatgactagggttcactttctgggactgatgtttaattgtaacacagatacaacagggtggccttgttgtgtataatacggtattatacccgcatgtgctctagcaaggataccaaggcaagcatacatgtagctggcttgagtttgtaccaaaacagtccttcaactttgcactgtgccttaagtaattactaacaaaaggtactaggattagctgcaatctctactttcgatgaggaaatcccagtaagctttctgattcaagtacaatgctgccattttttaaagggccacaactatagaattaccactgttggaatttggtacaaaatatgttttgtctattgaaaacatacacggtaaatggtgttgttaggtaggttctgtccagttcttagggacttttttcacattatagcatttttaccctaaacatgatgttgagattattatatactgtattttcttctaaattaaccctaatgtttaaaaactcactttccccctttaattgaaggcattgttttgttagatgcagtaatgatgtttaccagagattattgtttcctatgcaaaataaattttcatattttgaattctgctgagtcttaaaa

SEQ ID NO: 243236 - DNA, 609 bp, Artificial Sequence
  derived and/or modified sequence
atggaagctgcactgctcgggctctgtaattggtccactctgggagtttgcgctgcgctcaagctgcctcagatcagcgctgttttggcagctaggagcgccaggggactgagtctcccaagcctgctcctggaactcgccggtttcctggtgttcctgcggtatcagtgttactacgggtacccgccactcacgtatctagagtaccccatcctgatcgcacaggacgtgatcctcctcctgtgtatctttcatttcaacggaaatgtcaagcaggctactccctatatcgccgtgttggtttctagctggttcatcttggccctgcaaaaatggattatagatctggctatgaatctctgtactttcatctctgctgcaagtaagtttgcacagttgcagtgtttgtggaagaccagagactctggtacagtgtccgctcttacctggtctctgagcagctatacctgtgcaacccgcatcatcacaaccctcatgaccactaacgactttacaattctgcttagatttgttatcatgctagctctgaacatctgggttaccgtgaccgtccttcgataccggaagaccgccatcaaagccgaatag

SEQ ID NO: 243237 - DNA, 414 bp, Artificial Sequence
  derived and/or modified sequence
atgatcctgcccaccaaggccatggccacccaggagctgaccgtgaagagaaagctgagcggcaacaccctgcaggtgcaggccagcagccccgtggccctgggcgtgagaatccccaccgtggccctgcacatgatggagctgttcgacaccaccgtggagcagctgtacagcatcttcaccgtgaaggagctgaccaacaagaagatcatcatgaagtggagatgcggcaactggcccgaggagcactacgccatggtggccctgaacttcgtgcccaccctgggccagaccgagctgcagctgaaggagttcctgagcatctgcaaggaggagaacatgaagttctgctggcagaagcagcacttcgaggagatcaagggcagcctgcagctgacccccctgaacggctag

SEQ ID NO: 243238 - DNA, 414 bp, Artificial Sequence
  derived and/or modified sequence
atgatattgccaacaaaagcgatggcaacccaggagctgacagtgaagaggaaactctccgggaacactctgcaggtgcaggcatcttcaccagtggccctgggcgtgcgcatacctaccgttgcccttcacatgatggagttgttcgacactaccgttgaacagctgtactcaatcttcaccgtcaaagaactgaccaacaagaagatcattatgaaatggcggtgcgggaactggccggaggaacactacgccatggtggcactaaactttgtgcccactctgggacaaacagagctgcagctgaaggaatttctgtccatttgtaaggaagaaaatatgaaattctgctggcaaaaacagcacttcgaggaaatcaaaggctcactgcaattgacccctttgaatggttag

SEQ ID NO: 243239 - DNA, 414 bp, Artificial Sequence
  derived and/or modified sequence
atgattttgcctactaaggccatggcaactcaagaactgactgttaaaaggaagttgtcaggaaatacactgcaggtgcaggcatcatctcccgttgccctaggtgtaagaatcccaaccgtagccttacacatgatggaacttttcgataccactgtggagcaactctattctattttcaccgtcaaggaactcaccaataaaaaaatcattatgaagtggcgttgtggcaattggccagaagaacactatgcgatggtcgctctgaatttcgtacctaccctgggccagactgaacttcagctgaaggaatttctctccatctgcaaggaagagaatatgaaattctgctggcagaagcagcatttcgaagagattaagggcagcctccaactcacaccgctcaatggctag

SEQ ID NO: 243240 - DNA, 414 bp, Artificial Sequence
  derived and/or modified sequence
atgatcctgcccaccaaggccatggccacccaggagctgactgtgaagaggaagctgagcggcaacaccctgcaggtgcaggccagcagccctgtggccctgggcgtgcgcatccccaccgtggccctgcacatgatggagctgtttgacaccaccgtggagcagctgtacagcatcttcaccgtgaaggagctgaccaacaagaagatcatcatgaagtggaggtgtggcaactggccagaggagcactacgccatggtggccctgaactttgtgcccaccctgggccagacagagctgcagctgaaggagttcctgagcatctgcaaggaggagaacatgaagttctgctggcagaagcagcactttgaggagatcaagggcagcctgcagctgacccccctgaatggatag

SEQ ID NO: 243241 - DNA, 414 bp, Artificial Sequence
  derived and/or modified sequence
atgatcctgcccaccaaggccatggccacccaggagctgaccgtgaagcgcaaactcagtggcaatactctgcaggtccaggcatcaagccctgtagccttaggagtcagaatccctaccgtcgctctccacatgatggagctgtttgataccacggtcgagcagctttactcaattttcaccgtgaaagagctgacaaataaaaagatcatcatgaaatggcgttgcggaaactggccggaagaacattacgctatggtggccctcaatttcgtacctacactcggccagaccgaactgcaactcaaggagttcctgtccatctgtaaagaggagaacatgaaattctgctggcagaagcagcactttgaagagatcaaggggagcctgcagttaacaccattgaatggttag

SEQ ID NO: 243242 - DNA, 414 bp, Artificial Sequence
  derived and/or modified sequence
atgatcctgcccaccaaggccatggccacccaggagctgaccgtgaaacgcaaactgtccggtaacacgctgcaggtccaggcttccagtcccgttgctctgggagtcaggatacctaccgttgctttgcatatgatggaactgtttgatactaccgtcgagcagttatacagcatttttaccgtgaaggagctgacaaacaagaaaatcattatgaaatggcgctgtggtaattggccagaggagcattatgcaatggtcgccctgaactttgtgcctacccttggtcaaacagaactgcagctcaaggagttcctctctatctgcaaagaagagaatatgaagttttgttggcagaaacagcactttgaagagattaaggggtctctacagctcactccccttaacggatag

SEQ ID NO: 243243 - DNA, 414 bp, Artificial Sequence
  derived and/or modified sequence
atgatcttaccaaccaaagccatggctacgcaggaactgacagtgaaacggaagctgtccggtaacaccctccaggtgcaggcaagctctcctgtggccctgggtgtgcggatcccaacagtggccttacatatgatggagctgtttgacactacagtggaacaactttactcgatctttaccgtaaaggaactaacgaacaaaaagatcatcatgaagtggaggtgcggaaactggccagaagagcactacgccatggtggctctgaattttgttcccactctggggcaaacagaattacagctcaaggaattcctctctatttgtaaggaggaaaacatgaaattctgctggcagaaacagcattttgaagagataaaaggttctctgcaactcactcccctgaatggctag

SEQ ID NO: 243244 - DNA, 414 bp, Artificial Sequence
  derived and/or modified sequence
atgatcctgcctaccaaggcaatggctacacaggagctcacagttaagagaaagttatcgggtaacacactccaggtgcaggcgtctagtcctgtcgcgctgggcgttcgtatccccacagtcgcactgcacatgatggaactgttcgacactaccgtggagcagctttacagcatattcacggtcaaggagctcacaaacaaaaagatcattatgaagtggagatgtggaaactggccggaggagcactacgccatggttgccctgaacttcgtgcctactcttggccagacagagttgcagctgaaagagttcttgagcatttgtaaggaggagaatatgaaattctgttggcagaagcagcacttcgaagaaatcaaaggttcgttacagttaactccacttaatggctag

SEQ ID NO: 243245 - protein, 621 aa, Artificial Sequence
  derived and/or modified sequence
MALGLEQAEEQRLYQQTLLQDGLKDMLDHGKFLDCVVRAGEREFPCHRLVLAACSPYFRARFLAEPERAGELHLEEVSPDVVAQVLHYLYTSEIALDEASVQDLFAAAHRFQIPSIFTICVSFLQKRLCLSNCLAVFRLGLLLDCARLAVAARDFICAHFTLVARDADFLGLSADELIAIISSDGLNVEKEEAVFEAVMRWAGSGDAEAQAERQRALPTVFESVRCRLLPRAFLESRVERHPLVRAQPELLRKVQMVKDAHEGRITTLRKKKKGKDGAGAKEADKGTSKAKAEEDEEAERILPGILNDTLRFGMFLQDLIFMISEEGAVAYDPAANECYCASLSNQVPKNHVSLVTKENQVFVAGGLFYNEDNKEDPMSAYFLQFDHLDSEWLGMPPLPSPRCLFGLGEALNSIYVVGGREIKDGERCLDSVMCYDRLSFKWGESDPLPYVVYGHTVLSHMDLVYVIGGKGSDRKCLNKMCVYDPKKFEWKELAPMQTARSLFGATVHDGRIIVAAGVTDTGLTSSAEVYSITDNKWAPFEAFPQERSSLSLVSLVGTLYAIGGFATLETESGELVPTELNDIWRYNEEEKKWEGVLREIAYAAGATFLPVRLNVLCLTKM

SEQ ID NO: 243246 - protein, 366 aa, Artificial Sequence
  derived and/or modified sequence
MVKDAHEGRITTLRKKKKGKDGAGAKEADKGTSKAKAEEDEEAERILPGILNDTLRFGMFLQDLIFMISEEGAVAYDPAANECYCASLSNQVPKNHVSLVTKENQVFVAGGLFYNEDNKEDPMSAYFLQFDHLDSEWLGMPPLPSPRCLFGLGEALNSIYVVGGREIKDGERCLDSVMCYDRLSFKWGESDPLPYVVYGHTVLSHMDLVYVIGGKGSDRKCLNKMCVYDPKKFEWKELAPMQTARSLFGATVHDGRIIVAAGVTDTGLTSSAEVYSITDNKWAPFEAFPQERSSLSLVSLVGTLYAIGGFATLETESGELVPTELNDIWRYNEEEKKWEGVLREIAYAAGATFLPVRLNVLCLTKM

SEQ ID NO: 243247 - DNA, 2423 bp, Artificial Sequence
  derived and/or modified sequence
cctcgaagacagctgctcagtctaagcaaaccccagcaggaaagcaggggtacagagaggagcccccttggcaccgccaccgcaccctaggccacccaccatggcgctgggcttggagcaggcggaggagcagcggttgtaccagcagacgctcctgcaagacgggctcaaagacatgctggaccatggcaagttcctcgactgtgtggtgcgggcgggcgagcgcgagttcccgtgccatcgcctggtgctggccgcctgcagcccctacttccgggcgcgctttctagccgagccggagcgcgcgggcgagctgcacctggaggaggtgtccccggacgtggtggcccaggtgctgcactacctgtacacatcagagatcgcgctggatgaggcgagcgtgcaggatttgttcgccgcggcacaccgcttccagatcccttccatcttcaccatctgcgtgtccttcctgcagaagcgcctgtgcctctccaactgcttggccgtcttccgtctcggcctcctgctcgactgcgcgcgtctcgccgtggctgcccgcgacttcatctgcgctcacttcacgctggtggcgcgcgacgctgacttcctcggactctcggccgacgagctcatcgccatcatctccagcgacggccttaacgtggagaaggaggaggcagtgttcgaggcggtgatgcggtgggcgggtagcggcgacgccgaggcgcaggctgagcgccagcgcgcgctgcccaccgtcttcgagagcgtgcgctgccgcttgctgccgcgcgcctttctggaaagccgcgtggagcgccaccctctcgtgcgtgcccagcccgagttgctgcgcaaggtgcagatggtgaaggatgcacacgagggccgcatcaccacgctgcggaagaaaaagaaggggaaggatggagccggggccaaggaggctgataagggcacaagcaaagccaaagcagaggaggatgaggaggccgaacgtatccttcctgggatcctcaatgacaccctgcgcttcggcatgttcctgcaggatctcatcttcatgatcagtgaggagggcgctgtggcctacgatccagcagccaacgagtgctactgtgcttccctctccaaccaggtccccaagaaccacgtcagcctggttaccaaggagaaccaggtcttcgtggctggaggcctcttctacaacgaagacaacaaagaggaccccatgagcgcatacttcctgcagtttgaccatctggactcagagtggctggggatgccaccgctgccctcgccccgctgcctctttggcctgggagaagctctcaactccatctacgtggtcggtggcagagagatcaaggacggcgagcgctgcctggactcggtcatgtgctacgacaggctgtcattcaaatggggtgaatcggacccgctgccttacgtggtgtatggccacacagtgctctcccacatggaccttgtctacgtaattggcggcaaaggcagtgacaggaagtgcctgaacaagatgtgcgtctatgaccccaagaagtttgagtggaaggagctggcacccatgcagaccgcccgctcactctttggggccactgtccatgatggccgcattatcgtggcagctggggtcaccgacacagggctgaccagttctgccgaagtgtacagcatcacagacaacaagtgggcacccttcgaggccttcccacaggagcgtagctcactcagcctggtcagcctggtgggtaccctctatgccattggtggctttgccacactggagacggagtctggagagctggttcccacagagctcaatgacatctggaggtataacgaggaggagaagaaatgggagggtgtcctgcgggagatcgcctatgcagcaggtgccaccttcctaccagtgcggctcaatgtgctgtgcctgactaagatgtgaccagctcaggcagactgaactaagcacccctcccatcctgcgaccctcactggcctggccttgtgggggctccagaaaagaggctaggagaggccagagtctacctggatccagttatggtgcctcaggggctgcgtcagccaaggaaagggaagtgctgcttagtcctggacttttgggcaagggtgagaaactagaggcttctccagtgttgccatatccccctaggttgtcttgatccatgaaccagaaccacagggcggtatcccaggccgtgtgctggccctgccccagcctagctgagtgtgctggcaaagttccccacaggactcagccttctcgtctgtccgatgggagcatccccatcaagtgcagtgtacagtgcagatatgtctccttctttaggaagaataaagtgccttctgagcaagcagctcagggtctgcatcagtgaaaa

SEQ ID NO: 243248 - DNA, 1866 bp, Artificial Sequence
  derived and/or modified sequence
atggccctgggcctggagcaggccgaggagcagagactgtaccagcagaccctgctgcaggacggcctgaaggacatgctggaccacggcaagttcctggactgcgtggtgagagccggcgagagagagttcccctgccacagactggtgctggccgcctgcagcccctacttcagagccagattcctggccgagcccgagagagccggcgagctgcacctggaggaggtgagccccgacgtggtggcccaggtgctgcactacctgtacaccagcgagatcgccctggacgaggccagcgtgcaggacctgttcgccgccgcccacagattccagatccccagcatcttcaccatctgcgtgagcttcctgcagaagagactgtgcctgagcaactgcctggccgtgttcagactgggcctgctgctggactgcgccagactggccgtggccgccagagacttcatctgcgcccacttcaccctggtggccagagacgccgacttcctgggcctgagcgccgacgagctgatcgccatcatcagcagcgacggcctgaacgtggagaaggaggaggccgtgttcgaggccgtgatgagatgggccggcagcggcgacgccgaggcccaggccgagagacagagagccctgcccaccgtgttcgagagcgtgagatgcagactgctgcccagagccttcctggagagcagagtggagagacaccccctggtgagagcccagcccgagctgctgagaaaggtgcagatggtgaaggacgcccacgagggcagaatcaccaccctgagaaagaagaagaagggcaaggacggcgccggcgccaaggaggccgacaagggcaccagcaaggccaaggccgaggaggacgaggaggccgagagaatcctgcccggcatcctgaacgacaccctgagattcggcatgttcctgcaggacctgatcttcatgatcagcgaggagggcgccgtggcctacgaccccgccgccaacgagtgctactgcgccagcctgagcaaccaggtgcccaagaaccacgtgagcctggtgaccaaggagaaccaggtgttcgtggccggcggcctgttctacaacgaggacaacaaggaggaccccatgagcgcctacttcctgcagttcgaccacctggacagcgagtggctgggcatgccccccctgcccagccccagatgcctgttcggcctgggcgaggccctgaacagcatctacgtggtgggcggcagagagatcaaggacggcgagagatgcctggacagcgtgatgtgctacgacagactgagcttcaagtggggcgagagcgaccccctgccctacgtggtgtacggccacaccgtgctgagccacatggacctggtgtacgtgatcggcggcaagggcagcgacagaaagtgcctgaacaagatgtgcgtgtacgaccccaagaagttcgagtggaaggagctggcccccatgcagaccgccagaagcctgttcggcgccaccgtgcacgacggcagaatcatcgtggccgccggcgtgaccgacaccggcctgaccagcagcgccgaggtgtacagcatcaccgacaacaagtgggcccccttcgaggccttcccccaggagagaagcagcctgagcctggtgagcctggtgggcaccctgtacgccatcggcggcttcgccaccctggagaccgagagcggcgagctggtgcccaccgagctgaacgacatctggagatacaacgaggaggagaagaagtgggagggcgtgctgagagagatcgcctacgccgccggcgccaccttcctgcccgtgagactgaacgtgctgtgcctgaccaagatgtag

SEQ ID NO: 243249 - DNA, 1101 bp, Artificial Sequence
  derived and/or modified sequence
atggtgaaggacgcccacgagggcagaatcaccaccctgagaaagaagaagaagggcaaggacggcgccggcgccaaggaggccgacaagggcaccagcaaggccaaggccgaggaggacgaggaggccgagagaatcctgcccggcatcctgaacgacaccctgagattcggcatgttcctgcaggacctgatcttcatgatcagcgaggagggcgccgtggcctacgaccccgccgccaacgagtgctactgcgccagcctgagcaaccaggtgcccaagaaccacgtgagcctggtgaccaaggagaaccaggtgttcgtggccggcggcctgttctacaacgaggacaacaaggaggaccccatgagcgcctacttcctgcagttcgaccacctggacagcgagtggctgggcatgccccccctgcccagccccagatgcctgttcggcctgggcgaggccctgaacagcatctacgtggtgggcggcagagagatcaaggacggcgagagatgcctggacagcgtgatgtgctacgacagactgagcttcaagtggggcgagagcgaccccctgccctacgtggtgtacggccacaccgtgctgagccacatggacctggtgtacgtgatcggcggcaagggcagcgacagaaagtgcctgaacaagatgtgcgtgtacgaccccaagaagttcgagtggaaggagctggcccccatgcagaccgccagaagcctgttcggcgccaccgtgcacgacggcagaatcatcgtggccgccggcgtgaccgacaccggcctgaccagcagcgccgaggtgtacagcatcaccgacaacaagtgggcccccttcgaggccttcccccaggagagaagcagcctgagcctggtgagcctggtgggcaccctgtacgccatcggcggcttcgccaccctggagaccgagagcggcgagctggtgcccaccgagctgaacgacatctggagatacaacgaggaggagaagaagtgggagggcgtgctgagagagatcgcctacgccgccggcgccaccttcctgcccgtgagactgaacgtgctgtgcctgaccaagatgtag

SEQ ID NO: 243250 - DNA, 1866 bp, Artificial Sequence
  derived and/or modified sequence
atggctctggggttggagcaagcagaggaacagcgactctaccagcagactctccttcaagatgggcttaaagacatgcttgaccacggcaaatttcttgactgcgtggtacgcgccggagagcgcgagtttccctgccatcggttagttttggcagcctgcagtccctattttagggccaggttcctggcagagccggaacgagctggagaactacatttagaagaggtatcaccagacgtggtagcccaggtgctgcactacttgtacacaagcgagattgctcttgacgaggcttccgttcaggatcttttcgccgccgctcaccgtttccagattccttccatttttacaatttgcgtgtcatttctacagaagagactgtgcctcagcaattgtctggccgtctttcgcctgggactgctgctggattgcgccaggttggccgttgccgcacgggactttatttgcgcacacttcaccctggtggcacgagacgcagatttcctcggactaagcgcggatgagcttatcgccatcatcagttccgacggacttaatgtggaaaaagaggaggcggtcttcgaggcagttatgaggtgggcaggttcgggtgacgcggaagctcaagcagagaggcaaagggccctgccaactgtatttgagtcggtgaggtgtcgcctgctgccaagggcctttctcgaatctcgtgtggagcgccatccactcgtgagggcacagcctgaactgctccgtaaggtacagatggtcaaggatgcccatgaggggcgcattactactctgcggaagaaaaaaaagggcaaggacggcgccggcgccaaggaggctgacaagggcactagtaaggcaaaggccgaagaagatgaggaagccgagcgcatcctccccgggatccttaacgatactctccgctttggaatgtttctgcaagatctaatctttatgatttccgaagagggcgccgtagcgtatgatcctgctgctaatgagtgctactgcgccagcctgagtaaccaggtgccaaaaaatcatgtgagtttagtaacaaaggaaaaccaggtgttcgtggcaggaggcctgttctataatgaagataataaggaagacccaatgagcgcctattttctacagttcgaccatctcgacagtgagtggttaggtatgcctcctctcccatccccccgctgcctgttcggcctcggtgaggccttgaattcaatctatgtggtcgggggtcgggagataaaggacggcgagagatgtctagattcagtcatgtgttatgaccgactctccttcaagtggggtgaaagcgatcccctcccctatgtcgtgtacgggcacactgtgctgtcacacatggatctggtatacgtaatcgggggaaagggctccgacagaaagtgcctgaataaaatgtgtgtgtacgatccaaaaaagttcgaatggaaagagctcgcccctatgcagaccgctcgctccttgttcggagcgaccgtccatgatggccggatcattgtcgctgcaggcgtcacagatacaggtctgacctctagcgcagaagtttacagcattaccgataacaagtgggcaccctttgaggcctttccacaggagagatcttcgctgagcctggtgtccctggtgggaacgctgtatgccatcgggggattcgcaacgctcgagacggagagtggggagctggtgcctacagaactgaatgatatatggagatacaatgaagaagaaaagaaatgggaaggtgttctccgggagatcgcttatgctgcaggggccaccttccttccagtccgcctgaacgtgctttgcctgactaagatgtag

SEQ ID NO: 243251 - DNA, 1101 bp, Artificial Sequence
  derived and/or modified sequence
atggtgaaggacgcgcacgagggtcgtatcaccactctgcggaagaagaagaagggtaaagatggtgccggggccaaggaggccgataagggtacctcaaaagccaaagcagaggaagatgaggaggcagaacgcatcctccccggcatcctcaacgatactcttagattcggtatgtttttacaggacctgattttcatgatttctgaggaaggagcagtggcatatgatcccgcggctaatgaatgctactgcgcgagcctaagtaatcaggttcccaaaaatcacgtgtcactggtcacaaaggagaatcaggtcttcgtggccgggggactgttttataacgaagacaacaaagaagacccgatgtctgcctacttcttgcagtttgatcatctggattcggagtggctggggatgcctccactgccctccccacgatgtctattcggtctgggcgaggccctcaattccatttacgtggtgggaggccgggagattaaagacggcgagcggtgtttggatagcgtgatgtgttacgatcggctgtcattcaaatggggagagtctgatccactgccatacgtggtctacggtcacactgtgctgtcccacatggaccttgtatacgtcattggcgggaagggatccgaccggaaatgcttaaataaaatgtgcgtatacgaccccaaaaaatttgagtggaaagagcttgcacccatgcaaacagcacggagtctcttcggagctaccgtacatgatggccgcatcatagttgctgctggggtgaccgacaccgggctgacttccagcgccgaggtatattctataacggacaataagtgggcaccttttgaggccttcccccaagaaaggtccagcctctcactggtgtccctcgtggggaccttgtatgcaatcggcggtttcgctacactggagacagagtcgggtgaactggtgccaaccgaactgaacgacatttggaggtataacgaggaagaaaagaaatgggagggcgttttacgtgaaattgcttacgctgctggcgccacttttcttcccgtgcgcctgaacgtcctctgtctaactaagatgtag

SEQ ID NO: 243252 - DNA, 1866 bp, Artificial Sequence
  derived and/or modified sequence
atggccctgggcctggagcaggccgaggagcagaggctgtaccagcagaccctgctgcaggacggcctgaaggacatgctggaccacggcaagttcctggactgtgtggtgcgggccggggagcgggagttcccctgccaccggctggtgctggccgcctgcagcccctacttccgggcccgcttcctggccgagcctgagagagctggggagctgcacctggaggaggtgtccccagatgtggtggcccaggtgctgcactacctgtacaccagcgagatcgccctggatgaggcctctgtgcaggacctgtttgctgctgcccaccgcttccagatccccagcatcttcaccatctgtgtgtccttcctgcagaagaggctgtgcctgagcaactgcctggccgtgttccggctgggcctgctgctggactgtgcccggctggccgtggccgcccgggacttcatctgtgcccacttcaccctggtggccagagatgctgacttcctgggcctgtctgcagatgagctgattgccatcatcagcagtgatggcctgaatgtggagaaggaggaggccgtgtttgaagctgtgatgcgctgggccggcagcggagatgctgaggcccaggccgagcggcagagggccctgcccaccgtgtttgaatctgtgcgctgccgcctgctgccccgggccttcctggagagccgggtggagcggcaccccctggtgcgggcccagcctgagctgctgaggaaggtgcagatggtgaaggatgcccacgagggccgcatcaccaccctgaggaagaagaagaagggcaaggatggagctggggccaaggaggccgacaagggcaccagcaaggccaaggccgaggaggatgaggaggccgagcgcatcctgcccggcatcctgaatgacaccctgcgcttcggcatgttcctgcaggacctgatcttcatgatcagcgaggagggcgctgtggcctatgaccctgctgccaatgaatgctactgtgccagcctgagcaaccaggtgcccaagaaccacgtgtccctggtgaccaaggagaaccaggtgtttgtggccggcggcctcttctacaatgaagacaacaaggaggaccccatgtctgcctacttcctgcagtttgaccacctggacagcgagtggctgggcatgccacccctgcccagcccccgctgcctgtttggcctgggggaggccctgaacagcatctacgtggtgggcggccgggagatcaaggatggagagcgctgcctggacagcgtgatgtgctatgaccggctgtccttcaagtggggcgagagtgaccccctgccctacgtggtgtatggccacacagtgctgagccacatggacctggtgtatgtgattggaggcaagggcagtgacaggaagtgcctgaacaagatgtgtgtgtatgaccccaagaagtttgagtggaaggagctggcccccatgcagacagcccggagcctgtttggagccaccgtgcatgatggccgcatcatcgtggccgccggcgtgacagacaccggcctgaccagcagcgctgaggtgtacagcatcacagacaacaagtgggccccctttgaggccttcccccaggagaggagcagcctgagcctggtgtccctggtgggcaccctgtatgccatcggcggctttgccaccctggagacagagagcggggagctggtgcccacagagctgaatgacatctggagatacaatgaggaggagaagaagtgggagggcgtgctgcgggagatcgcctatgctgctggggccaccttcctgcctgtgcggctgaatgtgctgtgcctgaccaagatgtag

SEQ ID NO: 243253 - DNA, 1101 bp, Artificial Sequence
  derived and/or modified sequence
atggtgaaggatgcccacgagggccgcatcaccaccctgaggaagaagaagaagggcaaggatggagctggggccaaggaggccgacaagggcaccagcaaggccaaggccgaggaggatgaggaggccgagcgcatcctgcccggcatcctgaatgacaccctgcgcttcggcatgttcctgcaggacctgatcttcatgatcagcgaggagggcgctgtggcctatgaccctgctgccaatgaatgctactgtgccagcctgagcaaccaggtgcccaagaaccacgtgtccctggtgaccaaggagaaccaggtgtttgtggccggcggcctcttctacaatgaagacaacaaggaggaccccatgtctgcctacttcctgcagtttgaccacctggacagcgagtggctgggcatgccacccctgcccagcccccgctgcctgtttggcctgggggaggccctgaacagcatctacgtggtgggcggccgggagatcaaggatggagagcgctgcctggacagcgtgatgtgctatgaccggctgtccttcaagtggggcgagagtgaccccctgccctacgtggtgtatggccacacagtgctgagccacatggacctggtgtatgtgattggaggaaaaggaagtgacaggaagtgcctgaacaagatgtgtgtgtatgaccccaagaagtttgagtggaaggagctggcccccatgcagacagcccggagcctgtttggagccaccgtgcatgatggccgcatcatcgtggccgccggcgtgacagacaccggcctgaccagcagcgctgaggtgtacagcatcacagacaacaagtgggccccctttgaggccttcccccaggagaggagcagcctgagcctggtgtccctggtgggcaccctgtatgccatcggcggctttgccaccctggagacagaaagtggagagctggtgcccacagagctgaatgacatctggagatacaatgaggaggagaagaagtgggagggcgtgctgcgggagatcgcctatgctgctggggccaccttcctgcctgtgcggctgaatgtgctgtgcctgaccaagatgtag

SEQ ID NO: 243254 - DNA, 2517 bp, Artificial Sequence
  derived and/or modified sequence
cctcgaagacagctgctcagtctaagcaaaccccagcaggaaagcaggggtacagagaggagcccccttggcaccgccaccgcaccctaggccacccaccatggcgctgggcttggagcaggcggaggagcagcggttgtaccagcagacgctcctgcaagacgggctcaaagacatgctggaccatggcaagttcctcgactgtgtggtgcgggcgggcgagcgcgagttcccgtgccatcgcctggtgctggccgcctgcagcccctacttccgggcgcgctttctagccgagccggagcgcgcgggcgagctgcacctggaggaggtgtccccggacgtggtggcccaggtgctgcactacctgtacacatcagagatcgcgctggatgaggcgagcgtgcaggatttgttcgccgcggcacaccgcttccagatcccttccatcttcaccatctgcgtgtccttcctgcagaagcgcctgtgcctctccaactgcttggccgtcttccgtctcggcctcctgctcgactgcgcgcgtctcgccgtggctgcccgcgacttcatctgcgctcacttcacgctggtggcgcgcgacgctgacttcctcggactctcggccgacgagctcatcgccatcatctccagcgacggccttaacgtggagaaggaggaggcagtgttcgaggcggtgatgcggtgggcgggtagcggcgacgccgaggcgcaggctgagcgccagcgcgcgctgcccaccgtcttcgagagcgtgcgctgccgcttgctgccgcgcgcctttctggaaagccgcgtggagcgccaccctctcgtgcgtgcccagcccgagttgctgcgcaaggtgcagatggtgaaggatgcacacgagggccgcatcaccacgctgcggaagaaaaagaaggggaaggatggagccggggccaaggaggctgataagggcacaagcaaagccaaagcagaggaggatgaggaggccgaacgtatccttcctgggatcctcaatgacaccctgcgcttcggcatgttcctgcaggatctcatcttcatgatcagtgaggagggcgctgtggcctacgatccagcagccaacgagtgctactgtgcttccctctccaaccaggtccccaagaaccacgtcagcctggttaccaaggagaaccaggtcttcgtggctggaggcctcttctacaacgaagacaacaaagaggaccccatgagcgcatacttcctgcagtttgaccatctggactcagagtggctggggatgccaccgctgccctcgccccgctgcctctttggcctgggagaagctctcaactccatctacgtggtcggtggcagagagatcaaggacggcgagcgctgcctggactcggtcatgtgctacgacaggctgtcattcaaatggggtgaatcggacccgctgccttacgtggtgtatggccacacagtgctctcccacatggaccttgtctacgtaattggcggcaaaggcagtgacaggaagtgcctgaacaagatgtgcgtctatgaccccaagaagtttgagtggaaggagctggcacccatgcagaccgcccgctcactctttggggccactgtccatgatggccgcattatcgtggcagctggggtcaccgacacagggctgaccagttctgccgaagtgtacagcatcacagacaacaagtgggcacccttcgaggccttcccacaggagcgtagctcactcagcctggtcagcctggtgggtaccctctatgccattggtggctttgccacactggagacggagtctggagagctggttcccacagagctcaatgacatctggaggtataacgaggaggagaagaaatgggagggtgtcctgcgggagatcgcctatgcagcaggtgccaccttcctaccagtgcggctcaatgtgctgtgcctgactaagatgtgaccagctcaggcagactgaactaagcacccctcccatcctgcgaccctcactggcctggccttgtgggggctccagaaaagaggctaggagaggccagagtctacctggatccagttatggtgcctcaggggctgcgtcagccaaggaaagggaagtgctgcttagtcctggacttttgggcaagggtgagaaactagaggcttctccagtgttgccatatccccctaggttgtcttgatccatgaaccagaaccacagggcggtatcccaggccgtgtgctggccctgccccagcctagctgagtgtgctggcaaagttccccacaggactcagccttctcgtctttccgatgggagcatccccatcaagtgcagtgtacagtgcagatatgtctccttctttaggaagaataaagtgccttctgagcaagcagctcagggtctgcatcagtgctccaagagtcagtgagcaggtgtgttgaagacttggggcttcagtgttctgctgttgggctgccaaggtcgatggtctctgctctccatctggtgtc

SEQ ID NO: 243255 - DNA, 1399 bp, Artificial Sequence
  derived and/or modified sequence
agtctaagcaaaccccagcaggaaagcaggggtacagagaggagcccccttggcaccgccaccgtcttcgagagcgtgcgctgccgcttgctgccgcgcgcctttctggaaagccgcgtggagcgccaccctctcgtgcgtgcccagcccgagttgctgcgcaaggtgcagatggtgaaggatgcacacgagggccgcatcaccacgctgcggaagaaaaagaaggggaaggatggagccggggccaaggaggctgataagggcacaagcaaagccaaagcagaggaggatgaggaggccgaacgtatccttcctgggatcctcaatgacaccctgcgcttcggcatgttcctgcaggatctcatcttcatgatcagtgaggagggcgctgtggcctacgatccagcagccaacgagtgctactgtgcttccctctccaaccaggtccccaagaaccacgtcagcctggttaccaaggagaaccaggtcttcgtggctggaggcctcttctacaacgaagacaacaaagaggaccccatgagcgcatacttcctgcagtttgaccatctggactcagagtggctggggatgccaccgctgccctcgccccgctgcctctttggcctgggagaagctctcaactccatctacgtggtcggtggcagagagatcaaggacggcgagcgctgcctggactcggtcatgtgctacgacaggctgtcattcaaatggggtgaatcggacccgctgccttacgtggtgtatggccacacagtgctctcccacatggaccttgtctacgtaattggcggcaaaggcagtgacaggaagtgcctgaacaagatgtgcgtctatgaccccaagaagtttgagtggaaggagctggcacccatgcagaccgcccgctcactctttggggccactgtccatgatggccgcattatcgtggcagctggggtcaccgacacagggctgaccagttctgccgaagtgtacagcatcacagacaacaagtgggcacccttcgaggccttcccacaggagcgtagctcactcagcctggtcagcctggtgggtaccctctatgccattggtggctttgccacactggagacggagtctggagagctggttcccacagagctcaatgacatctggaggtataacgaggaggagaagaaatgggagggtgtcctgcgggagatcgcctatgcagcaggtgccaccttcctaccagtgcggctcaatgtgctgtgcctgactaagatgtgaccagctcaggcagactgaactaagcacccctcccatcctgcgaccctcactggcctggccttgtgggggctccagaaaagaggctaggagaggccagagtctacctggatccagttatggtgcctca

SEQ ID NO: 243256 - DNA, 1866 bp, Artificial Sequence
  derived and/or modified sequence
atggccctgggcctggagcaggccgaggagcagcggctgtaccagcagacgctgcttcaggacggccttaaagacatgctggaccatggtaagtttctggactgcgtggtgagggctggcgaaagggagtttccgtgccaccgactagtgttggccgcatgtagcccgtatttccgcgcaagattcctggctgaaccagagcgggccggggagctccacctggaggaggtttcaccagatgtcgttgcccaggttttacactatttgtacacatctgagattgcactggatgaggcctcagtccaagatttattcgctgctgcgcacaggttccaaattccttctatctttactatctgcgtgagctttctgcagaagcgactgtgcttgtcaaactgcctagctgtttttcggctcggcctgctactggattgtgctcgcctggctgttgctgctagagatttcatttgcgcccatttcacattagttgcaagagacgccgactttctgggattgtccgccgacgagctcatcgctattatctccagtgacgggttgaacgtcgaaaaggaggaggctgtgtttgaagccgtcatgcgctgggctggttccggagatgctgaagcacaagcagagcgccagagggccctcccaactgtattcgagagcgttaggtgccggttgctgccaagagcgtttcttgaaagtagagtggagcgccatcctctggttagagcgcagcctgagctgttgcgcaaagtccagatggtaaaggatgcccatgaagggaggatcaccactctacgcaaaaagaaaaaaggcaaagacggtgctggtgctaaagaggcagataaagggaccagcaaggctaaggctgaagaagacgaggaggctgaaagaatacttcctggcattctcaacgacacattaagatttggcatgtttctacaggaccttatcttcatgatcagcgaggagggggccgttgcctatgatcctgctgctaacgagtgctattgtgcctctctgagtaatcaggttcctaaaaaccatgtcagcttggtaaccaaggagaaccaggtcttcgtggccggcggactgttttataacgaagacaataaggaagacccaatgagcgcatacttcctccagttcgaccacctcgattcagagtggctgggtatgcctccactgccatccccaagatgcttatttggtctaggcgaagcccttaattcgatttacgtggtcggtgggagggaaattaaagatggagaaagatgcctggactcggtgatgtgttatgatagattgtccttcaagtggggcgagtccgatccattgccatatgtggtttacgggcacacagtgctgtcccacatggatctggtatatgttattggagggaaaggaagcgatagaaagtgcttgaacaagatgtgcgtgtatgacccaaaaaagtttgagtggaaggagttggcccctatgcagacagctagaagcctgtttggggcaaccgtacacgatggcaggattattgtagctgcaggagtgactgacacagggctgacatccagtgcggaggtatacagtataaccgacaacaaatgggcaccgttcgaggcttttccgcaggaaaggtcttctctttcactagtctctctcgtgggaaccctgtacgctatcggcggttttgccacccttgagaccgaatctggagaactggttccaacggaactcaatgacatatggcgttacaacgaggaggagaaaaagtgggaaggcgtcctgcgcgaaatagcttacgccgcgggtgcaacatttctcccagtgagactgaacgtcctttgcctcaccaagatgtag

SEQ ID NO: 243257 - DNA, 1101 bp, Artificial Sequence
  derived and/or modified sequence
atggtgaaggacgcccacgagggccggatcaccaccctgcggaagaagaagaagggcaaagatggcgctggcgctaaggaggctgataagggtacgagcaaggccaaagcagaggaagacgaagaggcggagaggattctccctgggattcttaacgacacacttaggtttgggatgtttctccaggatctgattttcatgatttcagaagaaggagcagtggcctatgatcccgctgcgaatgagtgctactgtgcttcgctcagtaaccaggttccaaaaaatcacgtctctttggtgaccaaggaaaatcaggtttttgtggcaggcggactgttttataacgaagataataaggaggacccgatgagcgcttatttcctgcaattcgatcatctggatagcgagtggctagggatgccaccgctaccaagtccacggtgcctcttcgggttgggcgaagccttaaatagcatttatgtggtcggggggcgcgaaatcaaggatggcgaacgctgtctggactctgtgatgtgttacgatcgcctgagtttcaaatggggcgagagcgacccccttccgtatgtagtgtacggacacaccgtgctttctcacatggatcttgtgtatgttatcggcggcaagggaagtgatagaaagtgcctgaacaaaatgtgcgtctatgaccccaagaaatttgagtggaaagaacttgccccaatgcagacagccagatctctctttggtgccaccgtccatgatggtaggataatcgtggctgccggcgttacagatacagggctaacgtcttccgcagaggtgtattcaatcaccgacaacaagtgggcccctttcgaggccttcccacaggaaagatctagccttagtcttgtctcgctagttggtacgctgtacgcaattggcggatttgcaacactggaaacagagtctggtgagctggtcccaaccgaactgaatgacatctggcgctacaacgaagaagagaaaaagtgggagggcgtgcttcgggaaatcgcttacgcagcaggggccacattcttacccgtgaggctgaatgttttatgtcttactaaaatgtag

SEQ ID NO: 243258 - DNA, 1866 bp, Artificial Sequence
  derived and/or modified sequence
atggccctgggtctggagcaagctgaggagcagcggctatatcaacaaacccttctgcaggacggcttgaaggatatgttggaccatgggaagtttttggattgtgtcgtacgtgcaggcgaacgggagttcccttgccaccggttagtgctggcggcatgcagtccatactttcgtgctagattcctggctgaaccggagcgcgcaggggagctgcacttggaagaggtttctcccgatgtggtggctcaggtgttgcattacttgtatacctcagagattgctctcgacgaggcttcagttcaagaccttttcgcagctgcccacaggtttcagattcccagcattttcaccatatgtgtcagtttcctccagaagagattgtgtttatcaaattgcctagctgtcttccgtctgggcctcctccttgactgtgccagactggcggttgcggcacgcgatttcatttgcgcccatttcaccctcgttgctcgcgatgccgacttcctcggacttagtgcggatgaactgattgccattatctcctccgacggattgaacgtagaaaaggaagaggccgttttcgaggctgtgatgagatgggcgggatccggggatgccgaggcccaggccgaaaggcagagagctctgcctacagtctttgagagcgttaggtgtaggctcctgccacgggctttcttagagagcagggttgaacggcaccctttggtaagggcacagcccgaattattgcgcaaagtccagatggtcaaagatgctcacgaagggaggatcactacattaaggaagaagaaaaagggcaaggacggggctggggctaaagaggcagacaagggtacttcgaaggccaaagccgaggaggacgaggaagccgaacggatcctgcctggcatcctgaatgataccctgaggttcggcatgtttctgcaggatttgatttttatgattagcgaagagggagcagttgcatatgatccagccgcaaacgagtgttattgtgcctccctgtccaatcaagtaccgaagaatcacgtttccttggttacaaaagagaatcaggtattcgtcgcagggggactgttctataacgaggataataaggaagacccaatgtccgcttactttctgcaattcgaccatttggatagcgagtggctggggatgcctcctctgccctcccccagatgcctatttggactgggcgaagccctaaacagtatctacgtcgtgggcggacgggaaatcaaggatggagagcgctgtttggacagtgtgatgtgctatgaccgcctttcgtttaaatggggcgagtctgaccctctgccatacgtggtttacggacacacggtactgtcccacatggatctggtgtacgtgattggcggaaaggggagcgatagaaagtgtttgaataagatgtgtgtttacgaccccaagaaattcgagtggaaggagctggcacctatgcaaacagctagatcacttttcggcgctacagtccatgacggtagaatcatcgttgcagctggggttactgatactggccttactagtagtgctgaagtatactctataacagataacaagtgggctcctttcgaggccttcccacaagagcgtagttccctcagtctggtgtcgctggtgggaacactgtatgccattgggggattcgccacactggagactgaatccggggaactggtaccgacggaacttaacgacatctggcggtataatgaagaggaaaagaagtgggaaggagtacttcgggaaatcgcctacgcagccggtgctacattcctgccagtgcgcctgaatgtgctgtgtctgactaaaatgtag

SEQ ID NO: 243259 - DNA, 1101 bp, Artificial Sequence
  derived and/or modified sequence
atggtgaaggatgctcatgaaggtaggatcaccacactccggaagaagaagaagggtaaggacggcgcaggggctaaggaggctgacaaaggtactagcaaagcaaaggccgaagaagatgaggaggcagaaagaatcttgccagggattctaaacgacactctgaggttcggtatgtttctgcaggatctaatcttcatgattagtgaggagggggctgtggcatacgaccctgctgcaaacgaatgttactgtgcctctttgagtaaccaggtgcccaaaaaccacgtgagtttggttactaaagaaaaccaggtgtttgtcgcaggcggtctgttctataatgaggacaacaaagaggatccaatgtccgcctacttcctgcagtttgaccacctggactctgagtggctggggatgcctccactgccctcccctcgatgtctgttcggactgggtgaggctctcaatagcatctacgtggtgggtggacgggagatcaaagacggagaacgatgcctcgattcggtcatgtgctatgaccgactgagtttcaaatggggcgagtcggaccccctgccttacgtcgtgtacggtcataccgtcctttcccacatggatctggtctatgtgatcggcggaaaaggctctgacaggaagtgtctaaacaaaatgtgtgtgtatgatcccaaaaaattcgaatggaaggaactggcaccaatgcagactgctagaagcctgtttggagccactgtacatgacggcaggatcatcgttgcagccggtgttactgacactggactcaccagcagtgctgaggtctattcaatcaccgacaacaagtgggcgccatttgaagcgttccctcaagagcgctcttcccttagtcttgtctcactggtggggacactgtacgcaatcggcggtttcgccactctggagactgaatcaggagaattagtgccgactgagctcaatgatatctggcgatacaacgaggaagagaagaaatgggaaggcgttctgagggagatcgcctacgccgcaggtgcgactttcctgcccgtgcgtcttaacgtactttgccttacaaaaatgtag

SEQ ID NO: 243260 - protein, 132 aa, Artificial Sequence
  derived and/or modified sequence
MCSAGELLRGGDGGERDEDGDALAEREAAGTGWDPGASPRRRGQRPKESEQDVEDSQNHTGEPVGDDYKKMGTLFGELNKNLINMGFTRMYFGERIVEPVIVIFFWVMLWFLGLQALGLVAVLCLVIIYVQQ

SEQ ID NO: 243261 - DNA, 2726 bp, Artificial Sequence
  derived and/or modified sequence
gagccagtgacaggaggggccgggctggtacttcaggcgcccaggccggcggggcgcgctccggcggctcctgtcagcggcgggtgcggcggatcccagggcagccttcgggcggcggcgctgcctggtgcgtcgcggcgtggtcctccggcggctgtccggggcggtaggagttggctgcgggatgtgctcagccggggagctgctgcggggcggcgacggcggggaacgcgacgaggacggggacgcgctggcggagcgggaggcggcagggaccgggtgggatcccggggcgagcccgcggcggcgcggacagcggccgaaggagagcgagcaggatgttgaagactcacagaaccacactggtgagccggttggagatgactacaagaaaatgggaacactttttggtgaactgaacaaaaaccttatcaacatgggcttcacaaggatgtattttggagaacgaatagtggaaccagtaatagtcattttcttttgggttatgctgtggttccttggcctgcaagcccttggactagttgctgttctttgccttgttattatttatgtgcaacagtaaaacatggccgaattgaattgtttgacatttggtagccatatatgtaattgaagaagttatatatttcactttttgacaaccgaaaaagtttgccttgtttcaaatcatgtgctggctgttttgtaagtaaatttatacatggatgtcacttaaaactaaactcttgatcataacagggttgaatatatattttgaatatacattagcttattcaaaactcttgtttcactactgtgatctctgtctcctttatacacctctatccccatgccaaatcttaagtaacaccaccagaaagtgaacagggaaaataacaggacatggaattcaaatcaagcaatatagttcttataaagagttccaataaaacatttcagaagaaaaagtatgaaacaagctaaaagtaagtttcacttagaaaacttctccccactcacactccccaccaaataatctcatattatttgggaaatatttggatttcaattgtccctacccagcctaaactaaggtaaatgataattagcatacactaccttaatattgtgatgaaaatcagtaaagatagaacgttttctaaaggtcaaaaataatatatttattattactggggaaagctcccaggttaaatataacttttttaaaatgtaacatttggacctagacctactttaatatatcatttgaagtttcagacaattttggtgctaattactttttgtgagtttttaaagtctcatagcctagttgactgcaccctatggtaatgccatattttcttgtatctaacaagttgcatattttttcctagagagacattttcagtgtatttttttttagaaatttataattttatagttctttcataacacttattctgagttttgaaacaatgtatttcctatcttgacatggattttttcacaaaaaatttgtattttactgttgttttcaggaaaaaaatcagatcatttttctttgatatctatatcagaaaggtacaatattaacagtataaaaccaaatgcttaaatttggaacttagccaattttgataatctttttctaaggctaaagtcacatcagtaattggctagccatgttattaaggtgtcttaattcagcattttcaggttttatattgaaatacgcatttctttaaatattctttgaaaatggagaatggctttagtgatattttgggttttgttagagaacctaaaatctttacactttcatctcaaagattataaaggaaaggggggtagttaagatttagaattcaagttaaatttcagaaattggggcagtcaggcatttgtatctttggtagggcaacaagtaaaacatgtagagtgcttgctatcccacttcataaagcttttacccaatcttatttctaaacctctgtgcattcttagtgtcttctcattctgaaacagaaaataaggaaaaacatttaacttagttttctaaaatcagataatcctaaacaaaaatgttagtcagggtcactaaaaagtattgcacatttatataaatacagtccttttaaaatttgacttttaaaaaacaaaagactttgtacgatattgtgtttttattgcttttgcaatatttttatagtagcctttatgaactcagtataagtgcaagttgtttgaaaaggtgtttttattagtgcacaatagaattgtgaggttttcaatagatgtcatgagattttgtatatctacataaaatatcagtacatttttttctaatgctactggaaattttacttttcctttgcaacacataaatgatatgatgtacaaaataacagctctggttccaccagtacctaatgttgaaaacatttttaaagtaatttttaatactaactatttagtatactgtcagtactgtacatctgcacactggtgttaatagggtatatattaaattatataaagaaataagatattttgctgttattctttctacatatattattggtcagtacatcaaataatatttggctttgatatgggaaaaaacaaactttgcctatgtaatggaaataaaatattttcttttatgaaatatattagaatgcagattatactaatatcctgaaataaaactggtaatttatttggtt

SEQ ID NO: 243262 - DNA, 399 bp, Artificial Sequence
  derived and/or modified sequence
atgtgcagcgccggcgagctgctgagaggcggcgacggcggcgagagagacgaggacggcgacgccctggccgagagagaggccgccggcaccggctgggaccccggcgccagccccagaagaagaggccagagacccaaggagagcgagcaggacgtggaggacagccagaaccacaccggcgagcccgtgggcgacgactacaagaagatgggcaccctgttcggcgagctgaacaagaacctgatcaacatgggcttcaccagaatgtacttcggcgagagaatcgtggagcccgtgatcgtgatcttcttctgggtgatgctgtggttcctgggcctgcaggccctgggcctggtggccgtgctgtgcctggtgatcatctacgtgcagcagtag

SEQ ID NO: 243263 - DNA, 399 bp, Artificial Sequence
  derived and/or modified sequence
atgtgcagcgcgggggagttactgcggggcggcgacggtggtgagcgggacgaggacggagatgctctggctgaacgtgaagctgctgggaccggctgggatcccggcgcctcccccaggagaagaggccagcggccaaaggagtcagaacaggatgtggaagacagccagaatcataccggtgaaccagtgggggacgattacaaaaaaatgggaacgctcttcggcgagctgaacaaaaatcttatcaacatgggattcactcggatgtacttcggagagaggattgtggaacccgtcattgtgattttcttctgggtgatgctgtggtttctgggtctacaggccctaggcctggtcgctgtcctgtgcctggtgataatctacgtccagcagtag

SEQ ID NO: 243264 - DNA, 399 bp, Artificial Sequence
  derived and/or modified sequence
atgtgcagcgctggggagctgctgcggggaggagatggaggagagagagatgaagatggagatgccctggccgagcgggaggccgccggcaccggctgggaccccggggccagccccaggagaagaggccagaggcccaaggagagcgagcaggatgtggaggacagccagaaccacactggagagcctgtgggagatgactacaagaagatgggcaccctgtttggagagctgaacaagaacctgatcaacatgggcttcaccaggatgtactttggagagcgcatcgtggagcctgtgattgtcatcttcttctgggtgatgctgtggttcctgggcctgcaggccctgggcctggtggccgtgctgtgcctggtgatcatctacgtgcagcagtag

SEQ ID NO: 243265 - DNA, 399 bp, Artificial Sequence
  derived and/or modified sequence
atgtgcagcgccggcgagctgctgcggggcggcgacggcggcgagcgggatgaggacggagacgccctagcagaacgggaagctgccggcactgggtgggatcctggggcttctcccagacgtcggggccaaagacccaaggagtctgaacaggacgtagaagacagccagaaccacacaggggagcccgtcggcgatgattacaagaagatgggtaccttattcggcgagctaaacaaaaacctcattaacatgggatttacacgaatgtactttggggagcggatagtggaacccgtcatagtgattttcttctgggtcatgctgtggttccttggactgcaggctctcggcctggtagccgtactgtgcttggttatcatttatgtgcagcagtag

SEQ ID NO: 243266 - DNA, 399 bp, Artificial Sequence
  derived and/or modified sequence
atgtgcagtgccggagagctgctccgcggtggagatgggggtgagcgcgacgaggatggggatgctctggctgaaagggaagccgctggcacgggatgggaccctggagccagcccacgtcggcgagggcagcggccaaaagaatcagagcaagacgtggaggacagtcagaaccacactggcgagcccgttggcgacgattacaagaaaatgggaacccttttcggagagctaaataaaaatctcattaatatgggctttaccaggatgtactttggagaacggattgtagagccagtcattgtgatttttttctgggtgatgctctggttcctggggttgcaggccttgggactggtggcagtcctgtgcctcgttattatttacgtccagcagtag

SEQ ID NO: 243267 - protein, 241 aa, Artificial Sequence
  derived and/or modified sequence
MQDPNEDTEWNDILRDFGILPPKEESKDEIEEMVLRLQKEAMVKPFEKMTLAQLKEAEDEFDEEDMQAVETYRKKRLQEWKALKKKQKFGELREISGNQYVNEVTNAEEDVWVIIHLYRSSIPMCLLVNQHLSLLARKFPETKFVKAIVNSCIQHYHDNCLPTIFVYKNGQIEAKFIGIIECGGINLKLEELEWKLAEVGAIQTDLEENPRKDMVDMMVSSIRNTSIHDDSDSSNSDNDTK

SEQ ID NO: 243268 - DNA, 726 bp, Artificial Sequence
  derived and/or modified sequence
atgcaggaccctaatgaggataccgagtggaacgacattctgcgggatttcggcatcctgccccctaaggaggaatcaaaggacgagatcgaggaaatggtcttgcgactccagaaagaggccatggttaaacccttcgaaaaaatgacattggcccagctcaaggaggccgaggatgaatttgacgaggaggacatgcaagcagtggagacatacagaaaaaaaagactccaggagtggaaagctctgaagaaaaaacagaaattcggggaacttcgggaaattagtggtaatcagtatgtgaatgaggtcacaaacgcggaagaagatgtgtgggtgataattcatttatatcgtagcagtattcccatgtgtctgctggtgaatcaacacctttccctgctcgctcgaaagttcccagagaccaaattcgttaaagcgatcgtgaatagctgtattcagcactaccacgataactgcctgccaactatcttcgtctataaaaatgggcaaatagaagccaagttcatcggtattatagaatgcggtggaatcaacttgaaactcgaggagctggagtggaagctggctgaagtcggcgccatccagaccgacctggaggagaaccccagaaaggacatggttgatatgatggttagttcaatacggaatactagtatccatgacgactccgactcttcaaactccgataacgatactaagtag

SEQ ID NO: 243269 - DNA, 726 bp, Artificial Sequence
  derived and/or modified sequence
atgcaggaccccaatgaagacacagagtggaatgacatcctgcgggactttggcatcctgccccccaaggaggagagcaaggatgaaattgaggagatggtgctgcggctgcagaaggaggccatggtgaagccctttgagaagatgaccctggcccagctgaaggaggccgaggatgaatttgatgaggaggacatgcaggccgtggagacctacaggaagaagaggctgcaggagtggaaggccctgaagaagaagcagaagtttggagagctgcgggagatcagcggcaaccagtatgtgaatgaggtgaccaatgcagaagaagatgtgtgggtgatcatccacctgtaccgcagcagcatccccatgtgcctgctggtgaaccagcacctgagcctgctggccaggaagtttcctgagaccaagtttgtgaaggccatcgtgaacagctgcatccagcactaccatgacaactgcctgcccaccatctttgtgtacaagaatggccagatcgaggccaagttcatcggcatcattgaatgtggcggcatcaacctgaagctggaggagctggagtggaagctggccgaggtgggcgccatccagacagacctggaggagaaccccaggaaggacatggtggacatgatggtgagcagcatccggaacaccagcatccatgatgacagcgacagcagcaacagcgacaatgacaccaagtag

SEQ ID NO: 243270 - DNA, 726 bp, Artificial Sequence
  derived and/or modified sequence
atgcaggaccccaacgaggacaccgagtggaacgacatcctgcgggattttggaattctgccgcccaaagaggaatcaaaagatgaaattgaggagatggtcttaagactacagaaagaggcgatggtgaagccctttgagaagatgacactggcacagttgaaggaggcggaagatgagtttgatgaggaagacatgcaggccgtcgaaacatacagaaagaaacggttgcaggaatggaaggccttaaaaaagaagcagaagtttggtgagcttcgcgagatttcagggaaccagtacgtgaacgaggtcaccaacgccgaagaggacgtttgggtgatcatccatttgtatcgttcatccattccgatgtgtctcctggtgaaccaacatctgagcctcctggcgcgcaagttcccagaaaccaaattcgtgaaggctatcgtcaactcatgtatccagcattaccacgacaactgtctaccgaccatttttgtctacaaaaacggccaaatcgaggctaagttcattggcataatagaatgcggtgggattaatctgaagctcgaggagcttgagtggaagttggctgaagttggggcgattcaaacggacctcgaagagaatccccggaaagatatggtggacatgatggtgtcctccattcggaacaccagcattcacgatgattccgactccagcaatagcgataacgacacaaaatag

SEQ ID NO: 243271 - DNA, 861 bp, Artificial Sequence
  derived and/or modified sequence
gaagcgggcgctcttccagcctggagaaggctgcgggtctccatccgtggcgcctcgccagctgcaggacgacgcgggctcttgaggggcagagcagcgcatcatgcaggatcccaatgaagatacagaatggaatgacattttaagagatttcggcattcttcctcctaaagaagagtcaaaagatgaaattgaagaaatggttttacgtttacagaaagaagcaatggtgaaaccatttgaaaagatgactcttgcacagctaaaggaagctgaagatgaatttgatgaagaagatatgcaggctgttgaaacatatagaaagaagcggttacaggaatggaaagctcttaagaaaaaacaaaaatttggagaattaagagaaatttctggaaatcagtatgtgaatgaagtcacaaatgcagaagaagatgtgtgggttataattcatctatacagatcaagcatcccaatgtgtttgttggttaaccagcatcttagtcttctagcaagaaagtttccagaaactaaatttgttaaagccatcgtgaatagctgtattcaacactaccatgacaattgtttaccaacaatttttgtgtataaaaatggtcagatagaagccaaattcattggaattatagaatgtggagggataaatctcaagctggaagaacttgaatggaagctagcagaagttggagcaatacagactgatttggaagaaaaccccagaaaagacatggtagatatgatggtatcttcaattagaaacacttctattcatgatgacagtgatagctccaacagtgataatgataccaaatagagagaaatattcaataaatagcttttagtata

SEQ ID NO: 243272 - DNA, 726 bp, Artificial Sequence
  derived and/or modified sequence
atgcaggaccccaacgaggacacagagtggaacgacatcctccgagatttcggcatcctgcctcctaaggaggagtcaaaagacgagattgaagagatggttttgcgcctgcaaaaagaggctatggtgaaaccctttgagaagatgaccctggctcagttgaaggaagcggaagatgagttcgatgaggaggacatgcaggctgtagaaacctacagaaagaagaggctccaggagtggaaagccctaaagaagaaacaaaaatttggtgagcttcgcgaaattagcggtaatcagtacgtgaatgaggttacaaatgctgaggaggatgtttgggtgattatacatctgtacaggagctcaattcccatgtgcttgttagtcaaccagcatctcagtctactcgcccgaaagttcccggaaactaagtttgttaaagccatcgtgaactcctgtatccagcactaccacgataattgcctgccgactatattcgtgtacaaaaacggccagattgaggctaagtttatagggataatagagtgtgggggtattaacctgaagctggaagagctggaatggaaactggctgaggtgggcgctatccaaactgacttggaggagaacccgagaaaagatatggttgatatgatggtttccagcattcgcaataccagcattcacgacgactccgatagctctaacagcgacaacgatacaaagtag

SEQ ID NO: 243273 - DNA, 726 bp, Artificial Sequence
  derived and/or modified sequence
atgcaggaccccaacgaggacaccgagtggaacgacatcctgagagacttcggcatcctgccccccaaggaggagagcaaggacgagatcgaggagatggtgctgagactgcagaaggaggccatggtgaagcccttcgagaagatgaccctggcccagctgaaggaggccgaggacgagttcgacgaggaggacatgcaggccgtggagacctacagaaagaagagactgcaggagtggaaggccctgaagaagaagcagaagttcggcgagctgagagagatcagcggcaaccagtacgtgaacgaggtgaccaacgccgaggaggacgtgtgggtgatcatccacctgtacagaagcagcatccccatgtgcctgctggtgaaccagcacctgagcctgctggccagaaagttccccgagaccaagttcgtgaaggccatcgtgaacagctgcatccagcactaccacgacaactgcctgcccaccatcttcgtgtacaagaacggccagatcgaggccaagttcatcggcatcatcgagtgcggcggcatcaacctgaagctggaggagctggagtggaagctggccgaggtgggcgccatccagaccgacctggaggagaaccccagaaaggacatggtggacatgatggtgagcagcatcagaaacaccagcatccacgacgacagcgacagcagcaacagcgacaacgacaccaagtag

SEQ ID NO: 243274 - protein, 369 aa, Artificial Sequence
  derived and/or modified sequence
MGLRKKSTKNPPVLSQEFILQNHADIVSCVGMFFLLGLVFEGTAEASIVFLTLQHSVAVPAAEEQATGSKSLYYYGVKDLATVFFYMLVAIIIHATIQEYVLDKINKRMQFTKAKQNKFNESGQFSVFYFFSCIWGTFILISENCLSDPTLIWKARPHSMMTFQMKFFYISQLAYWFHAFPELYFQKTKKQDIPRQLVYIGLHLFHITGAYLLYLNHLGLLLLVLHYFVELLSHMCGLFYFSDEKYQKGISLWAIVFILGRLVTLIVSVLTVGFHLAGSQNRNPDALTGNVNVLAAKIAVLSSSCTIQAYVTWNLITLWLQRWVEDSNIQASCMKKKRSRSSKKRTENGVGVETSNRVDCPPKRKEKSS

SEQ ID NO: 243275 - DNA, 1110 bp, Artificial Sequence
  derived and/or modified sequence
atgggcctgagaaagaagagcaccaagaacccccccgtgctgagccaggagttcatcctgcagaaccacgccgacatcgtgagctgcgtgggcatgttcttcctgctgggcctggtgttcgagggcaccgccgaggccagcatcgtgttcctgaccctgcagcacagcgtggccgtgcccgccgccgaggagcaggccaccggcagcaagagcctgtactactacggcgtgaaggacctggccaccgtgttcttctacatgctggtggccatcatcatccacgccaccatccaggagtacgtgctggacaagatcaacaagagaatgcagttcaccaaggccaagcagaacaagttcaacgagagcggccagttcagcgtgttctacttcttcagctgcatctggggcaccttcatcctgatcagcgagaactgcctgagcgaccccaccctgatctggaaggccagaccccacagcatgatgaccttccagatgaagttcttctacatcagccagctggcctactggttccacgccttccccgagctgtacttccagaagaccaagaagcaggacatccccagacagctggtgtacatcggcctgcacctgttccacatcaccggcgcctacctgctgtacctgaaccacctgggcctgctgctgctggtgctgcactacttcgtggagctgctgagccacatgtgcggcctgttctacttcagcgacgagaagtaccagaagggcatcagcctgtgggccatcgtgttcatcctgggcagactggtgaccctgatcgtgagcgtgctgaccgtgggcttccacctggccggcagccagaacagaaaccccgacgccctgaccggcaacgtgaacgtgctggccgccaagatcgccgtgctgagcagcagctgcaccatccaggcctacgtgacctggaacctgatcaccctgtggctgcagagatgggtggaggacagcaacatccaggccagctgcatgaagaagaagagaagcagaagcagcaagaagagaaccgagaacggcgtgggcgtggagaccagcaacagagtggactgcccccccaagagaaaggagaagagcagctag

SEQ ID NO: 243276 - DNA, 1110 bp, Artificial Sequence
  derived and/or modified sequence
atgggcctgcggaaaaaatcaaccaaaaatcctcccgtgctctcacaggaattcatccttcaaaatcatgcagacatcgtcagctgtgttggaatgttcttcctccttggacttgtcttcgaagggactgctgaagccagcattgtgttcctcaccctgcaacatagcgttgccgtgccagctgctgaagaacaggcaacgggctctaaatctctgtattactacggcgtgaaggatctggccactgtgttcttttacatgcttgtggccatcataatccacgccaccatccaggaatatgttctggacaaaataaacaagcgaatgcagtttactaaggctaagcagaataagttcaacgagtctggtcaattcagtgtattctactttttctcctgcatctggggtacctttattctcattagcgaaaactgcctgagtgacccaacgcttatctggaaagccagaccacatagtatgatgaccttccagatgaagttcttctatattagccagctcgcctactggtttcatgcctttccggagctgtactttcaaaaaacaaagaagcaagatattcctagacaactcgtttatatcggcctccatctgttccatattaccggtgcttatctgctctaccttaaccatttggggctgctgcttctcgtcctacattactttgtggagttgctttcacacatgtgtggacttttttatttctctgacgagaaatatcagaaaggcatcagcctgtgggcaattgtgtttattttgggtcgactggtgactctgatcgtctctgtattaactgtggggtttcacctcgcagggtcacagaatcgcaatcctgacgcactcaccgggaatgtgaacgtgcttgccgccaagatagctgtgctgagctcctcttgcactattcaggcctacgttacatggaacctgataaccctgtggctgcagagatgggtggaggattctaatatccaggcttcttgtatgaaaaagaagagatccagatctagcaaaaagcgaactgagaacggggtcggggtggagacatccaatagggtggactgcccaccaaagaggaaagagaaatccagctag

SEQ ID NO: 243277 - DNA, 1110 bp, Artificial Sequence
  derived and/or modified sequence
atgggcctgaggaagaagagcaccaagaacccccctgtgctgagccaggagttcatcctgcagaaccacgccgacatcgtgtcctgtgtgggcatgttcttcctgctgggcctggtgtttgagggcacagctgaggccagcatcgtgttcctgaccctgcagcacagcgtggccgtgcctgctgctgaggagcaggccaccggcagcaagagcctgtactactatggagtgaaggacctggccaccgtcttcttctacatgctggtggccatcatcatccacgccaccatccaggagtatgtgctggacaagatcaacaagaggatgcagttcaccaaggccaagcagaacaagttcaatgaaagtggccagttcagcgtcttctacttcttcagctgcatctggggcaccttcatcctgatcagcgagaactgcctgagtgaccccaccctcatctggaaggcccggccccacagcatgatgaccttccagatgaagttcttctacatcagccagctggcctactggttccacgccttccctgagctgtacttccagaagaccaagaagcaggacatcccccggcagctggtgtacatcggcctgcacctgttccacatcaccggggcctacctgctgtacctgaaccacctgggcctgctgctgctggtgctgcactactttgtggagctgctgagccacatgtgtggcctcttctacttcagtgatgagaagtaccagaagggcatcagcctgtgggccatcgtgttcatcctgggccgcctggtgaccctcatcgtgtctgtgctgactgtgggcttccacctggccggcagccagaacagaaatccagatgccctgactggaaatgtgaatgtgctggccgccaagattgctgtgctgagcagcagctgcaccatccaggcctacgtgacctggaacctgatcaccctgtggctgcagcgctgggtggaggacagcaacatccaggccagctgcatgaagaagaagaggagccgcagcagcaagaagaggacagaaaatggagtgggcgtggagaccagcaacagagtggactgcccccccaagaggaaggagaagagcagctag

SEQ ID NO: 243278 - DNA, 1110 bp, Artificial Sequence
  derived and/or modified sequence
atgggcctgcggaagaagagcaccaagaacccccccgtgctgagccaggagtttatcttacaaaatcatgctgacatcgtgtcctgtgtcgggatgttcttcctgctaggtctcgtgtttgaaggcacagcagaagcatctatcgtcttcttgacattgcagcattcggtagcagtgccagctgcagaagagcaagcaacagggtcaaagtcactttactactacggggttaaggatcttgccactgtcttcttttacatgctggtggcaatcatcattcatgctacaattcaagaatatgtgctggacaaaattaacaaacgcatgcagttcaccaaagccaagcaaaataagttcaacgagagcggccagttcagcgtgttctacttcttttcttgtatttgggggaccttcattctgatctctgagaactgtctgtccgaccccacattaatctggaaggcccgaccacattccatgatgaccttccagatgaaattcttctatatctctcagctggcctattggtttcatgcctttcctgagctgtattttcaaaagactaaaaagcaagatattcctaggcagctggtttacatcgggctccatctgttccacataaccggcgcctacctgctgtaccttaatcatctggggctcctcctactggtcctacactactttgttgagctcttgagtcatatgtgtggtctgttctacttcagcgatgagaagtaccagaaaggcatcagcctgtgggccattgtctttattttaggcaggctcgtgacgctgatcgtaagcgtgctgaccgtgggttttcatctagccgggagccagaatagaaatccagacgccctcaccggtaacgtgaatgttcttgccgcaaagatagctgtgctttcgagtagctgcacaatccaagcatacgttacatggaatctgattaccctttggttacaaagatgggttgaagactcaaacatccaagccagttgcatgaagaaaaaaagaagtaggtccagcaagaaacgcacagagaacggggttggagtggaaactagcaatcgtgtcgactgccctcccaagagaaaagagaagtcttcttag

SEQ ID NO: 243279 - DNA, 1110 bp, Artificial Sequence
  derived and/or modified sequence
atgggcttacgcaagaagtcaaccaagaacccaccggtcctttctcaggaatttatcctgcagaaccacgcagatattgtgtcgtgtgtcggcatgttttttctactcgggcttgtctttgaagggacggcagaggcatcaattgtatttttgacgctgcagcacagcgttgctgtgccagccgcagaagagcaagctacaggaagcaagtcgctatactattatggcgttaaggacctcgctacagtcttcttttatatgctcgtcgccatcatcatccacgctactattcaggaatacgtcttagataaaataaataagcggatgcagttcactaaagcgaagcagaataagttcaatgagtctggccaatttagtgtgttctatttcttctcatgcatttggggcacttttatcctgatttcggagaactgcctctccgaccccactctcatttggaaggctcggcctcatagcatgatgacttttcagatgaaatttttctatatttcacagctggcctactggttccacgccttccctgaactgtattttcagaagacaaaaaagcaagacataccaagacagttggtgtatattggtctgcacctattccatatcaccggtgcctatttactttacctcaaccacctcgggcttctgcttctcgtacttcattactttgtggaactcctgtcccatatgtgtggcctgttctactttagcgacgaaaagtaccagaaggggatttcgttatgggccatcgtgttcattctgggcagactagtgactcttatagtctcagtgcttacagtaggctttcaccttgccggtagtcagaaccgcaatcctgacgccttgacagggaatgtgaacgtcctggccgctaagattgctgtgctgtcgagttcctgtacaatccaggcgtacgtcacctggaatctcattaccctgtggctacagcgatgggtggaggactccaacatccaggccagttgcatgaagaagaagagaagccgaagcagtaagaaacggaccgagaacggtgtgggcgtggagacaagcaatcgcgtggattgccccccaaagcggaaggagaaaagtagctag

SEQ ID NO: 243280 - DNA, 2019 bp, Artificial Sequence
  derived and/or modified sequence
gcgcatgctcagctcagctcggccctcgcctttgatttattttttttctgggcggccgctgcgacccgggactgacttcgggatgggaagtggagcccccggagctgctaccgtggcggcggcgctgtgaggagcagccagggggaggcagctgcggctcgccggtgagtatccgggaagcgccaccatggggctccgtaagaagagcaccaagaacccccccgttctcagccaggaattcatcctgcagaatcatgcggacatcgtctcctgcgtggggatgttcttcctgctggggcttgtgttcgagggaacagcagaagcatccatcgtgtttctcactcttcagcacagtgttgctgtccctgcagcagaggaacaagccacgggctcaaagtccctctattattatggtgtcaaagatttggccacggttttcttctacatgctggtggcaatcattattcatgccacaattcaggaatatgtgttggataaaattaacaagagaatgcagttcaccaaagcgaaacaaaacaagtttaacgagtctggtcagtttagtgtgttctactttttttcttgtatttggggcacattcattttaatctctgaaaactgcctgtcagacccaactcttatatggaaggctcgtccccatagcatgatgacatttcaaatgaagtttttctacatatcccagttggcttactggtttcatgcttttcctgaactctacttccagaaaaccaaaaaacaagacatccctcgtcaacttgtctacattggtcttcacctcttccacattactggagcttatctcttgtacttgaatcatttgggacttcttcttttggtactgcattattttgttgaattactttcccacatgtgcggcctgttttactttagtgatgaaaagtaccagaaaggcatatctctgtgggccattgtgtttatcttgggtagacttgtgactttaattgtttccgtactcactgttgggtttcacctggctggatcgcagaatcggaatcctgatgcccttactggaaatgtaaatgtgttggcagctaaaattgctgttctgtcgtccagttgcacgatccaagcctacgtaacatggaacttaattactctctggcttcagaggtgggtagaagattctaatattcaggcctcatgtatgaaaaagaaacggtcgagatcttctaaaaaaagaacagaaaacggagtgggagtggaaacttcaaatagagtagactgtccgccaaagaggaaagagaaatcttcataatctttgcaagcgcattgattaatgtctgcaaaggaatctgctctttgaggtttctttctgcactagagatttttctgtttttgaaaatagttcgtgctcttcggtttttgttattgaactgtttcatgtattttttaaagacatttgaggggaggaggattattatgaatgggaaaaaaagattttggttgagactaaattactcatcgtcaaaataatgtcaaaatagttttggggatcaccactatattttgttttgatttttaacctttcaacattttcctaatgatttgcagagataactgcacaattttgcatatcaatgatactggttcttactcccaccagtgtttcataatactaacaagatggtctctcctagcaagattatgtgtttaatgcttgctttggggtaaaataaaagtacgaaaaaggtggaagtcaaatcagtattctgtaattgttagaatttattttttaagaacttacaactcagaaaagattgctagactcaccaaaataataaatgttctttattttacaggtagtgattattagtgcttcatccccatttaaaaaaacacagtactaatgggtaacacatatggaggtttgctgccatatatattgcatcaaaatatcattaattaatataaaaatattaaaatcattcctgtccattccacttgtaaatgggaattcatgaaattaaatattacttt

SEQ ID NO: 243281 - protein, 1009 aa, Artificial Sequence
  derived and/or modified sequence
MDLIRGVLLRLLLLASSLGPGAVSLRAAIRKPGKVGPPLDIKLGALNCTAFSIQWKMPRHPGSPILGYTVFYSEVGADKSLQEQLHSVPLSRDIPTTEEVIGDLKPGTEYRVSIAAYSQAGKGRLSSPRHVTTLSQDSCLPPAAPQQPHVIVVSDSEVALSWKPGASEGSAPIQYYSVEFIRPDFDKKWTSIHERIQMDSMVIKGLDPDTNYQFAVRAMNSHGPSPRSWPSDIIRTLCPEEAGSGRYGPRYITDMGAGEDDEGFEDDLDLDISFEEVKPLPATKGGNKKFLVESKKMSISNPKTISRLIPPTSASLPVTTVAPQPIPIQRKGKNGVAIMSRLFDMPCDETLCSADSFCVNDYTWGGSRCQCTLGKGGESCSEDIVIQYPQFFGHSYVTFEPLKNSYQAFQITLEFRAEAEDGLLLYCGENEHGRGDFMSLAIIRRSLQFRFNCGTGVAIIVSETKIKLGGWHTVMLYRDGLNGLLQLNNGTPVTGQSQGQYSKITFRTPLYLGGAPSAYWLVRATGTNRGFQGCVQSLAVNGRRIDMRPWPLGKALSGADVGECSSGICDEASCIHGGTCTAIKADSYICLCPLGFKGRHCEDAFTLTIPQFRESLRSYAATPWPLEPQHYLSFMEFEITFRPDSGDGVLLYSYDTGSKDFLSINLAGGHVEFRFDCGSGTGVLRSEDPLTLGNWHELRVSRTAKNGILQVDKQKIVEGMAEGGFTQIKCNTDIFIGGVPNYDDVKKNSGVLKPFSGSIQKIILNDRTIHVKHDFTSGVNVENAAHPCVRAPCAHGGSCRPRKEGYDCDCPLGFEGLHCQKAIIEAIEIPQFIGRSYLTYDNPDILKRVSGSRSNVFMRFKTTAKDGLLLWRGDSPMRPNSDFISLGLRDGALVFSYNLGSGVASIMVNGSFNDGRWHRVKAVRDGQSGKITVDDYGARTGKSPGMMRQLNINGALYVGGMKEIALHTNRQYMRGLVGCISHFTLSTDYHISLVEDAVDGKNINTCGAK

SEQ ID NO: 243282 - protein, 775 aa, Artificial Sequence
  derived and/or modified sequence
MKEGPEEAGSGRYGPRYITDMGAGEDDEGFEDDLDLDISFEEVKPLPATKGGNKKFLVESKKMSISNPKTISRLIPPTSASLPVTTVAPQPIPIQRKGKNGVAIMSRLFDMPCDETLCSADSFCVNDYTWGGSRCQCTLGKGGESCSEDIVIQYPQFFGHSYVTFEPLKNSYQAFQITLEFRAEAEDGLLLYCGENEHGRGDFMSLAIIRRSLQFRFNCGTGVAIIVSETKIKLGGWHTVMLYRDGLNGLLQLNNGTPVTGQSQGQYSKITFRTPLYLGGAPSAYWLVRATGTNRGFQGCVQSLAVNGRRIDMRPWPLGKALSGADVGECSSGICDEASCIHGGTCTAIKADSYICLCPLGFKGRHCEDAFTLTIPQFRESLRSYAATPWPLEPQHYLSFMEFEITFRPDSGDGVLLYSYDTGSKDFLSINLAGGHVEFRFDCGSGTGVLRSEDPLTLGNWHELRVSRTAKNGILQVDKQKIVEGMAEGGFTQIKCNTDIFIGGVPNYDDVKKNSGVLKPFSGSIQKIILNDRTIHVKHDFTSGVNVENAAHPCVRAPCAHGGSCRPRKEGYDCDCPLGFEGLHCQKAIIEAIEIPQFIGRSYLTYDNPDILKRVSGSRSNVFMRFKTTAKDGLLLWRGDSPMRPNSDFISLGLRDGALVFSYNLGSGVASIMVNGSFNDGRWHRVKAVRDGQSGKITVDDYGARTGKSPGMMRQLNINGALYVGGMKEIALHTNRQYMRGLVGCISHFTLSTDYHISLVEDAVDGKNINTCGAK

SEQ ID NO: 243283 - protein, 375 aa, Artificial Sequence
  derived and/or modified sequence
MEFEITFRPDSGDGVLLYSYDTGSKDFLSINLAGGHVEFRFDCGSGTGVLRSEDPLTLGNWHELRVSRTAKNGILQVDKQKIVEGMAEGGFTQIKCNTDIFIGGVPNYDDVKKNSGVLKPFSGSIQKIILNDRTIHVKHDFTSGVNVENAAHPCVRAPCAHGGSCRPRKEGYDCDCPLGFEGLHCQKAIIEAIEIPQFIGRSYLTYDNPDILKRVSGSRSNVFMRFKTTAKDGLLLWRGDSPMRPNSDFISLGLRDGALVFSYNLGSGVASIMVNGSFNDGRWHRVKAVRDGQSGKITVDDYGARTGKSPGMMRQLNINGALYVGGMKEIALHTNRQYMRGLVGCISHFTLSTDYHISLVEDAVDGKNINTCGAK

SEQ ID NO: 243284 - protein, 152 aa, Artificial Sequence
  derived and/or modified sequence
MRFKTTAKDGLLLWRGDSPMRPNSDFISLGLRDGALVFSYNLGSGVASIMVNGSFNDGRWHRVKAVRDGQSGKITVDDYGARTGKSPGMMRQLNINGALYVGGMKEIALHTNRQYMRGLVGCISHFTLSTDYHISLVEDAVDGKNINTCGAK

SEQ ID NO: 243285 - DNA, 2398 bp, Artificial Sequence
  derived and/or modified sequence
gagacggctgcagaccatggggcagggagcatatggagcacggatatgccagacagagggatgattcatatcccaggcaggatggagcagggcagtgtgctatttcatcgtgctactcagaacttatgaattgtttatttctggaatttcccatttaatatttttggactgtggttgatcgagggtaaatgaaattgcagaaagcaaaaatacagataagggggactgcttgctgtacaaagatagagacaagaggaaggagctgtcctcaagggccttttgtgtgaagacatctggcacacagatacgctgcatgcaggtggcttgagagaacatgcatccaggtttaattgtggaactggggttgccatcatcgtaagtgagaccaaaatcaaactagggggttggcacacggttatgctctacagagatgggctgaacgggctgctgcagctgaacaatggcaccccagtgacaggccagtctcaggggaatgcagcagtggaatctgtgatgaggcctcgtgcatccatggtggcacctgcacagcaatcaaagccgactcctacatttgcctctgtccccttgggtttaaaggtcgacactgtgaagatgctttcaccttgaccattcctcagttcagagagtctctgagatcttacgctgcaactccctggccactggagccccagcattacctttccttcatggaatttgagatcacatttcggccagactcaggagatggtgtcctcctgtacagctatgacacaggcagcaaagacttcctgtccatcaacttggcagggggccacgtggagttccgctttgactgtggctctgggaccggtgtcctcaggagtgaagatcccctcaccctgggcaactggcacgagcttcgtgtatctcgcacagcaaagaatggaatcttacaggtggataagcagaagatagtggagggaatggcagagggaggcttcacacagattaagtgcaacacagacattttcattggcggagtccccaattatgatgatgtgaagaagaactcgggtgtcctgaagcctttcagcgggagcatccagaagatcatcctgaatgaccgaaccatccatgtgaagcatgacttcacctccggagtgaatgtggagaatgcggcccacccctgtgtgagagccccttgtgcccatgggggcagctgccggcccaggaaggagggctatgactgtgactgccccttgggctttgaggggcttcactgccagaaagcgatcatagaagccattgagatcccgcagtttatcggccgcagttacctgacgtatgacaacccagatatcttgaagagggtgtcaggatcaagatcaaatgtgttcatgaggtttaaaacaactgccaaggatggccttttgctgtggaggggagacagccccatgagacccaacagcgacttcatttccttgggccttcgggatggagccctcgtgttcagctataacctgggcagtggtgtggcatccatcatggtgaatggctccttcaacgatggtcggtggcaccgagttaaggccgttagggatggccagtcaggaaagataaccgtggatgactatggagccagaacaggcaaatccccaggcatgatgcggcagcttaacatcaatggagctctgtatgtgggtggaatgaaggaaattgctctgcacactaacaggcaatatatgagagggctcgtgggctgtatctctcacttcaccctgtccaccgattaccacatttccctcgtggaagatgccgtggatgggaaaaacatcaacacttgtggagccaagtaacaccagctggccttgtccaagggacagagccttctattctgagaatcccaggggccctcagaccctgcctgatgctatatgcagaggcccagggaccaggtgtgtttcctctcaccaagaagaaagtacacactgatgagaaactgagaaccaagacaggcatccctgggtggcctttcctgctgacactccacgagctgacccagcagaattctctgtgtaggaagcatcggactttgtccattgaatatgtagcggctgccagagatcacacatcaatgcaaattccagagcctgtctgctatagctcagtgactgtgttgtgattcatagtacattaaaaagagagagagagagaaagaatcccacagggcactattaaaatacttctctccttccctgactcatgacactcttcctgacagcagaatgactgtgtgaccttgaacttcacatttcccacattggcccttggattgttcggattaaccccttccactcctcactggctggttcactgtgttctgactagtccataaaaataaagatggaaggagatcaaa

SEQ ID NO: 243286 - DNA, 3030 bp, Artificial Sequence
  derived and/or modified sequence
atggatttaatccgcggagttttactccgtcttctgctcctggcgtccagcctagggcctggggctgtgagcctccgcgctgctatccgcaagccagggaaagtgggacccccattggacattaagctgggcgctctgaactgcactgcattctcgatacagtggaagatgcccaggcatccgggaagccccattctgggttacacggtcttctattcggaagtcggggctgacaaatctctgcaagagcagttacactctgtgcctttatccagagatatacccaccactgaggaagtgattggcgatctcaagccaggtaccgaataccgagtgagcatcgcagcctactcacaagccggtaaaggcagactttcttccccccgtcatgtaactaccctgagccaggactcatgcctgcccccagccgctcctcagcagccgcatgtcattgttgtttctgactctgaggtggcactttcctggaagccgggagcctctgaaggcagtgctcctatccagtactactcagttgagtttatccggccagacttcgacaaaaagtggacaagtatccacgagcgaatacagatggactctatggtaatcaagggattagaccctgacacaaactaccagtttgcagtcagagctatgaactctcatggaccctcacccaggagctggccctccgacattatccggaccctgtgccccgaggaggctggttctggacgctacgggccacgctatattactgacatgggcgcaggggaggatgacgaaggatttgaggacgacttagacctggatataagcttcgaggaggtgaagcctctccctgccacaaaaggcggtaataaaaagtttttggttgagtccaagaaaatgtccatctccaaccccaagaccatttcgcgtctgattccacccacctccgctagtctgccagtgaccaccgtggctcctcaaccaattccaatccaaagaaaaggcaagaacggtgtggccattatgtcccgcttatttgacatgccgtgcgatgaaacactgtgctcagccgatagcttctgtgtgaacgattacacatggggcggttctaggtgccagtgcacactcggaaaggggggagaatcatgcagtgaagacattgtgatacagtatccgcaattttttggccattcgtacgtgaccttcgagccactcaagaatagctaccaagcttttcagattacccttgaattccgcgcagaggccgaggacggattacttctgtactgcggagagaatgagcatgggcgtggtgattttatgtccttagccatcatcagaaggtcattacagtttcggttcaactgtgggaccggcgtggcaatcattgtcagtgaaaccaaaattaagctggggggatggcacactgtgatgttgtatagggacggtctgaacggactactgcagctcaataacggtacaccagtaacaggacagagtcagggtcagtatagtaaaatcacctttagaactcccttgtacctgggtggcgctccatccgcctattggctagtcagagctactggcaccaacaggggctttcagggctgtgtgcagtcactcgccgtgaacggacgaagaattgacatgaggccttggcctctcggcaaggccttgagcggggcagacgtgggagagtgctcttctggcatttgcgatgaggccagctgtattcatgggggtacatgcacagccatcaaagctgactcgtatatttgtctgtgtccgctcggattcaaggggagacactgtgaggatgcatttacgctgactatcccccagttcagagaatccttgcggagctatgccgctacaccgtggccactggaacctcagcactacctcagctttatggagttcgaaatcacatttcggccagacagtggggatggggtcctactttattcttatgacacaggctcgaaggattttctgagtataaacttggctggaggtcacgtcgaatttcggtttgactgtggttccggaacgggcgtgctgaggtcagaagaccctctgacacttggcaattggcacgaactccgagtatcacgtacagcgaagaatgggatccttcaggtggataagcagaagatagtggaaggtatggccgaaggtggctttacacagatcaagtgtaatactgatattttcatcgggggtgtgcccaattatgacgacgtaaagaagaacagcggtgtgctgaaaccattcagcggatctatccagaaaatcatcctgaatgatagaaccattcatgtcaagcacgatttcacctccggagtaaacgttgagaacgcagcccatccttgcgtgagagcgccatgcgctcacggcggatcttgtaggcccagaaaagagggctacgactgcgattgtcctttaggctttgagggtttacactgccagaaggcaattatcgaggccattgaaatcccgcaatttatcggcagatcttacctcacatacgataatcccgacattctcaaacgggtttccggcagccggagcaatgtttttatgcgttttaagaccaccgctaaggatggcttactgctgtggaggggggacagccccatgagaccaaacagtgactttatttcgctcgggctacgcgatggggcactagtgttttcctataaccttggctccggggtcgcaagcattatggttaatgggtcgtttaatgacggcaggtggcaccgggtcaaagctgttcgcgatgggcagtcaggtaaaataacagtggacgattatggggctagaactggaaaatcacctggcatgatgaggcaacttaatattaacggcgctctctatgtgggcggaatgaaggaaatcgccctgcacactaacaggcagtatatgcgagggctggttggatgcatcagccacttcaccttatccactgactatcatatcagtctggtcgaggacgccgtcgatggaaagaacatcaacacttgtggggcaaaatag

SEQ ID NO: 243287 - DNA, 3030 bp, Artificial Sequence
  derived and/or modified sequence
atggatctaatccgaggtgtccttctgagacttttgctgctcgcaagctctttgggccccggcgctgtgtctctgcgggccgccattaggaagcccggaaaagtgggtcccccgctggatatcaaactgggggcactcaactgcacagctttctctatccagtggaaaatgccaagacaccctgggagtccaattttggggtacacggtgttctatagtgaagttggcgccgataagagcctccaggaacaactccacagcgtgccactctctagagacattccgactaccgaggaagttatcggggatctgaaaccgggaactgagtatcgcgtgtccattgccgcatattcccaggctggtaagggcaggctctcctccccgcgacatgtgacaactctgtctcaggatagttgcctgcctcccgccgcacctcagcagcctcacgttattgttgtgagtgactcagaggtggccctgtcctggaagcctggagccagcgagggaagcgcgcctatacaatattactccgttgaatttattagacccgatttcgataaaaagtggacatcaatccacgagagaatccagatggattccatggtaatcaaggggctagaccctgatacaaactaccaattcgcagtgagagctatgaatagtcatggacccagccctagaagctggccctccgatatcattcgaactctttgtcccgaggaggcaggcagcgggaggtacgggccaagatacatcacagacatgggtgcgggtgaagacgatgaaggctttgaagatgatctggacctcgatattagctttgaggaggtcaagccactgccggcgactaaaggagggaataagaagtttttagtagagtccaagaagatgagcatctctaacccaaaaaccataagccggcttattcctccgacctccgcatctttacctgtaactaccgtggcccctcaaccaatccccatccaacgtaagggcaaaaatggcgtggcaataatgtctcgccttttcgatatgccatgtgacgaaactctttgctccgccgatagcttttgcgttaatgattatacgtggggcggatctcgctgtcagtgcacactggggaaagggggtgaatcatgttcagaggacatcgtgatacagtatccacagtttttcggacactcctacgtcaccttcgaacctcttaagaatagttatcaggcgtttcaaatcacactggagttccgagccgaagcggaggacggcctactgttgtactgcggggagaatgaacatggtcggggcgacttcatgagcctggcgattatccgcagaagcctccagttccgtttcaactgtggcaccggcgtagcaataattgtgagtgaaaccaaaatcaagctcgggggttggcacactgtgatgttgtatcgagacggactgaatggactgctgcaactaaataacggtacaccagtaaccggccagtcacaaggacagtacagcaagattacttttcggactcccctctacctcggtggcgccccctcggcatactggttggtgcgcgcaacggggacaaataggggattccaggggtgtgtgcagtcgctggccgtcaacggccgcaggattgacatgagaccttggccgctcggcaaagctctgagtggggccgatgttggcgaatgttccagcggcatttgtgacgaagcatcatgtattcatggaggtacttgcacggcgattaaggcagacagctatatatgtctctgccccttgggtttcaaaggcaggcattgtgaagacgcattcacactgacgattccccagttccgagaatcgctccgttcttatgcggctacaccatggcccctggagccacaacattacctctccttcatggaatttgagattacattcagacccgactctggggatggggtactgctatacagctacgacaccggctcaaaggattttctgtctataaacctcgccgggggacacgtagaattccggttcgactgtggaagcgggactggggtgctgagatctgaagatccactgactctagggaactggcatgagctccgcgttagtcgtaccgctaagaacgggattcttcaggtggacaaacaaaaaatcgtggagggaatggccgagggaggctttacccagatcaagtgtaatacagacatcttcataggcggagtgcccaactacgacgatgttaaaaaaaactcaggagtactgaagccattctcaggcagcatccagaaaatcatcctcaatgatcgtacgatccacgtgaaacacgattttacatcaggcgtgaacgtagagaatgctgcacacccatgtgtgcgggctccctgcgcccacggcggcagctgccgtcctagaaaagaggggtacgattgcgactgtccactcggattcgagggtctgcactgccagaaggcaatcatagaagccatcgaaatcccgcagttcatcggcagatcttaccttacttatgataatcctgatatcctcaagcgggtcagtggttctaggagtaacgtctttatgcgcttcaaaacgaccgcaaaagacggactcctactatggcgaggagactccccgatgagaccaaattccgatttcatctctctcggattgcgggacggtgcactggttttcagctataacctagggtcgggcgttgcatctatcatggtgaacggatcctttaatgacggcaggtggcacagagtgaaggctgtgcgcgatggacagtccggcaagattaccgtcgatgactatggagccagaacgggaaaatcacctggaatgatgaggcagctcaatatcaatggcgcattgtacgtaggcggaatgaaggaaattgcactccatactaatcgccagtatatgcggggactggtgggttgcatctcccactttactctttcaacagattaccatatatcgcttgtggaggacgcggtggacggcaaaaatattaacacctgcggcgccaagtag

SEQ ID NO: 243288 - DNA, 3030 bp, Artificial Sequence
  derived and/or modified sequence
atggatctgattaggggagtgttactgagactgctgcttctagcaagttccctgggtccaggggctgtctctcttagagctgcgattcgtaaaccgggtaaagttggacccccactcgacataaaacttggtgctctgaactgtaccgcctttagcattcagtggaaaatgcccagacacccaggctcccccatcctcggatacactgtgttttatagcgaagtcggcgctgacaaatccttacaggagcaactccacagcgttcccttaagtcgcgacatccccacgacggaggaggtgatcggggatctcaaaccaggaaccgaatatagagtatcaatcgccgcatactcccaggcaggcaagggtcggctgtcttctccacgtcatgtgaccactctatcccaggattcctgtcttccacctgcagccccacagcaaccacatgtcattgtggtgtctgacagcgaagttgcactgtcctggaagccaggggcatctgaaggatccgcacccattcagtattattcagtggagttcatccgtcctgatttcgacaaaaaatggacttcaatacacgaacgcatccaaatggatagtatggtgattaaagggctggatccagataccaattaccagttcgcagtccgagcaatgaattctcatggcccttccccacggagctggcccagtgatataatccgaacgctttgtccagaagaggctggcagtggaaggtacggacctagatatatcaccgacatgggagcaggggaagacgacgaaggatttgaagatgacctcgatttagacatttcattcgaagaagtgaaaccactacccgccacgaaagggggaaataaaaagtttttggtggagtccaagaagatgagtataagcaacccaaaaaccataagccggcttattcctccgacctccgcatctttacctgtaactaccgtggcccctcaaccaatccccatccaacgtaagggcaaaaatggcgtggcaataatgtctcgccttttcgatatgccatgtgacgaaactctttgctccgccgatagcttttgcgttaatgattatacgtggggcggatctcgctgtcagtgcacactggggaaagggggtgaatcatgttcagaggacatcgtgatacagtatccacagtttttcggacactcctacgtcaccttcgaacctctaaagaattcttaccaggcatttcaaatcactctcgagtttcgggccgaagccgaggacgggctgctgctgtattgcggggaaaatgagcatggccggggcgatttcatgtctctagccatcatacggcggagtttacaattcagattcaactgtggtacgggtgtcgccatcattgtcagcgagacaaaaatcaagttgggtggttggcatactgtcatgctttacagggatggacttaatggtcttttacaactcaataatggaaccccagtgacgggccagtcccagggacagtattcgaagataacattccgaacccctctgtacttgggaggggctccgtcagcttactggctagtgagagcgacaggtaccaacagggggtttcaaggctgcgttcagtccttggcagtgaatggccggaggatagacatgaggccatggcctctcggaaaggcgctgagtggagccgatgtgggagaatgttcatcaggaatttgtgacgaggcttcttgtatccacggcggaacatgtacggcaataaaggctgacagctacatatgtctatgtccactgggcttcaagggcaggcattgcgaagatgctttcaccctcactattcctcagtttcgtgaatcactgcgcagctatgctgccactccctggcctttggaaccacaacactacctgtctttcatggaattcgaaatcacctttcggcctgattccggtgacggcgtgctattatactcatatgataccggatctaaagacttcttgagtatcaatcttgctggaggacatgtcgaattccgcttcgattgcggctcaggcactggggtgttaaggagcgaagaccctctgacactgggcaactggcatgagctacgcgtgtctcggaccgcaaaaaacggtatcctgcaagtcgacaagcagaaaatcgttgaaggcatggcggagggaggcttcacacaaatcaagtgcaatacagatatatttataggcggagtgcccaattacgacgatgtcaagaaaaacagtggcgtcctgaaaccattctcagggtcaatccaaaagatcatcttaaacgaccgtaccatacatgtgaaacacgattttacttcaggagtgaatgttgaaaatgccgctcatccatgcgtgcgtgcgccctgtgcccatgggggatcttgtcggcctcgcaaggaaggatatgactgcgattgccctctgggattcgagggcctgcactgccagaaggcgatcatagaagctattgagattccccagtttattggtcgttcttatcttacatatgataatcccgacatcctgaaacgcgtttccgggtctagatctaacgtgtttatgaggtttaaaaccactgcaaaggatggtctattactgtggagaggggattcacctatgagaccaaatagtgattttatttctctgggactccgtgacggcgctttagtttttagctataatctcggttcgggcgttgcatctatcatggtgaacggatcctttaatgacggcaggtggcacagagtgaaggctgtgcgcgatggacagtccggcaagattaccgtcgatgactatggagccagaacgggaaaatcacctggaatgatgaggcagctcaatatcaatggcgcattgtacgtaggcggaatgaaggaaattgcactccatactaatcgccagtatatgcggggactggtgggttgcatctcccactttactctttcaacagattaccatatatcgcttgtggaggacgcggtggacggcaaaaacatcaatacttgcggcgctaaatag

SEQ ID NO: 243289 - DNA, 3030 bp, Artificial Sequence
  derived and/or modified sequence
atggacctgatcagaggcgtgctgctgagactgctgctgctggccagcagcctgggccccggcgccgtgagcctgagagccgccatcagaaagcccggcaaggtgggcccccccctggacatcaagctgggcgccctgaactgcaccgccttcagcatccagtggaagatgcccagacaccccggcagccccatcctgggctacaccgtgttctacagcgaggtgggcgccgacaagagcctgcaggagcagctgcacagcgtgcccctgagcagagacatccccaccaccgaggaggtgatcggcgacctgaagcccggcaccgagtacagagtgagcatcgccgcctacagccaggccggcaagggcagactgagcagccccagacacgtgaccaccctgagccaggacagctgcctgccccccgccgccccccagcagccccacgtgatcgtggtgagcgacagcgaggtggccctgagctggaagcccggcgccagcgagggcagcgcccccatccagtactacagcgtggagttcatcagacccgacttcgacaagaagtggaccagcatccacgagagaatccagatggacagcatggtgatcaagggcctggaccccgacaccaactaccagttcgccgtgagagccatgaacagccacggccccagccccagaagctggcccagcgacatcatcagaaccctgtgccccgaggaggccggcagcggcagatacggccccagatacatcaccgacatgggcgccggcgaggacgacgagggcttcgaggacgacctggacctggacatcagcttcgaggaggtgaagcccctgcccgccaccaagggcggcaacaagaagttcctggtggagagcaagaagatgagcatcagcaaccccaagaccatcagcagactgatcccccccaccagcgccagcctgcccgtgaccaccgtggccccccagcccatccccatccagagaaagggcaagaacggcgtggccatcatgagcagactgttcgacatgccctgcgacgagaccctgtgcagcgccgacagcttctgcgtgaacgactacacctggggcggcagcagatgccagtgcaccctgggcaagggcggcgagagctgcagcgaggacatcgtgatccagtacccccagttcttcggccacagctacgtgaccttcgagcccctgaagaacagctaccaggccttccagatcaccctggagttcagagccgaggccgaggacggcctgctgctgtactgcggcgagaacgagcacggcagaggcgacttcatgagcctggccatcatcagaagaagcctgcagttcagattcaactgcggcaccggcgtggccatcatcgtgagcgagaccaagatcaagctgggcggctggcacaccgtgatgctgtacagagacggcctgaacggcctgctgcagctgaacaacggcacccccgtgaccggccagagccagggccagtacagcaagatcaccttcagaacccccctgtacctgggcggcgcccccagcgcctactggctggtgagagccaccggcaccaacagaggcttccagggctgcgtgcagagcctggccgtgaacggcagaagaatcgacatgagaccctggcccctgggcaaggccctgagcggcgccgacgtgggcgagtgcagcagcggcatctgcgacgaggccagctgcatccacggcggcacctgcaccgccatcaaggccgacagctacatctgcctgtgccccctgggcttcaagggcagacactgcgaggacgccttcaccctgaccatcccccagttcagagagagcctgagaagctacgccgccaccccctggcccctggagccccagcactacctgagcttcatggagttcgagatcaccttcagacccgacagcggcgacggcgtgctgctgtacagctacgacaccggcagcaaggacttcctgagcatcaacctggccggcggccacgtggagttcagattcgactgcggcagcggcaccggcgtgctgagaagcgaggaccccctgaccctgggcaactggcacgagctgagagtgagcagaaccgccaagaacggcatcctgcaggtggacaagcagaagatcgtggagggcatggccgagggcggcttcacccagatcaagtgcaacaccgacatcttcatcggcggcgtgcccaactacgacgacgtgaagaagaacagcggcgtgctgaagcccttcagcggcagcatccagaagatcatcctgaacgacagaaccatccacgtgaagcacgacttcaccagcggcgtgaacgtggagaacgccgcccacccctgcgtgagagccccctgcgcccacggcggcagctgcagacccagaaaggagggctacgactgcgactgccccctgggcttcgagggcctgcactgccagaaggccatcatcgaggccatcgagatcccccagttcatcggcagaagctacctgacctacgacaaccccgacatcctgaagagagtgagcggcagcagaagcaacgtgttcatgagattcaagaccaccgccaaggacggcctgctgctgtggagaggcgacagccccatgagacccaacagcgacttcatcagcctgggcctgagagacggcgccctggtgttcagctacaacctgggcagcggcgtggccagcatcatggtgaacggcagcttcaacgacggcagatggcacagagtgaaggccgtgagagacggccagagcggcaagatcaccgtggacgactacggcgccagaaccggcaagagccccggcatgatgagacagctgaacatcaacggcgccctgtacgtgggcggcatgaaggagatcgccctgcacaccaacagacagtacatgagaggcctggtgggctgcatcagccacttcaccctgagcaccgactaccacatcagcctggtggaggacgccgtggacggcaagaacatcaacacctgcggcgccaagtag

SEQ ID NO: 243290 - DNA, 4411 bp, Artificial Sequence
  derived and/or modified sequence
agggcctgtccctctcacttccactcgattgtaatttcatccccgggccggtcgagcctccctccctcccgcggccagcccttccctcccagtcggcctccttcgtcgcccccgcccccgcgaaaagccctgcagcttgcagccggcttcactcgcgcacgccgacctcccggctgcagtcctacctcttggaactacccgtgtttccgggcccagccctcgcagccccccacctcctcgccccggcccggggatccgttggggccgcgtcccccacgcgcccccggagacgccctttccgtgtgcgcccgggacttggtgaaactttgcaggcgccggctgcgaaatggatttaatccgaggcgtcttgctccggctcctgctcctggcttccagcctcggacccggcgcggtgtcgctccgagcggccatccgaaaaccaggcaaggtagggcctcctcttgacatcaagctgggcgcattgaactgtacggctttcagcatccagtggaaaatgccaaggcatcctggaagtcccatccttgggtacactgtcttttactctgaggttggcgcagataaatccctgcaggagcagttgcacagcgtgcctctcagccgggacatcccgaccacggaggaagtgattggagatttgaaaccaggcactgaatatcgtgtgagcatagcagcttacagccaggctggcaaagggcggctgagctctcctcggcatgtcaccactttgtcccaagattcctgcctgcctcctgcagctccccagcagccacatgtcattgtggtttcggattctgaggtggccctgtcttggaaacctggagcgagtgaaggaagcgcccctattcagtactattctgtggaattcatcaggccagatttcgacaagaagtggacctcaatccatgagcggatccagatggactccatggttatcaagggcctcgatccagataccaactaccagtttgccgtgagggcaatgaattcccatggccccagcccccgcagctggcccagtgacatcatccggaccctctgccctgaggaggcgggaagtggccgctatggaccccgttatatcaccgacatgggagctggtgaggatgatgaaggatttgaagacgacttagatttggatatttcctttgaggaggttaaaccacttcctgctaccaaaggagggaataagaaatttttggtggaaagcaagaagatgtctatatctaacccaaagaccatttctaggctcatcccccctacctcagcatctctccctgtgaccacggtggctccccagcccattcccatacagagaaaggggaagaatggtgtggccataatgtcaaggctctttgacatgccttgtgatgaaactctctgctctgctgacagcttctgtgtcaatgactacacctgggggggctcgcgatgccagtgcaccctgggcaaaggtggtgagagctgctcagaagatattgttatccagtatcctcagttctttggccactcctatgtaacgtttgaacctctgaagaattcttatcaggcatttcaaattactcttgaatttagggcggaggcagaggatggcttactgctctactgtggggagaacgaacacgggaggggggatttcatgtccctggctatcatccgacgctccctgcagttcaggtttaattgtggaactggggttgccatcatcgtaagtgagaccaaaatcaaactagggggttggcacacggttatgctctacagagatgggctgaacgggctgctgcagctgaacaatggcaccccagtgacaggccagtctcagggccaatacagtaaaattactttccggacacctctctatcttggtggcgctcccagcgcttactggttggttagagcaacagggacaaaccgaggctttcaaggctgtgtgcagtcgctcgctgtgaatgggaggagaattgacatgaggccctggcccctgggaaaagcactcagtggggctgatgtgggggaatgcagcagtggaatctgtgatgaggcctcgtgcatccatggtggcacctgcacagcaatcaaagccgactcctacatttgcctctgtccccttgggtttaaaggtcgacactgtgaagatgctttcaccttgaccattcctcagttcagagagtctctgagatcttacgctgcaactccctggccactggagccccagcattacctttccttcatggaatttgagatcacatttcggccagactcaggagatggtgtcctcctgtacagctatgacacaggcagcaaagacttcctgtccatcaacttggcagggggccacgtggagttccgctttgactgtggctctgggaccggtgtcctcaggagtgaagatcccctcaccctgggcaactggcacgagcttcgtgtatctcgcacagcaaagaatggaatcttacaggtggataagcagaagatagtggagggaatggcagagggaggcttcacacagattaagtgcaacacagacattttcattggcggagtccccaattatgatgatgtgaagaagaactcgggtgtcctgaagcctttcagcgggagcatccagaagatcatcctgaatgaccgaaccatccatgtgaagcatgacttcacctccggagtgaatgtggagaatgcggcccacccctgtgtgagagccccttgtgcccatgggggcagctgccggcccaggaaggagggctatgactgtgactgccccttgggctttgaggggcttcactgccagaaagcgatcatagaagccattgagatcccgcagtttatcggccgcagttacctgacgtatgacaacccagatatcttgaagagggtgtcaggatcaagatcaaatgtgttcatgaggtttaaaacaactgccaaggatggccttttgctgtggaggggagacagccccatgagacccaacagcgacttcatttccttgggccttcgggatggagccctcgtgttcagctataacctgggcagtggtgtggcatccatcatggtgaatggctccttcaacgatggtcggtggcaccgagttaaggccgttagggatggccagtcaggaaagataaccgtggatgactatggagccagaacaggcaaatccccaggcatgatgcggcagcttaacatcaatggagctctgtatgtgggtggaatgaaggaaattgctctgcacactaacaggcaatatatgagagggctcgtgggctgtatctctcacttcaccctgtccaccgattaccacatttccctcgtggaagatgccgtggatgggaaaaacatcaacacttgtggagccaagtaacaccagctggccttgtccaagggacagagccttctattctgagaatcccaggggccctcagaccctgcctgatgctatatgcagaggcccagggaccaggtgtgtttcctctcaccaagaagaaagtacacactgatgagaaactgagaaccaagacaggcatccctgggtggcctttcctgctgacactccacgagctgacccagcagaattctctgtgtaggaagcatcggactttgtccattgaatatgtagcggctgccagagatcacacatcaatgcaaattccagagcctgtctgctatagctcagtgactgtgttgtgattcatagtacattaaaaagagagagagagagaaagaatcccacagggcactattaaaatacttctctccttccctgactcatgacactcttcctgacagcagaatgactgtgtgaccttgaacttcacatttcccacattggcccttggattgttcggattaaccccttccactcctcactggctggttcactgtgttctgactagtccataaaaataaagatggaaggagatcaaacacagaatcataatcataatgcggcccccttccccagagcttacctcgaatgtgaaatccctacttcttataatgcagagttaaggagctgagcccccatgattttgtagctgtacttttgtatgtgtatatttttatagctgcagattgtccacacagtatacttttggaagtttgggtggatgactctgaattcttgcacacctttcctaaaaatttctcccaagagagacttgtttgggccttttgtggtgtcagtggaatggataggtaacttgggtgggcaacttggggagctgaccattctcttttggtaaatgttgacggctcaagaggatgaatatgaagctttccaagataagcagattaaaaggaacatgtgttaccgaggtaggtcactgtcatttttgttttaagagttggggggagtatctatagtaaacttgaataaaggggacaaagctagaactta

SEQ ID NO: 243291 - DNA, 3030 bp, Artificial Sequence
  derived and/or modified sequence
atggatctaattaggggagttctgcttcgattgttgctcctggcctcttctctaggcccgggagcggtgagcctgcgggccgctattagaaagcccgggaaggtaggacctcccctcgacataaaacttggtgcccttaattgtaccgcatttagcatccagtggaagatgccccggcatcctggcagcccaattctaggctatactgtcttctacagtgaagtaggggcagataagtccctgcaggaacagttgcactctgtccccctgtcaagagacattccgaccactgaggaagtgatcggggatcttaaacccggcacagagtacagagtgagtatcgcagcttactcgcaagcagggaaggggcgtctgtcatcaccacggcatgttaccaccttgtcacaggactcctgccttcccccagccgcccctcagcagccccacgtgatcgtggtgtctgacagcgaggtggcattatcctggaagcccggcgccagtgagggttccgcgcccattcagtactactccgtggagtttatccgcccggatttcgacaagaaatggacatccatacatgaaaggattcagatggacagcatggtgatcaaagggctggaccccgacacaaattaccaatttgcggttagggctatgaactctcatgggccgtctccacggtcctggccaagcgacatcatccgaaccctttgtcccgaagaggcaggctccggccgttacggtccccgctacatcaccgatatgggagccggagaggatgatgagggttttgaggacgatctggaccttgacattagcttcgaggaggtgaagcccctacccgcaactaaggggggtaacaaaaagttcctggtggagagcaaaaaaatgagcatcagcaaccccaagacaatctctagacttattccacccacctcagcctctttgcccgtgaccactgttgccccacagccaatccccatccagcggaaaggcaagaacggggtcgcaatcatgagcaggttattcgatatgccatgtgacgaaactctgtgtagcgcagacagcttttgcgtgaatgactatacctggggcggatcgcgttgtcagtgcacccttgggaaaggcggcgaaagttgctccgaggacattgttatccagtatccccaatttttcggacattcctacgttactttcgagcctctaaagaattcctaccaagcttttcagataacactagagtttcgtgccgaagctgaagatggcctgttactctattgcggggaaaacgaacatggccggggggattttatgtccctggccatcatacgtaggtctctgcagtttagattcaactgtggaaccggtgtagccattatagtttcagagacaaagatcaaattgggcgggtggcacacagtcatgctgtatcgggatggcctgaatggcctgcttcagctgaataacggaaccccagtaactggacagtcccaggggcagtacagcaagataacatttcgcacaccactatatctgggaggagctccctctgcctactggctcgtacgggccactgggaccaaccgaggctttcaaggatgtgtgcagtcattggcagtgaatggtagacgaatcgacatgaggccctggccattgggaaaggccctgagcggagcagacgtgggggagtgctcgtcgggtatctgcgacgaggcctcctgcatccacggcggtacctgcaccgcaattaaggcggattcctatatctgcctgtgtcctcttggatttaaaggcaggcattgcgaggatgctttcaccctgactattccgcagttccgagagagtctgaggtcctacgcagcgacgccatggcccctggaaccacagcattatttgagttttatggaatttgaaattaccttccgtcctgattctggcgatggcgtactcctgtattcgtatgatacaggcagcaaagactttttatctatcaacttggccggaggacatgtagaatttcggtttgattgtggaagcggcaccggggtgttgagaagtgaggacccactaacactgggcaattggcacgagctgagggtatcccgcactgccaaaaatggcattctgcaggtggacaaacagaagattgtcgaaggcatggctgagggcggtttcacacagattaagtgcaacactgacattttcatcggcggggtacccaattacgatgatgtgaagaaaaattccggggttctcaaaccattctccgggtctatccagaagatcatccttaacgacaggacaatacacgtcaagcatgactttacgagtggagtgaacgtcgagaatgccgcgcacccatgcgtgcgggcaccctgcgcacatggcggttcatgtcgacccaggaaagaagggtatgactgcgactgccctctcggcttcgagggtctgcactgccagaaggcaatcatagaggccattgaaatcccgcaattcatcggccgtagctatctcacttacgacaaccccgacatactcaagagagtcagtggctctcggagcaacgtcttcatgagattcaaaaccaccgcaaaggatggtctgcttctgtggagaggagattcacctatgaggcccaattctgacttcatctcactggggctccgagacggggcactggtttttagctataacctgggatctggcgttgcttctatcatggtgaacggatcgtttaacgacggtcggtggcacagggtcaaagccgtaagagacggtcagagtggaaaaattacagttgacgactacggcgctaggaccggaaagtctcctgggatgatgaggcagcttaacatcaacggcgcgctgtacgtggggggaatgaaagagatcgcactgcatacaaaccgccagtatatgcgggggttggttggctgcatttcccattttaccctctcaaccgattatcacatcagcctcgtagaagatgcagtggatggtaagaacatcaatacctgtggcgccaagtag

SEQ ID NO: 243292 - DNA, 3030 bp, Artificial Sequence
  derived and/or modified sequence
atggacctgatccggggcgtgctgctgcggctgctgctgctggccagcagcctgggccctggagctgtgtccctgcgggccgccatcaggaagccaggcaaggtgggcccccccctggacatcaagctgggcgccctgaactgcacagccttcagcatccagtggaagatgcccaggcaccctggcagccccatcctgggctacacagtgttctacagcgaggtgggcgctgacaagagcctgcaggagcagctgcacagcgtgcccctgagccgggacatccccaccacagaggaggtgattggagacctgaagccaggcacagagtacagagtgtccattgctgcctacagccaggccggcaagggccgcctgagcagccccaggcatgtgaccaccctgagccaggacagctgcctgcccccagctgccccccagcagccccacgtgattgtggtgtctgacagcgaggtggccctgtcctggaagccaggggccagcgagggcagcgcccccatccagtactacagcgtggagttcatccggccagactttgacaagaagtggaccagcatccacgagcgcatccagatggacagcatggtgatcaagggcctggaccctgacaccaactaccagtttgctgtgcgggccatgaacagccacggccccagccccaggtcctggcccagcgacatcatccgcaccctgtgcccagaggaggccggcagcggccgctatggcccccgctacatcacagacatgggcgctggagaagatgatgagggctttgaagatgacctggacctggacatcagctttgaggaggtgaagcccctgcctgccaccaagggcggcaacaagaagttcctggtggagagcaagaagatgagcatcagcaaccccaagaccatcagccgcctcatcccccccaccagcgccagcctgcctgtgaccaccgtggccccccagcccatccccatccagaggaagggcaagaatggagtggccatcatgagccggctgtttgacatgccctgtgatgagaccctgtgcagcgctgacagcttctgtgtgaatgactacacctggggcggcagccgctgccagtgcaccctgggcaaaggaggagagagctgcagcgaggacatcgtcatccagtacccccagttcttcggccacagctatgtgacctttgagcccctgaagaacagctaccaggccttccagatcaccctggagttccgggcagaggccgaggatggcctgctgctgtactgtggagaaaatgagcacggccgcggggacttcatgagcctggccatcatccgccgcagcctgcagttccgcttcaactgtggcactggagtggccatcatcgtgtctgagaccaagatcaagctgggcggctggcacacagtgatgctgtacagagatggcctgaatggcctgctgcagctgaacaacggcacccctgtgacaggccagagccagggccagtacagcaagatcaccttccgcacccccctgtacctgggcggggcccccagcgcctactggctggtgcgggccaccggcaccaacagaggcttccagggctgtgtgcagagcctggccgtgaatggaagaagaattgacatgaggccctggcccctgggcaaggccctgtctggagcagatgtgggagaatgtagcagcggcatctgtgatgaggccagctgcatccacggcggcacctgcacagccatcaaggctgacagctacatctgcctgtgccccctgggcttcaagggccgccactgtgaagatgccttcaccctgaccatcccccagttccgggagagcctgcggagctatgctgccaccccctggcccctggagccccagcactacctgtccttcatggagtttgagatcaccttccggccagattctggagatggagtgctgctgtacagctatgacaccggcagcaaggacttcctgagcatcaacctggccggcggccacgtggagttccgctttgactgtggcagcggcactggagtgctgcggtctgaggaccccctgaccctgggcaactggcatgagctgcgggtgtccaggacagccaagaatggcatcctgcaggtggacaagcagaagatcgtggagggcatggccgagggcggcttcacccagatcaagtgcaacacagacatcttcatcggcggcgtgcccaactatgatgatgtgaagaagaacagcggcgtgctgaagcccttcagcggcagcatccagaagatcatcctgaatgacaggaccatccacgtgaagcatgacttcaccagcggcgtgaatgtggagaatgctgcccacccctgtgtgcgggccccctgtgcccatggaggcagctgccggcccaggaaggagggctatgactgtgactgccccctgggctttgagggcctgcactgccagaaggccatcatcgaggccatcgagatcccccagttcatcggccgcagctacctgacctatgacaacccagacatcctgaagagggtgtctggcagccgcagcaatgtgttcatgaggttcaagaccacagccaaggatggcctgctgctgtggaggggggacagccccatgaggcccaacagcgacttcatcagcctgggcctgagagatggagccctggtgttctcctacaacctgggcagcggcgtggccagcatcatggtgaatggcagcttcaatgatggccgctggcaccgggtgaaggctgtgagagatggccagagcggcaagatcaccgtggatgattatggagccaggacaggcaagagccctggcatgatgaggcagctgaacatcaatggagccctgtatgtgggcggcatgaaggagatcgccctgcacaccaaccggcagtacatgaggggcctggtgggctgcatcagccacttcaccctgagcacagactaccacatcagcctggtggaggatgctgtggatggcaagaacatcaacacctgtggggccaagtag

SEQ ID NO: 243293 - DNA, 3030 bp, Artificial Sequence
  derived and/or modified sequence
atggacctgatccggggcgtgctgctgcggctgctgctgctggccagtagcttagggcctggggctgtaagcctcagggccgctattaggaaaccaggcaaagtgggcccgccgctggatataaagctcggcgccctgaattgcaccgcgttctctatccaatggaaaatgcctaggcacccaggcagccccatcttgggatatacagtgttttactccgaagtgggagctgacaagtctctgcaggaacagctccattccgttcctctttcccgtgatatcccaaccaccgaagaggtgatcggcgacctgaagcccggcactgagtaccgagtctcaatagccgcctactctcaagctggcaagggaaggctgagttcccctaggcacgtcaccacgttatcccaggatagctgcctccccccagccgcacctcagcagcctcacgttatcgtagtgagtgattcggaagtcgcactttcctggaagccaggggcgtctgaggggagcgcacccatccagtactactcggtcgaattcatccgtcctgattttgataagaaatggacgtcaatccatgagcgcatccagatggacagcatggtgataaagggacttgaccccgacaccaattaccagttcgctgtcagggccatgaatagccacgggccatcgccccgttcctggccatccgatatcatcagaactctctgcccagaggaggctggctccggaaggtacggacctcgttatattaccgatatgggtgccggcgaggatgatgagggcttcgaggatgacctcgatttagatatttctttcgaggaagtgaaaccccttccagccaccaaaggtggtaacaagaagttcctcgtggaatcaaaaaaaatgagtatctctaacccaaaaaccataagtcgtctgatcccccccacaagcgccagccttcccgtgactaccgttgccccccagcccattcctatacagaggaaaggaaagaacggagtggcaattatgtctcggcttttcgacatgccttgcgacgagaccctttgtagcgctgatagcttctgcgtcaatgattacacatggggaggatcccggtgccaatgcacgttgggaaaagggggagaatcctgttctgaggatatcgtaattcagtacccgcagttctttgggcattcttatgtgacctttgaacctttaaaaaatagttatcaggcattccagatcactttggagttccgagctgaagcagaggacggtttactcttatactgtggagagaatgagcacggaaggggcgactttatgagcttggctataattaggagaagcctccagtttcggtttaattgcgggaccggggtggctattattgtttcagaaacaaagattaaattgggcgggtggcacaccgtgatgctgtacagagatggtctgaatgggctgcttcagttgaataacggaaccccggttactggccagtcccagggccagtactctaagattacattcagaacaccgctgtaccttggcggcgccccctccgcatactggctggtgcgtgctaccggcaccaatcggggatttcaagggtgcgtacagtcccttgccgtgaatggccgaagaatagatatgcgtccatggcctttgggaaaagccttatctggggctgatgtgggggagtgctctagcggaatttgtgacgaagcgtcatgcattcacggcggcacttgtaccgccattaaggcagatagctacatatgcctgtgcccccttggattcaaaggacggcactgcgaggatgcctttactctgactataccccagtttcgtgagagcttgagaagttacgctgccactccgtggcccctcgagccacagcattatctaagcttcatggagtttgaaatcacctttaggccagacagcggggatggggtattattatatagctatgacaccggctctaaggactttctatccattaatttagctggcggtcacgtagagtttcgcttcgattgcggtagtgggaccggggtgcttcgctccgaggatcccctgaccctcggaaattggcatgagctgcgggtgtctagaacagctaagaatggtatactacaagttgacaagcagaagattgtcgagggcatggccgaagggggattcacccagatcaagtgtaacacagatatatttattggcggagtgcctaactacgacgacgtaaaaaaaaattctggcgtcctcaaacctttttctgggagcattcagaaaatcattcttaacgataggacgattcatgtcaagcacgatttcactagcggggttaatgtggaaaatgctgcacatccatgcgttcgggctccctgcgcgcatgggggctcgtgcaggcctaggaaggaaggctatgactgcgactgcccactcggcttcgaaggcctccactgccagaaggccatcattgaggccatcgagatcccacagtttattggacgaagttatctgacatatgacaacccggatatactgaaacgtgtgagcgggagtagatctaacgtgttcatgagattcaagaccactgctaaggacgggctgttgctctggcgcggcgactcccctatgaggccaaactctgacttcatctcccttggtctgcgggacggtgctctggtgttcagctacaacctaggctcaggcgtggccagcataatggtaaacggaagcttcaacgatggtagatggcaccgggtgaaagctgttcgagacggccagtcagggaaaatcacagtggacgactatggggctcgaactggaaagtcccctggcatgatgaggcagctgaatatcaacggggcactctatgtcggaggcatgaaggagatcgcgctccacacgaataggcagtatatgcggggcctggtgggctgcatcagtcactttacactcagtaccgactaccatatatccctggtggaggacgctgtggatgggaagaatattaacacctgcggagcaaagtag

SEQ ID NO: 243294 - RNA, 3030 nt, Artificial Sequence
  derived and/or modified sequence
auggaucuaauccgagguguccuucugagacuuuugcugcucgcaagcucuuugggccccggcgcugugucucugcgggccgccauuaggaagcccggaaaagugggucccccgcuggauaucaaacugggggcacucaacugcacagcuuucucuauccaguggaaaaugccaagacacccugggaguccaauuuugggguacacgguguucuauagugaaguuggcgccgauaagagccuccaggaacaacuccacagcgugccacucucuagagacauuccgacuaccgaggaaguuaucggggaucugaaaccgggaacugaguaucgcguguccauugccgcauauucccaggcugguaagggcaggcucuccuccccgcgacaugugacaacucugucucaggauaguugccugccucccgccgcaccucagcagccucacguuauuguugugagugacucagagguggcccuguccuggaagccuggagccagcgagggaagcgcgccuauacaauauuacuccguugaauuuauuagacccgauuucgauaaaaaguggacaucaauccacgagagaauccagauggauuccaugguaaucaaggggcuagacccugauacaaacuaccaauucgcagugagagcuaugaauagucauggacccagcccuagaagcuggcccuccgauaucauucgaacucuuugucccgaggaggcaggcagcgggagguacgggccaagauacaucacagacaugggugcgggugaagacgaugaaggcuuugaagaugaucuggaccucgauauuagcuuugaggaggucaagccacugccggcgacuaaaggagggaauaagaaguuuuuaguagaguccaagaagaugagcaucucuaacccaaaaaccauaagccggcuuauuccuccgaccuccgcaucuuuaccuguaacuaccguggccccucaaccaauccccauccaacguaagggcaaaaauggcguggcaauaaugucucgccuuuucgauaugccaugugacgaaacucuuugcuccgccgauagcuuuugcguuaaugauuauacguggggcggaucucgcugucagugcacacuggggaaagggggugaaucauguucagaggacaucgugauacaguauccacaguuuuucggacacuccuacgucaccuucgaaccucuuaagaauaguuaucaggcguuucaaaucacacuggaguuccgagccgaagcggaggacggccuacuguuguacugcggggagaaugaacauggucggggcgacuucaugagccuggcgauuauccgcagaagccuccaguuccguuucaacuguggcaccggcguagcaauaauugugagugaaaccaaaaucaagcucggggguuggcacacugugauguuguaucgagacggacugaauggacugcugcaacuaaauaacgguacaccaguaaccggccagucacaaggacaguacagcaagauuacuuuucggacuccccucuaccucgguggcgcccccucggcauacugguuggugcgcgcaacggggacaaauaggggauuccaggggugugugcagucgcuggccgucaacggccgcaggauugacaugagaccuuggccgcucggcaaagcucugaguggggccgauguuggcgaauguuccagcggcauuugugacgaagcaucauguauucauggagguacuugcacggcgauuaaggcagacagcuauauaugucucugccccuuggguuucaaaggcaggcauugugaagacgcauucacacugacgauuccccaguuccgagaaucgcuccguucuuaugcggcuacaccauggccccuggagccacaacauuaccucuccuucauggaauuugagauuacauucagacccgacucuggggaugggguacugcuauacagcuacgacaccggcucaaaggauuuucugucuauaaaccucgccgggggacacguagaauuccgguucgacuguggaagcgggacuggggugcugagaucugaagauccacugacucuagggaacuggcaugagcuccgcguuagucguaccgcuaagaacgggauucuucagguggacaaacaaaaaaucguggagggaauggccgagggaggcuuuacccagaucaaguguaauacagacaucuucauaggcggagugcccaacuacgacgauguuaaaaaaaacucaggaguacugaagccauucucaggcagcauccagaaaaucauccucaaugaucguacgauccacgugaaacacgauuuuacaucaggcgugaacguagagaaugcugcacacccaugugugcgggcucccugcgcccacggcggcagcugccguccuagaaaagagggguacgauugcgacuguccacucggauucgagggucugcacugccagaaggcaaucauagaagccaucgaaaucccgcaguucaucggcagaucuuaccuuacuuaugauaauccugauauccucaagcgggucagugguucuaggaguaacgucuuuaugcgcuucaaaacgaccgcaaaagacggacuccuacuauggcgaggagacuccccgaugagaccaaauuccgauuucaucucucucggauugcgggacggugcacugguuuucagcuauaaccuagggucgggcguugcaucuaucauggugaacggauccuuuaaugacggcagguggcacagagugaaggcugugcgcgauggacaguccggcaagauuaccgucgaugacuauggagccagaacgggaaaaucaccuggaaugaugaggcagcucaauaucaauggcgcauuguacguaggcggaaugaaggaaauugcacuccauacuaaucgccaguauaugcggggacugguggguugcaucucccacuuuacucuuucaacagauuaccauauaucgcuuguggaggacgcgguggacggcaaaaauauuaacaccugcggcgccaaguag

SEQ ID NO: 243295 - RNA, 3030 nt, Artificial Sequence
  derived and/or modified sequence
auggaucugauuaggggaguguuacugagacugcugcuucuagcaaguucccuggguccaggggcugucucucuuagagcugcgauucguaaaccggguaaaguuggacccccacucgacauaaaacuuggugcucugaacuguaccgccuuuagcauucaguggaaaaugcccagacacccaggcucccccauccucggauacacuguguuuuauagcgaagucggcgcugacaaauccuuacaggagcaacuccacagcguucccuuaagucgcgacauccccacgacggaggaggugaucggggaucucaaaccaggaaccgaauauagaguaucaaucgccgcauacucccaggcaggcaagggucggcugucuucuccacgucaugugaccacucuaucccaggauuccugucuuccaccugcagccccacagcaaccacaugucauuguggugucugacagcgaaguugcacuguccuggaagccaggggcaucugaaggauccgcacccauucaguauuauucaguggaguucauccguccugauuucgacaaaaaauggacuucaauacacgaacgcauccaaauggauaguauggugauuaaagggcuggauccagauaccaauuaccaguucgcaguccgagcaaugaauucucauggcccuuccccacggagcuggcccagugauauaauccgaacgcuuuguccagaagaggcuggcaguggaagguacggaccuagauauaucaccgacaugggagcaggggaagacgacgaaggauuugaagaugaccucgauuuagacauuucauucgaagaagugaaaccacuacccgccacgaaagggggaaauaaaaaguuuuugguggaguccaagaagaugaguauaagcaacccaaaaaccauaagccggcuuauuccuccgaccuccgcaucuuuaccuguaacuaccguggccccucaaccaauccccauccaacguaagggcaaaaauggcguggcaauaaugucucgccuuuucgauaugccaugugacgaaacucuuugcuccgccgauagcuuuugcguuaaugauuauacguggggcggaucucgcugucagugcacacuggggaaagggggugaaucauguucagaggacaucgugauacaguauccacaguuuuucggacacuccuacgucaccuucgaaccucuaaagaauucuuaccaggcauuucaaaucacucucgaguuucgggccgaagccgaggacgggcugcugcuguauugcggggaaaaugagcauggccggggcgauuucaugucucuagccaucauacggcggaguuuacaauucagauucaacugugguacgggugucgccaucauugucagcgagacaaaaaucaaguugggugguuggcauacugucaugcuuuacagggauggacuuaauggucuuuuacaacucaauaauggaaccccagugacgggccagucccagggacaguauucgaagauaacauuccgaaccccucuguacuugggaggggcuccgucagcuuacuggcuagugagagcgacagguaccaacaggggguuucaaggcugcguucaguccuuggcagugaauggccggaggauagacaugaggccauggccucucggaaaggcgcugaguggagccgaugugggagaauguucaucaggaauuugugacgaggcuucuuguauccacggcggaacauguacggcaauaaaggcugacagcuacauaugucuauguccacugggcuucaagggcaggcauugcgaagaugcuuucacccucacuauuccucaguuucgugaaucacugcgcagcuaugcugccacucccuggccuuuggaaccacaacacuaccugucuuucauggaauucgaaaucaccuuucggccugauuccggugacggcgugcuauuauacucauaugauaccggaucuaaagacuucuugaguaucaaucuugcuggaggacaugucgaauuccgcuucgauugcggcucaggcacugggguguuaaggagcgaagacccucugacacugggcaacuggcaugagcuacgcgugucucggaccgcaaaaaacgguauccugcaagucgacaagcagaaaaucguugaaggcauggcggagggaggcuucacacaaaucaagugcaauacagauauauuuauaggcggagugcccaauuacgacgaugucaagaaaaacaguggcguccugaaaccauucucagggucaauccaaaagaucaucuuaaacgaccguaccauacaugugaaacacgauuuuacuucaggagugaauguugaaaaugccgcucauccaugcgugcgugcgcccugugcccaugggggaucuugucggccucgcaaggaaggauaugacugcgauugcccucugggauucgagggccugcacugccagaaggcgaucauagaagcuauugagauuccccaguuuauuggucguucuuaucuuacauaugauaaucccgacauccugaaacgcguuuccgggucuagaucuaacguguuuaugagguuuaaaaccacugcaaaggauggucuauuacuguggagaggggauucaccuaugagaccaaauagugauuuuauuucucugggacuccgugacggcgcuuuaguuuuuagcuauaaucucgguucgggcguugcaucuaucauggugaacggauccuuuaaugacggcagguggcacagagugaaggcugugcgcgauggacaguccggcaagauuaccgucgaugacuauggagccagaacgggaaaaucaccuggaaugaugaggcagcucaauaucaauggcgcauuguacguaggcggaaugaaggaaauugcacuccauacuaaucgccaguauaugcggggacugguggguugcaucucccacuuuacucuuucaacagauuaccauauaucgcuuguggaggacgcgguggacggcaaaaacaucaauacuugcggcgcuaaauag

SEQ ID NO: 243296 - protein, 977 aa, Artificial Sequence
  derived and/or modified sequence
MSFALEETLESDWVAVRPHVFDEREKHKFVFIVAWNEIEGKFAITCHNRTAQRQRSGSREQAGARGGAEAGGAASDGSRGPGSPAGRGRPEATASATLVRSPGPRRSSAWAEGGSPRSTRSLLGDPRLRSPGSKGAESRLRSPVRAKPIPGQKTSEADDAAGAAAAAARPAPREAQVSSVRIVSASGTVSEEIEVLEMVKEDEAPLALSDAEQPPPATELESPAEECSWAGLFSFQDLRAVHQQLCSVNSQLEPCLPVFPEEPSGMWTVLFGGAPEMTEQEIDTLCYQLQVYLGHGLDTCGWKILSQVLFTETDDPEEYYESLSELRQKGYEEVLQRARKRIQELLDKHKNTESMVELLDLYQMEDEAYSSLAEATTELYQYLLQPFRDMRELAMLRRQQIKISMENDYLGPRRIESLQKEDADWQRKAHMAVLSIQDLTVKYFEITAKAQKAVYDRMRADQKKFGKASWAAAAERMEKLQYAVSKETLQMMRAKEICLEQRKHALKEEMQSLRGGTEAIARLDQLEADYYDLQLQLYEVQFEILKCEELLLTAQLESIKRLISEKRDEVVYYDTYESMEAMLEKEEMAASAYLQREELQKLQQKARQLEARRGRVSAKKSYLRNKKEICIAKHNEKIQQRTRIEDEYRTHHTVQLKREKLHDEEERKSAWVSQERQRTLDRLRTFKQRYPGQVILKSTRLRLAHARRKGAASPVLQEDHCDSLPSVLQVEEKTEEVGEGRVKRGPSQTTEPQSLVQLEDTSLTQLEATSLPLSGVTSELPPTISLPLLNNNLEPCSVTINPLPSPLPPTPPPPLPVAKDSGPETLEKDLPRKEGNEKRIPKSASAPSAHLFDSSQLVSARKKLRKTAEGLQRRRVSSPMDEVLASLKRGSFHLKKVEQRTLPPFPDEDDSNNILAQIRKGVKLKKVQKDVLRESFTLLPDTDPLTRSIHEALRRIKEASPESEDEEEALPCTDWEN

SEQ ID NO: 243297 - protein, 988 aa, Artificial Sequence
  derived and/or modified sequence
MSFALEETLESDWVAVRPHVFDEREKHKFVFIVAWNEIEGKFAITCHNRTAQRQRSGSREQAGARGGAEAGGAASDGSRGPGSPAGRGRPEATASATLVRSPGPRRSSAWAEGGSPRSTRSLLGDPRLRSPGSKGAESRLRSPVRAKPIPGQKTSEADDAAGAAAAAARPAPREAQVSSVRIVSASGTVSEEIEVLEMVKEDEAPLALSDAEQPPPATELESPAEECSWAGLFSFQDLRAVHQQLCSVNSQLEPCLPVFPEEPSGMWTVLFGGAPEMTEQEIDTLCYQLQVYLGHGLDTCGWKILSQVLFTETDDPEEYYESLSELRQKGYEEVLQRARKRIQELLDKHKNTESMVELLDLYQMEDEAYSSLAEATTELYQYLLQPFRDMRELAMLRRQQIKISMENDYLGPRRIESLQKEDADWQRKAHMAVLSIQDLTVKYFEITAKAQKAVYDRMRADQKKFGKASWAAAAERMEKLQYAVSKETLQMMRAKEICLEQRKHALKEEMQSLRGGTEAIARLDQLEADYYDLQLQLYEVQFEILKCEELLLTAQLESIKRLISEKRDEVVYYDTYESMEAMLEKEEMAASAYLQREELQKLQQKARQLEARRGRVSAKKSYLRNKKEICIAKHNEKIQQRTRIEDEYRTHHTVQLKREKLHDEEERKSAWVSQERQRTLDRLRTFKQRYPGQVILKSTRLRLAHARRKGAASPVLQEDHCDSLPSVLQVEEKTEEVGEGRVKRGPSQTTEPQSLVQLEDTSLTQLEATSLPLSGVTSELPPTISLPLLNNNLEPCSVTINPLPSPLPPTPPPPPPPPPPPPPPPLPVAKDSGPETLEKDLPRKEGNEKRIPKSASAPSAHLFDSSQLVSARKKLRKTAEGLQRRRVSSPMDEVLASLKRGSFHLKKVEQRTLPPFPDEDDSNNILAQIRKGVKLKKVQKDVLRESFTLLPDTDPLTRSIHEALRRIKEASPESEDEEEALPCTDWEN

SEQ ID NO: 243298 - DNA, 2934 bp, Artificial Sequence
  derived and/or modified sequence
atgagctttgccctcgaggaaacgctggaatcagactgggtggcggttaggccacatgtattcgatgagcgtgagaagcacaagttcgtgttcatcgtggcctggaatgaaatcgaaggcaagttcgctataacttgtcataacagaaccgcccagcggcaacgctctggcagtcgcgagcaagccggcgcccggggcggcgctgaggccggtggggcagcctccgatggcagccggggcccggggagtcctgcggggcgaggtcgcccagaggcaacagcatctgcgacactagttcgatctcccggacccagacgtagcagcgcgtgggctgaaggtggtagcccacgcagcactcgaagcctgctgggcgacccccgcctccggagccctgggtcgaaaggggctgagtcaagactgaggtctcccgtcagagccaaacctatccccgggcagaaaacatctgaggcagacgatgccgctggcgctgcagcggctgcagccaggccggcacctcgcgaagcgcaagtgagcagtgtgcggatcgtctccgcctctggcaccgtgagcgaggagatcgaggtgctggaaatggtcaaagaagatgaggcccccctggccctaagtgatgccgagcaaccacctccagcgacagagctcgaaagtcctgcagaagaatgctcctgggctggcctgttttcattccaggatctgcgggctgtccaccaacaactctgttccgtaaattcacagttggagccttgcctgccagttttccctgaagaaccatccggtatgtggactgtcctattcgggggagctccggagatgaccgagcaggagatagacaccctgtgttatcaactgcaggtatatttgggacatgggttggatacatgtggatggaaaatcctgagccaggtactgttcacagaaaccgacgacccagaggagtactacgagagcctgtcagaacttaggcagaagggatatgaggaagtgcttcagagagccagaaagcgtattcaggagctgctggacaagcacaaaaacacagagagtatggttgagttgctggacctgtatcagatggaagacgaagcttatagtagcctggcagaggcaacaactgagctctaccagtacctgctccaaccttttagggacatgagggaactcgctatgcttcgtcgccagcagattaaaattagtatggaaaatgactacctggggccaagacggatagagtcgctccagaaggaagacgcagattggcagaggaaagcacacatggcagtgctgtctatccaagacttgaccgtgaagtacttcgaaatcacagcaaaggcacagaaagcagtttacgacagaatgcgggcagaccagaaaaagttcgggaaggccagctgggctgccgccgccgagcgtatggaaaagctgcagtacgctgtgagcaaagagacacttcagatgatgcgcgctaaagagatctgcctcgaacagcgtaagcatgctttgaaggaggaaatgcagtctctccgcggggggactgaggccattgcaagactcgatcaactagaagccgactactatgacctgcaattgcagctgtatgaggtacagttcgaaatcctgaagtgcgaggagctgttactgacggcacagctggagagcatcaagcggctgatctccgagaaacgggacgaagtggtttattatgacacctacgaatctatggaggccatgctggaaaaggaggaaatggcagcctccgcctacctgcaacgggaagagctccagaaactgcagcagaaggcaagacagctggaggctcgtcggggcagagtctcagctaaaaaaagctacctgagaaataaaaaggagatttgcatcgctaagcataatgagaagatccaacaaaggactcggatagaagatgagtaccgtacccatcacactgtgcagctcaaacgagaaaagctgcatgatgaagaagagcgcaagtccgcctgggtgtcccaggaaaggcagcgtacccttgaccgactcaggactttcaaacagaggtacccaggtcaggtgattctgaagtccactcgcctgcgactggctcacgcgcgtaggaaaggggcagcatctccagtgttacaggaagatcattgtgactccctcccctcggtgcttcaggtcgaggaaaaaactgaggaagtgggtgaggggcgggtgaagcgaggcccttcccagacaacggagcctcagagtctcgtccagttagaggatacttcactgacccaactggaggctacaagcctccccctgagcggcgtgaccagcgaactgcctcctaccatttctcttccacttctcaataataacctggagccctgtagtgttacaattaatccattgccttccccgctccctcctactccaccccctccactcccagtggccaaggactctgggccagaaacactggaaaaggacctgccaaggaaagagggcaatgagaagagaattcctaaatccgcgagcgcccctagtgcacacttgtttgacagtagccaactcgtcagcgccaggaaaaaattgcggaagacggctgaaggcttgcagaggaggagagtctcatctcccatggacgaggtgctcgctagcctcaagcggggcagttttcacctaaagaaggtggagcaacgaacacttccaccatttccagacgaggacgacagcaataatattcttgctcagattagaaagggggtgaaacttaaaaaggtgcagaaagatgttctgcgtgagtcattcacactgctgccagacaccgatccccttacgagatctatccacgaggcgctacgcaggatcaaagaggcatcacccgagagcgaggatgaagaggaggcgctgccttgtactgattgggagaactag

SEQ ID NO: 243299 - DNA, 2967 bp, Artificial Sequence
  derived and/or modified sequence
atgagcttcgccctcgaggaaacactcgaaagcgattgggtggctgtccgaccacatgttttcgatgagcgcgagaagcataaattcgtattcatagtggcctggaatgagattgagggaaaatttgcaatcacatgtcacaaccgaaccgcacagaggcagaggtccggatctcgtgaacaggccggagcccggggaggcgcagaagctggcggggcggcctccgatggttcacgtggacccggctcacccgccgggagaggccggcccgaggctactgctagtgccaccttagttcggagcccgggaccccggaggtcaagcgcctgggccgagggcgggtcccctcgatctactcgatccctgcttggagatccccgcctcaggtcacccggctccaaaggagctgaaagccgactgcggtcacccgtcagggccaaacctattccggggcagaagacttccgaagccgacgatgcggctggcgccgcagctgccgcagcccgcccagctcctagagaagcccaagtgtcgagcgtcaggattgttagtgccagcggaactgtctctgaggagattgaagtgctggagatggttaaggaggatgaggctccattagcgctgagtgacgcagaacagcctccaccggccacggaactcgagtcacctgctgaggagtgcagctgggccggcttgttctccttccaggacttgagagccgttcaccagcagctgtgcagtgtgaactcacagcttgaaccttgcctgccagtctttcctgaagagccctcaggaatgtggacggttttgtttggcggcgcgcctgagatgaccgagcaggagatcgacacactctgctaccaacttcaagtgtacttagggcatggtcttgatacgtgtggatggaagatactgagtcaggtgctcttcaccgagaccgacgaccctgaggaatactatgagtctctttctgagctcagacaaaaaggatatgaggaggtactgcagagagcccggaaacgtatccaggagctgcttgacaaacataagaatacagagagtatggttgagctgctggacctgtatcagatggaggatgaagcttactcaagcctagctgaggccactacggaactttaccagtacctgctccaaccatttcgcgatatgcgcgagcttgcaatgctgcggaggcaacagatcaagatcagtatggagaatgactatctgggtccacgcaggatagaaagtcttcagaaggaggacgcagattggcagagaaaagctcatatggccgtgctcagtatccaggatctcaccgttaagtatttcgagattacggccaaggctcaaaaggccgtctacgatcgaatgcgggccgaccagaaaaagttcggcaaggcctcctgggccgcagcagcggaacgcatggagaaactgcagtacgctgtgagtaaggaaaccctgcagatgatgcgggctaaggagatttgcctggagcagcggaagcatgcccttaaggaggaaatgcagtccctgcgaggcggaacagaagctattgctagacttgaccaattggaggctgactactacgatctgcagttgcagttgtatgaagtgcaatttgaaattctgaaatgtgaggagctcctactgaccgcccaacttgaatctattaagaggctcatatccgaaaaacgcgacgaagtagtgtactacgatacctacgagtctatggaagccatgttagagaaagaggagatggctgctagtgcttacttacaaagggaagagctgcaaaagcttcagcagaaggctcgccagcttgaagcacgccgggggagagtgagcgccaagaagagctatcttcgtaataaaaaggagatatgtattgccaaacacaatgagaaaatccagcaacgaactagaattgaagacgagtaccgcactcatcataccgtgcagctgaaacgcgaaaaactgcatgatgaggaggaaaggaaatcagcctgggtgtctcaggagcgtcagcgtacgctggatcggctgcggacgtttaagcagagatacccgggacaggtgattcttaaaagcacgcgactcaggctggctcacgcccgaagaaaaggcgcagcatctcccgttcttcaggaggaccactgtgacagcctcccttcagtgttacaggtagaggagaagactgaagaagtcggcgagggccgcgtcaagaggggaccgagccagactactgaaccccagtccctggtccaactggaggatacttccttgacccagctggaggccacctccttgccactgtctggggtgacatctgagcttcctcctacaatctcactccctctgttgaacaacaatttagaaccctgcagtgtgacaattaatcctctcccgtcccctctccccccaacccccccacccccaccccctcccccgccaccgcccccacctccccccctgccagtagccaaagactctggtcctgaaacactggagaaagatctcccccgaaaagaaggcaacgaaaagaggatcccaaagtcagcatcagctcccagtgcccacctatttgactcttcacagctggtcagcgccaggaaaaagctaaggaaaacagctgagggactgcaacgccgcagggtttcatcgccaatggatgaggtcctagctagcctcaagcggggttcttttcacctcaaaaaggttgagcagagaacactccctccctttcccgacgaagacgactcaaataacatactagctcaaatcagaaagggcgtgaagttgaagaaggtgcagaaggatgtcctgcgcgagtcatttactctgctgccagatactgacccactgaccaggagtatccatgaagcactacggcgcattaaggaggcgtcacccgagtccgaggacgaggaggaagctctgccatgcacagactgggaaaactag

SEQ ID NO: 243300 - DNA, 9094 bp, Artificial Sequence
  derived and/or modified sequence
acgtccctcgtggagccgccgacgtcagcagtcgaatggcaacattgtggcgatgctgaggcgcagagtttaggagacgggttcatcagtcaggccggctccgggctttctgcagcagcaccaggggcgggggcggggatcttgacctgggcgagcgaccgggacgcatacagcgccggcctgaccccgcgggacccgcgcctcaccaccggagcgccgcagacgcagctccacggcctcgcgcggggggcggcgggcggccgcgaggcgctgcggcagcgcggagcttgtaaacagatccggccgcaggtgaccatgtgaactacctgctcccgggacgcttattgtccttctctcgatccgcgccacaaaggagctcggcggtcggggcgcggagggacaggcgaacgagccgggagagccggccggcgcactaagatggctgaaggcgcccggcgagggtgagcggggggcgcggcgcagccagcggggagtcctcgggcgggccgggccggcggcccttccccgcggcgagaagccggagccaccatgtcgttcgcgctggaggagacgctcgagtcggactgggtggctgtgcggccccatgtgttcgacgagcgcgagaaacacaaattcgtctttattgtggcctggaacgagattgagggcaagtttgccataacctgccacaaccggacggcccagaggcagaggagcggctcccgggagcaagcgggggcgcgagggggcgccgaggccggcggagctgcgtccgacgggagccgcgggcccggcagcccggcgggcaggggtcggcccgaggccactgcctctgcaactctggttaggagccccgggccccggcggagctcggcctgggcggagggcggctctcctcggagcactcgcagccttctgggggacccgcggctgcggagtcctggcagcaaaggggcggagagtcgtcttaggagcccagtgcgggccaaacccatcccgggtcagaaaacatctgaagccgacgatgcggcgggggcagccgctgcagcagcccggccggcgcccagagaggcccaggtgtcctctgtacggatagtgagcgcctctgggacggtctccgaggagatagaggtgctggaaatggtgaaggaggacgaggcacctctggcgctctcggacgcggagcagccgccgcccgccaccgagctggagtctccggccgaagagtgcagctgggccggactgttttctttccaggacctgcgcgccgtgcaccagcagctgtgctcggtgaactcgcagttggagccgtgcctgccggtgttccccgaggaaccttcgggcatgtggactgtgctgtttgggggcgcccccgagatgaccgagcaggaaatcgacactctgtgttaccagctccaggtctacctgggccacggcctggacacctgcggctggaagatcctctcccaggtgctcttcaccgagaccgatgatcccgaggagtattacgaaagcctcagcgagctgcggcagaagggctacgaagaagtgcttcagcgggccaggaagcgcatccaggagctcttggataagcacaagaatacagagagcatggtggagcttctggacttgtatcagatggaggatgaagcctacagcagccttgcagaagctacaaccgaactctatcagtatttactacagccattccgagacatgagagaacttgccatgctacgaagacagcagatcaagatttccatggagaatgattatctgggacctcgaagaattgagagtctacaaaaagaagatgctgattggcagcggaaagctcacatggctgtactgtctattcaagatcttactgtcaagtactttgaaataacagctaaagctcaaaaagctgtgtatgatcgaatgcgagctgatcagaagaaatttggtaaagcatcatgggcagcggctgctgaacggatggaaaaactccagtatgcagtttctaaggaaactttgcagatgatgagagctaaagagatatgcttggaacagcggaaacatgcactaaaggaagagatgcagagtttgcggggtggtacagaagcgatagcacgattggatcagttagaagctgattattatgatctgcaacttcagttgtatgaagtacagtttgaaatcttgaagtgtgaagagttactattgacagcgcaactagaaagcatcaaaagacttatatcagaaaaaagagatgaagtggtatactatgacacttacgaaagcatggaggccatgctggagaaggaagagatggcagcatctgcgtacttacagagagaagagctgcagaaacttcagcagaaagcacgccagctggaagcaagacgtggacgggtttctgccaagaaatcctacctcagaaataaaaaggaaatatgtattgcaaaacacaatgaaaaaatccaacagcgcactcggattgaagatgaatatagaacccatcacacagtacaactaaagagagaaaaattacatgatgaagaagaaagaaaaagtgcctgggttagccaagagagacagagaacactggatagacttcgaacatttaaacagaggtatcctgggcaagtcatacttaaatcaaccagattacgactagctcatgcaagaagaaaaggtgcagcaagtcctgttctccaagaggatcattgtgactctttaccaagtgtgttacaggtagaagagaaaactgaagaggtgggagaaggaagagtcaagcgtgggccatcacagacaacagaaccccagagccttgtgcaacttgaagatacttcattaacacaacttgaagccacctcattacctctcagtggtgttacctctgaactgcctcccactatatctcttccacttttgaataacaacctcgaaccatgttctgttaccataaatccactcccatcccctcttcctccaacaccaccaccacctctgcctgttgctaaggacagtggcccagagacactggagaaagatctgcctagaaaggaggggaatgagaagaggatcccaaagtcagccagtgccccctcagcacacctctttgacagcagccagctggtcagtgcacggaagaagctcagaaagactgctgaaggtttgcagaggaggagagtgagctcacccatggatgaggtgctagcctccttgaagcgtggtagttttcatctgaaaaaggttgaacagcgaactctgcctccttttcctgatgaagatgatagtaataatatcttggcacaaataaggaaaggggtaaaattgaagaaggtacagaaggatgttttgagagaatccttcacacttctacccgatacagaccctctaacacggagcatccatgaagctcttagaagaattaaagaagcatccccagagtcagaggacgaagaggaggctttaccttgcacagactgggagaactaacaagtgacataacagaagaaaaatatcattcaagattggttctgattcttttggaaaatgacagtttaagcacttggttcctcagttggataacattagatccaaagttcattggttcagtggtgtgaagaaaggaagcacaattggcaggttatcactttccagtcgttccaatagatgatggttaacatgaattttacatgtgcaatgttcctgactgcaatgaagaaaaggccttctggagatttctgttttttaagcacattctccttccatccacatatttacatccttgtaatggccagttaagctagggcttgctgtaagttggaagaacactgggttgacagagatctactgtgagctgtattgggactgctttgagaaccatctttcaatgcactgaaaagtcatctgaaaaaatagcttcttccatatcagcttatattaaatactgtgacactctgagaaagtttatcatcatgatagctgtaagtcaggcattaaaatcaaatggaaatacacctaaaatgtccgcattactcatttccaaaggatttttcataaagatgttcagcaacatctgaaaagctgcatttatggagatacatctattaatatgttcacaacatgatacatttaacatggcatatttttaggagtcttatactttgtaaggttttgaagtttccgtgcttttaaatcactcttcatatttcttgaatttataatagtttgaattttatgtgcatccttgtttatggaaggcagtactttgataatatttcaaattatttttattttgtttgaattattgcttgattgctatgactgacatgactttcctattgagaatcaaaaatcaagattcaatcatagggatgcagatcttaactcttttcacaaattaccattttaagtttttatttttatgctccacagtgaaaagcatgtgctctacaaagatagaaagtagagacaagtctccgtggctggcatttcaccatcttcacatgcactgaatggaattttgggagaatgcctttgttatagtcactaaaattttaaacttatacacagctttaggtgctgattttggctgtgatggagtcctgaaggacacatttatatgttccagattttcagcaggattgttgtgggcttgaatacatgtagatcattggactcagtgtgcagtaccctgtacatataattctgcataagacagatcttggcctttctgtggagggagttaagaactaaaataccaaaaatcactttatttcttttaagacaattatctggcctaaacccagaaagcagtactggagcaaaagcccagtgtatatgaattggtattcctagagaaaaaaagaaatgctcacacctttgttattttaaagtgttttcttgaaaataattagggagaaaattttctggcaacaggttatgtaagacaacaactttttttattatttcaaaacaaaacaggcacatgccaccatgccccagctaatttttatattttttatagagacagggttttgccatgttgcccacgctggtcttgaactcctggactcaagcaatctgccagcctcggcctgctaaagtgctaggattataggcgtgagcctctgtgcccagcctgacaaaatcttttatttatttaaatgttagtaatacgtttattgatgagactaggagcttctctgcagcatcttcataatacattggttttagttcccacactattcccacatcttatctgggaagattagaaatacagatgtaatatggaagcttcaacagcatgggggtggtgatagtgtcctatttgcccttggtaaaatattaaagcgtatttcttaacccaaagagtgattggttatatgaatatatttgaaaaagttaaagcaaatttgcaaacctttacaaaatcatgtatcaattttatgctatccagtttttacgtacccatgtgtcaacatttcatatatccagttctttgggtgctggttcactttttttcatttattcaaattcagaaaaatacggacggatctaatgttaaattaaccagaaaccctggaacattcatatcttgagagggaatttgctactcttttacttttgggatttcattataaaataggctcattttatacatatgtcctgtggtctgtcttccagagtgtgctgtaatcataagtctctagcaaagagtggagggtggagggtgtgtagaactccactcagcctcatggatacatctacaagtctctcaacccatcctgttacagttctccatgagagtcacctcacacttggaaaagaaggaggttaaagcagagtattgttggcagccagctatgcccatcctcttgtaaataactttccaacacacccatttccttgccttaaggtgcaggttcctacttctacaaaatttcaaatgattgcaggtcaaaaacctttggagttactcacaaataataataaaatttcaaataactagggtctacttgtccatcaagatgacattaccagtggaacccacctgttaattttaaagtagcttcagaacccaacaaaaattatgtaagcctggttaaatgtccttttttcttcttgcctctaataaaatcaggatcttcggccttgatactaaatatgtgtatatttagttatgatggtacttgtagatgctcacatttccagttccaaactcgcccgtactttttatgtgcttcaaaatattggacacatttctgttaatatatgatttctgtatccacaaaccgctgtttgcttatgctgagtcaatttagaagttaatttccaatctagtctcaactgcaatgcatttaaaataggtaaaacaagtaaatgagtttgggacattttgagattaatgttactgcccacttgactgtcaatttcaaatggctcctaatgcaaccaaaattataaccaatgtagcatgtgtaggaaaggtatttttaattatttaaaatcattgtgtatattacagcagtatgaggaatgcctggctaaagaggattttttaaaagatgaagaatggttttgcttgtattatataggcttactgagtttgtgagcagcataaaaacaatcattccttaattcttcattgtggaactgaaatatttctgtaatgcattttttaaaaggagactcctagacacagctgtaatagtgggaatagaaatgtagagcttttctcataacacaaaaccagaaaataattttcagcactttgacttactctatgtaataaggaaaaaaattgtttccacaaagttgaactatgtagtaatatttggtaacatatggcatggccactttatatcacagaatgtgtgtcaagttgcaaagcatacttgggccatagtagacactaagaattaaaactcttaaatcagtgaaacaaaaactaatgggcagcattctctctgtttggaatgggatcagtatacaattaatacaatttaattttacacattccctaagacaccatttttaagttacagtcacatgagtgtttgtataaatttaagtcaatgcttttagcctaggcaaagctaaatacaaggtttttggggttttcttttttcagctttattattgaagtattacaaacttaacatcagataccaatgtgtaaaaagtactattgggtccttaagggctctatcagggagttgaaatttcatacgctttaccaggttacttgtaaaaaatgaacagctgtaagacatttcaaaaccattgcagacacattgttaaaatgcagccatttgataatgaaagcagaaaccttaagttttacctaattattgcactaaatgtaaatgataacataaaattaagtgtgcattttaaacagattctatttcccacttactgcttagcatagaaaaagagctatggttagaggagtgaccagcaagatttatttcagatggaaaaggggtgagaaagtggaagcaccttactgttagagcatgttgcatctatttagtgctactgaacaattcagtagttatttctgaactttgctgcaaagtgctctttagttaaagcacattaagaagggtcactgcttaattgctttgtaaaatgaagcaatggtattttttatccgatatagtgtaatttaaaagttttcctacaaagtgagtttatattgttgcctaaactatgttatgtaagcaaagggtttggaaaggcgggagggagtctagattcggcgagagtgtgcgtttgtgtgtgtgaatgtatgaaaagtttccccattgggttattcttaagatgtgtttattgtaaagttttctacgttttgcccacagtaaatgtacaacttcgcaattgtaggatttaattgattgaattccaaatttatactgtctcttcccttctgcagagacattatgccactgtaaggtgcatgtacagaaaatacctctgaggttgacttgttaaataactgatgaatgttatttcacactgaatctcaaagcagtcatttgttttgcgggttaggggaaagttttgttttttgctggtgttttttgttgtttttaattaggcacactaagagtggctaaatttgggggaattggtggataggaaagaccttgaaaagtgatgtgtagatgaaaacacaaggtatggatgttggttacagagttcagttttaacaagggaaatttggggattttttttttttttacttgcatgttctatgggtagctatcaaagggtgtaacaaattattccagcttttcccaatactaattatattggttttaaaaagtctgcataatcactaggtggcattttcccttcatttgtgaaccaagaggggtaaatgatgctacccatacagtgacttctgagttctttaactttgacagaatctccattgtttcattgaatttctcattgtattatatgtctttccaagtgtgcaaactataatatgtagttaatgaaaaatggaaggctgcagattattttgcatgaataattaattgcccattagggctaaggagactgacatgatttttatcggttctgggtaaatgaaaattttaatggaaaactcattcaccatttactagctttgtgcaatattataaaaggtagaagcaaaacactagcacattgtgctttgcttggcttgtaaggatggctttagtaccattacattaaatggacagtgtgcacagtgtattgtaaatgccaactcttgcaaatttacaatacttaaatatgttcaattaacatcctaaagtattaaaagtacagaggaaaaactaagcaagcatttatagcaataccatgaaatctccagtaatcgttttgactgttgccttttgctctttagtgcagcttttctgcattgtaattgtattgctttgtatttcatgttttttacactcatgacttcagagttaagtacttgtacaccaagtattgcaatcacctttctcttgttgtacatgcaatgtaacaacctacagttttggtgcttttaacaatattcctctttttctttaataaaggatatttatttgaattaatt

SEQ ID NO: 243301 - DNA, 9042 bp, Artificial Sequence
  derived and/or modified sequence
agtcaggccggctccgggctttctgcagcagcaccaggggcgggggcggggatcttgacctgggcgagcgaccgggacgcatacagcgccggcctgaccccgcgggacccgcgcctcaccaccggagcgccgcagacgcagctccacggcctcgcgcggggggcggcgggcggccgcgaggcgctgcggcagcgcggagcttgtaaacagatccggccgcaggtgaccatgtgaactacctgctcccgggacgcttattgtccttctctcgatccgcgccacaaaggagctcggcggtcggggcgcggagggacaggcgaacgagccgggagagccggccggcgcactaagatggctgaaggcgcccggcgagggtgagcggggggcgcggcgcagccagcggggagtcctcgggcgggccgggccggcggcccttccccgcggcgagaagccggagccaccatgtcgttcgcgctggaggagacgctcgagtcggactgggtggctgtgcggccccatgtgttcgacgagcgcgagaaacacaaattcgtctttattgtggcctggaacgagattgagggcaagtttgccataacctgccacaaccggacggcccagaggcagaggagcggctcccgggagcaagcgggggcgcgagggggcgccgaggccggcggagctgcgtccgacgggagccgcgggcccggcagcccggcgggcaggggtcggcccgaggccactgcctctgcaactctggttaggagccccgggccccggcggagctcggcctgggcggagggcggctctcctcggagcactcgcagccttctgggggacccgcggctgcggagtcctggcagcaaaggggcggagagtcgtcttaggagcccagtgcgggccaaacccatcccgggtcagaaaacatctgaagccgacgatgcggcgggggcagccgctgcagcagcccggccggcgcccagagaggcccaggtgtcctctgtacggatagtgagcgcctctgggacggtctccgaggagatagaggtgctggaaatggtgaaggaggacgaggcacctctggcgctctcggacgcggagcagccgccgcccgccaccgagctggagtctccggccgaagagtgcagctgggccggactgttttctttccaggacctgcgcgccgtgcaccagcagctgtgctcggtgaactcgcagttggagccgtgcctgccggtgttccccgaggaaccttcgggcatgtggactgtgctgtttgggggcgcccccgagatgaccgagcaggaaatcgacactctgtgttaccagctccaggtctacctgggccacggcctggacacctgcggctggaagatcctctcccaggtgctcttcaccgagaccgatgatcccgaggagtattacgaaagcctcagcgagctgcggcagaagggctacgaagaagtgcttcagcgggccaggaagcgcatccaggagctcttggataagcacaagaatacagagagcatggtggagcttctggacttgtatcagatggaggatgaagcctacagcagccttgcagaagctacaaccgaactctatcagtatttactacagccattccgagacatgagagaacttgccatgctacgaagacagcagatcaagatttccatggagaatgattatctgggacctcgaagaattgagagtctacaaaaagaagatgctgattggcagcggaaagctcacatggctgtactgtctattcaagatcttactgtcaagtactttgaaataacagctaaagctcaaaaagctgtgtatgatcgaatgcgagctgatcagaagaaatttggtaaagcatcatgggcagcggctgctgaacggatggaaaaactccagtatgcagtttctaaggaaactttgcagatgatgagagctaaagagatatgcttggaacagcggaaacatgcactaaaggaagagatgcagagtttgcggggtggtacagaagcgatagcacgattggatcagttagaagctgattattatgatctgcaacttcagttgtatgaagtacagtttgaaatcttgaagtgtgaagagttactattgacagcgcaactagaaagcatcaaaagacttatatcagaaaaaagagatgaagtggtatactatgacacttacgaaagcatggaggccatgctggagaaggaagagatggcagcatctgcgtacttacagagagaagagctgcagaaacttcagcagaaagcacgccagctggaagcaagacgtggacgggtttctgccaagaaatcctacctcagaaataaaaaggaaatatgtattgcaaaacacaatgaaaaaatccaacagcgcactcggattgaagatgaatatagaacccatcacacagtacaactaaagagagaaaaattacatgatgaagaagaaagaaaaagtgcctgggttagccaagagagacagagaacactggatagacttcgaacatttaaacagaggtatcctgggcaagtcatacttaaatcaaccagattacgactagctcatgcaagaagaaaaggtgcagcaagtcctgttctccaagaggatcattgtgactctttaccaagtgtgttacaggtagaagagaaaactgaagaggtgggagaaggaagagtcaagcgtgggccatcacagacaacagaaccccagagccttgtgcaacttgaagatacttcattaacacaacttgaagccacctcattacctctcagtggtgttacctctgaactgcctcccactatatctcttccacttttgaataacaacctcgaaccatgttctgttaccataaatccactcccatcccctcttcctccaacaccaccacctcccccacctcctccccctcccccaccaccaccacctctgcctgttgctaaggacagtggcccagagacactggagaaagatctgcctagaaaggaggggaatgagaagaggatcccaaagtcagccagtgccccctcagcacacctctttgacagcagccagctggtcagtgcacggaagaagctcagaaagactgctgaaggtttgcagaggaggagagtgagctcacccatggatgaggtgctagcctccttgaagcgtggtagttttcatctgaaaaaggttgaacagcgaactctgcctccttttcctgatgaagatgatagtaataatatcttggcacaaataaggaaaggggtaaaattgaagaaggtacagaaggatgttttgagagaatccttcacacttctacccgatacagaccctctaacacggagcatccatgaagctcttagaagaattaaagaagcatccccagagtcagaggacgaagaggaggctttaccttgcacagactgggagaactaacaagtgacataacagaagaaaaatatcattcaagattggttctgattcttttggaaaatgacagtttaagcacttggttcctcagttggataacattagatccaaagttcattggttcagtggtgtgaagaaaggaagcacaattggcaggttatcactttccagtcgttccaatagatgatggttaacatgaattttacatgtgcaatgttcctgactgcaatgaagaaaaggccttctggagatttctgttttttaagcacattctccttccatccacatatttacatccttgtaatggccagttaagctagggcttgctgtaagttggaagaacactgggttgacagagatctactgtgagctgtattgggactgctttgagaaccatctttcaatgcactgaaaagtcatctgaaaaaatagcttcttccatatcagcttatattaaatactgtgacactctgagaaagtttatcatcatgatagctgtaagtcaggcattaaaatcaaatggaaatacacctaaaatgtccgcattactcatttccaaaggatttttcataaagatgttcagcaacatctgaaaagctgcatttatggagatacatctattaatatgttcacaacatgatacatttaacatggcatatttttaggagtcttatactttgtaaggttttgaagtttccgtgcttttaaatcactcttcatatttcttgaatttataatagtttgaattttatgtgcatccttgtttatggaaggcagtactttgataatatttcaaattatttttattttgtttgaattattgcttgattgctatgactgacatgactttcctattgagaatcaaaaatcaagattcaatcatagggatgcagatcttaactcttttcacaaattaccattttaagtttttatttttatgctccacagtgaaaagcatgtgctctacaaagatagaaagtagagacaagtctccgtggctggcatttcaccatcttcacatgcactgaatggaattttgggagaatgcctttgttatagtcactaaaattttaaacttatacacagctttaggtgctgattttggctgtgatggagtcctgaaggacacatttatatgttccagattttcagcaggattgttgtgggcttgaatacatgtagatcattggactcagtgtgcagtaccctgtacatataattctgcataagacagatcttggcctttctgtggagggagttaagaactaaaataccaaaaatcactttatttcttttaagacaattatctggcctaaacccagaaagcagtactggagcaaaagcccagtgtatatgaattggtattcctagagaaaaaaagaaatgctcacacctttgttattttaaagtgttttcttgaaaataattagggagaaaattttctggcaacaggttatgtaagacaacaactttttttattatttcaaaacaaaacaggcacatgccaccatgccccagctaatttttatattttttatagagacagggttttgccatgttgcccacgctggtcttgaactcctggactcaagcaatctgccagcctcggcctgctaaagtgctaggattataggcgtgagcctctgtgcccagcctgacaaaatcttttatttatttaaatgttagtaatacgtttattgatgagactaggagcttctctgcagcatcttcataatacattggttttagttcccacactattcccacatcttatctgggaagattagaaatacagatgtaatatggaagcttcaacagcatgggggtggtgatagtgtcctatttgcccttggtaaaatattaaagcgtatttcttaacccaaagagtgattggttatatgaatatatttgaaaaagttaaagcaaatttgcaaacctttacaaaatcatgtatcaattttatgctatccagtttttacgtacccatgtgtcaacatttcatatatccagttctttgggtgctggttcactttttttcatttattcaaattcagaaaaatacggacggatctaatgttaaattaaccagaaaccctggaacattcatatcttgagagggaatttgctactcttttacttttgggatttcattataaaataggctcattttatacatatgtcctgtggtctgtcttccagagtgtgctgtaatcataagtctctagcaaagagtggagggtggagggtgtgtagaactccactcagcctcatggatacatctacaagtctctcaacccatcctgttacagttctccatgagagtcacctcacacttggaaaagaaggaggttaaagcagagtattgttggcagccagctatgcccatcctcttgtaaataactttccaacacacccatttccttgccttaaggtgcaggttcctacttctacaaaatttcaaatgattgcaggtcaaaaacctttggagttactcacaaataataataaaatttcaaataactagggtctacttgtccatcaagatgacattaccagtggaacccacctgttaattttaaagtagcttcagaacccaacaaaaattatgtaagcctggttaaatgtccttttttcttcttgcctctaataaaatcaggatcttcggccttgatactaaatatgtgtatatttagttatgatggtacttgtagatgctcacatttccagttccaaactcgcccgtactttttatgtgcttcaaaatattggacacatttctgttaatatatgatttctgtatccacaaaccgctgtttgcttatgctgagtcaatttagaagttaatttccaatctagtctcaactgcaatgcatttaaaataggtaaaacaagtaaatgagtttgggacattttgagattaatgttactgcccacttgactgtcaatttcaaatggctcctaatgcaaccaaaattataaccaatgtagcatgtgtaggaaaggtatttttaattatttaaaatcattgtgtatattacagcagtatgaggaatgcctggctaaagaggattttttaaaagatgaagaatggttttgcttgtattatataggcttactgagtttgtgagcagcataaaaacaatcattccttaattcttcattgtggaactgaaatatttctgtaatgcattttttaaaaggagactcctagacacagctgtaatagtgggaatagaaatgtagagcttttctcataacacaaaaccagaaaataattttcagcactttgacttactctatgtaataaggaaaaaaattgtttccacaaagttgaactatgtagtaatatttggtaacatatggcatggccactttatatcacagaatgtgtgtcaagttgcaaagcatacttgggccatagtagacactaagaattaaaactcttaaatcagtgaaacaaaaactaatgggcagcattctctctgtttggaatgggatcagtatacaattaatacaatttaattttacacattccctaagacaccatttttaagttacagtcacatgagtgtttgtataaatttaagtcaatgcttttagcctaggcaaagctaaatacaaggtttttggggttttcttttttcagctttattattgaagtattacaaacttaacatcagataccaatgtgtaaaaagtactattgggtccttaagggctctatcagggagttgaaatttcatacgctttaccaggttacttgtaaaaaatgaacagctgtaagacatttcaaaaccattgcagacacattgttaaaatgcagccatttgataatgaaagcagaaaccttaagttttacctaattattgcactaaatgtaaatgataacataaaattaagtgtgcattttaaacagattctatttcccacttactgcttagcatagaaaaagagctatggttagaggagtgaccagcaagatttatttcagatggaaaaggggtgagaaagtggaagcaccttactgttagagcatgttgcatctatttagtgctactgaacaattcagtagttatttctgaactttgctgcaaagtgctctttagttaaagcacattaagaagggtcactgcttaattgctttgtaaaatgaagcaatggtattttttatccgatatagtgtaatttaaaagttttcctacaaagtgagtttatattgttgcctaaactatgttatgtaagcaaagggtttggaaaggcgggagggagtctagattcggcgagagtgtgcgtttgtgtgtgtgaatgtatgaaaagtttccccattgggttattcttaagatgtgtttattgtaaagttttctacgttttgcccacagtaaatgtacaacttcgcaattgtaggatttaattgattgaattccaaatttatactgtctcttcccttctgcagagacattatgccactgtaaggtgcatgtacagaaaatacctctgaggttgacttgttaaataactgatgaatgttatttcacactgaatctcaaagcagtcatttgttttgcgggttaggggaaagttttgttttttgctggtgttttttgttgtttttaattaggcacactaagagtggctaaatttgggggaattggtggataggaaagaccttgaaaagtgatgtgtagatgaaaacacaaggtatggatgttggttacagagttcagttttaacaagggaaatttggggattttttttttttttacttgcatgttctatgggtagctatcaaagggtgtaacaaattattccagcttttcccaatactaattatattggttttaaaaagtctgcataatcactaggtggcattttcccttcatttgtgaaccaagaggggtaaatgatgctacccatacagtgacttctgagttctttaactttgacagaatctccattgtttcattgaatttctcattgtattatatgtctttccaagtgtgcaaactataatatgtagttaatgaaaaatggaaggctgcagattattttgcatgaataattaattgcccattagggctaaggagactgacatgatttttatcggttctgggtaaatgaaaattttaatggaaaactcattcaccatttactagctttgtgcaatattataaaaggtagaagcaaaacactagcacattgtgctttgcttggcttgtaaggatggctttagtaccattacattaaatggacagtgtgcacagtgtattgtaaatgccaactcttgcaaatttacaatacttaaatatgttcaattaacatcctaaagtattaaaagtacagaggaaaaactaagcaagcatttatagcaataccatgaaatctccagtaatcgttttgactgttgccttttgctctttagtgcagcttttctgcattgtaattgtattgctttgtatttcatgttttttacactcatgacttcagagttaagtacttgtacaccaagtattgcaatcacctttctcttgttgtacatgcaatgtaacaacctacagttttggtgcttttaacaatattcctctttttctttaataaaggatatttatttgaattaattaa

SEQ ID NO: 243302 - DNA, 2934 bp, Artificial Sequence
  derived and/or modified sequence
atgagctttgccctggaggagaccctggagagtgactgggtggccgtgcggccccacgtgtttgatgagcgggagaagcacaagtttgtgttcatcgtggcctggaatgaaattgagggcaagtttgccatcacctgccacaacagaacagcccagaggcagaggagcggcagccgggagcaggccggggcccggggcggcgctgaggccggcggggccgccagtgatggcagccggggccctggcagccctgctggccggggccggcctgaggccacagccagcgccaccctggtgcgcagccctggccccaggaggagcagcgcctgggccgagggcggcagccccaggagcaccaggagcctgctgggggacccccggctgcggagccctggcagcaaaggagctgagagccggctgcggagccctgtgcgggccaagcccatccctggccagaagaccagcgaggctgatgatgctgctggagctgctgctgctgctgcccggcctgccccccgggaggcccaggtgtcctctgtgcgcatcgtgtctgccagcggcaccgtgtctgaggagattgaggtgctggagatggtgaaggaggatgaggcccccctggccctgagtgatgctgagcagcccccaccagccacagagctggagagccctgctgaggagtgctcctgggccggcctcttctccttccaggacctgcgggctgtgcaccagcagctgtgcagcgtgaacagccagctggagccctgcctgcctgtgtttcctgaggagcccagcggcatgtggacagtgctgtttggaggagcccctgagatgacagagcaggagattgacaccctgtgctaccagctgcaggtgtacctgggccacggcctggacacctgtggctggaagatcctgagccaggtgctcttcacagaaacagatgatcctgaggagtactatgagagcctgtctgagctgcggcagaagggctatgaggaggtgctgcagagggccaggaagaggatccaggagctgctggacaagcacaagaacacagagagcatggtggagctgctggacctgtaccagatggaggatgaggcctacagcagcctggccgaggccaccacagagctgtaccagtacctgctgcagcccttccgggacatgagggagctggccatgctgcggcggcagcagatcaagatctccatggagaatgactacctgggccccaggagaattgagagcctgcagaaggaggatgctgactggcagaggaaggcccacatggctgtgctgagcatccaggacctgactgtgaagtactttgagatcacagccaaggcccagaaggctgtgtatgacaggatgagagctgaccagaagaagtttgggaaggcctcctgggccgctgctgctgagaggatggagaagctgcagtatgctgtgtccaaggagaccctgcagatgatgagggccaaggagatctgcctggagcagaggaagcacgccctgaaggaggagatgcagagcctgcggggcggcacagaggccatcgcccggctggaccagctggaggccgactactatgacctgcagctgcagctgtatgaggtgcagtttgagatcctgaagtgtgaggagctgctgctgacagcccagctggagagcatcaagaggctcatcagcgagaagagagatgaggtggtgtactatgacacctatgagagcatggaggccatgctggagaaggaggagatggccgccagcgcctacctgcagcgggaggagctgcagaagctgcagcagaaggcccggcagctggaggcccggcggggccgggtgtctgccaagaagagctacctgaggaacaagaaggagatctgcatcgccaagcacaatgagaagatccagcagaggaccagaattgaagatgagtaccgcacccaccacacagtgcagctgaagcgggagaagctgcatgatgaggaggagaggaagagcgcctgggtgtcccaggagcggcagaggaccctggaccggctgcggaccttcaagcagcgctacccaggccaggtgatcctgaagagcacccggctgcggctggcccacgcccggaggaaaggagctgccagccctgtgctgcaggaggaccactgtgacagcctgcccagcgtgctgcaggtggaggagaagacagaggaggtgggggagggccgggtgaagaggggccccagccagaccacagagccccagagcctggtgcagctggaggacaccagcctgacccagctggaggccaccagcctgcccctgagcggcgtgaccagcgagctgccccccaccatcagcctgcccctgctgaacaacaacctggagccctgcagcgtgaccatcaaccccctgcccagccccctgccccccaccccacctccacccctgcctgtggccaaggacagcggccctgagaccctggagaaggacctgcccaggaaggagggcaatgagaagaggatccccaagagcgccagcgcccccagcgcccacctgtttgacagcagccagctggtgtctgccaggaagaagctgaggaagacagctgagggcctgcagaggcggcgggtgagcagccccatggatgaggtgctggccagcctgaagaggggcagcttccacctgaagaaggtggagcagaggaccctgccccccttcccagatgaagatgacagcaacaacatcctggcccagatcaggaagggcgtgaagctgaagaaggtgcagaaggatgtgctgcgggagagcttcaccctgctgcctgacacagaccccctgaccaggagcatccacgaggccctgcggcgcatcaaggaggccagccctgagagtgaagatgaggaggaggccctgccctgcacagactgggagaactag

SEQ ID NO: 243303 - DNA, 2967 bp, Artificial Sequence
  derived and/or modified sequence
atgagctttgccctggaggagaccctggagagtgactgggtggccgtgcggccccacgtgtttgatgagcgggagaagcacaagtttgtgttcatcgtggcctggaatgaaattgagggcaagtttgccatcacctgccacaacagaacagcccagaggcagaggagcggcagccgggagcaggccggggcccggggcggcgctgaggccggcggggccgccagtgatggcagccggggccctggcagccctgctggccggggccggcctgaggccacagccagcgccaccctggtgcgcagccctggccccaggaggagcagcgcctgggccgagggcggcagccccaggagcaccaggagcctgctgggggacccccggctgcggagccctggcagcaaaggagctgagagccggctgcggagccctgtgcgggccaagcccatccctggccagaagaccagcgaggctgatgatgctgctggagctgctgctgctgctgcccggcctgccccccgggaggcccaggtgtcctctgtgcgcatcgtgtctgccagcggcaccgtgtctgaggagattgaggtgctggagatggtgaaggaggatgaggcccccctggccctgagtgatgctgagcagcccccaccagccacagagctggagagccctgctgaggagtgctcctgggccggcctcttctccttccaggacctgcgggctgtgcaccagcagctgtgcagcgtgaacagccagctggagccctgcctgcctgtgtttcctgaggagcccagcggcatgtggacagtgctgtttggaggagcccctgagatgacagagcaggagattgacaccctgtgctaccagctgcaggtgtacctgggccacggcctggacacctgtggctggaagatcctgagccaggtgctcttcacagaaacagatgatcctgaggagtactatgagagcctgtctgagctgcggcagaagggctatgaggaggtgctgcagagggccaggaagaggatccaggagctgctggacaagcacaagaacacagagagcatggtggagctgctggacctgtaccagatggaggatgaggcctacagcagcctggccgaggccaccacagagctgtaccagtacctgctgcagcccttccgggacatgagggagctggccatgctgcggcggcagcagatcaagatctccatggagaatgactacctgggccccaggagaattgagagcctgcagaaggaggatgctgactggcagaggaaggcccacatggctgtgctgagcatccaggacctgactgtgaagtactttgagatcacagccaaggcccagaaggctgtgtatgacaggatgagagctgaccagaagaagtttgggaaggcctcctgggccgctgctgctgagaggatggagaagctgcagtatgctgtgtccaaggagaccctgcagatgatgagggccaaggagatctgcctggagcagaggaagcacgccctgaaggaggagatgcagagcctgcggggcggcacagaggccatcgcccggctggaccagctggaggccgactactatgacctgcagctgcagctgtatgaggtgcagtttgagatcctgaagtgtgaggagctgctgctgacagcccagctggagagcatcaagaggctcatcagcgagaagagagatgaggtggtgtactatgacacctatgagagcatggaggccatgctggagaaggaggagatggccgccagcgcctacctgcagcgggaggagctgcagaagctgcagcagaaggcccggcagctggaggcccggcggggccgggtgtctgccaagaagagctacctgaggaacaagaaggagatctgcatcgccaagcacaatgagaagatccagcagaggaccagaattgaagatgagtaccgcacccaccacacagtgcagctgaagcgggagaagctgcatgatgaggaggagaggaagagcgcctgggtgtcccaggagcggcagaggaccctggaccggctgcggaccttcaagcagcgctacccaggccaggtgatcctgaagagcacccggctgcggctggcccacgcccggaggaaaggagctgccagccctgtgctgcaggaggaccactgtgacagcctgcccagcgtgctgcaggtggaggagaagacagaggaggtgggggagggccgggtgaagaggggccccagccagaccacagagccccagagcctggtgcagctggaggacaccagcctgacccagctggaggccaccagcctgcccctgagcggcgtgaccagcgagctgccccccaccatcagcctgcccctgctgaacaacaacctggagccctgcagcgtgaccatcaaccccctgcccagccccctgccccccaccccacctcctcctcctcctcctcctcctcctcctcctcctccacccctgcctgtggccaaggacagcggccctgagaccctggagaaggacctgcccaggaaggagggcaatgagaagaggatccccaagagcgccagcgcccccagcgcccacctgtttgacagcagccagctggtgtctgccaggaagaagctgaggaagacagctgagggcctgcagaggagaagagtgagcagccccatggatgaggtgctggccagcctgaagaggggcagcttccacctgaagaaggtggagcagaggaccctgccccccttcccagatgaagatgacagcaacaacatcctggcccagatcagaaaaggagtgaagctgaagaaggtgcagaaggatgtgctgcgggagagcttcaccctgctgcctgacacagaccccctgaccaggagcatccacgaggccctgcggcgcatcaaggaggccagccctgagagtgaagatgaggaggaggccctgccctgcacagactgggagaactag

SEQ ID NO: 243304 - DNA, 2934 bp, Artificial Sequence
  derived and/or modified sequence
atgagcttcgccctggaggagaccctggagagcgactgggtggccgtgcggccccacgtgtttgacgagagagaaaagcacaaattcgttttcatcgtagcctggaacgaaatagaaggcaagttcgcgattacctgccacaacagaacggcacagaggcagcgaagcgggtcaagagagcaggcaggtgccaggggcggcgcagaggctggtggcgctgcatccgatgggagccgcggccccgggagccctgcagggaggggaagaccagaggcaactgcttccgccacgttagtgcggtcccccggtcctcggaggagttccgcttgggccgagggcgggagccctagatctaccagatccctgttgggtgatccaaggttacgaagccccggcagtaaaggcgcagaaagccgtctcaggtctcccgtgcgcgctaagcccatacctggacagaagactagcgaagctgacgacgcggctggggccgcagcagccgcagcacgccctgcgcctcgggaggcccaggttagctcagtgcgaatagtgagcgcatccggcactgtgtctgaagagattgaggtcctggagatggtgaaagaagacgaggctccactagcactaagcgacgctgagcagcctcctcctgcaacagagctcgagagtcccgcggaagaatgtagctgggccggccttttttccttccaggatctgcgggctgtgcaccagcagctttgttccgtgaatagtcaactggaaccttgcctccctgtgtttcccgaagagccctccggcatgtggaccgttctctttgggggagctcccgaaatgacggagcaggagatcgataccttgtgctaccagcttcaggtctatttgggacacggcctggacacgtgtggctggaaaatactcagccaagtgctctttacagaaactgatgatccagaggaatactatgaatcactgtctgaactgcggcaaaagggatacgaagaagtactccaacgggctcgcaagcgcattcaggagctgctcgataaacataagaataccgaatctatggtcgagttgctcgatctctaccaaatggaagatgaggcatactcgtccctggctgaggctacaacggagttgtatcagtacctgttgcaaccgtttagagatatgcgggaactggcgatgttaaggcgccagcagatcaagatcagtatggaaaacgactacctgggcccgagaaggattgaatcgttgcagaaagaagacgccgactggcagaggaaagcgcatatggcggtgcttagcatccaggatctgacagtgaaatactttgagatcaccgcaaaggcccagaaggcagtgtacgatagaatgagagctgaccagaagaaatttggtaaagcttcatgggctgcagccgccgagagaatggaaaagctgcagtacgctgtgtcaaaagagactctgcaaatgatgagagccaaggagatctgcctggagcagcggaagcatgctctaaaggaagagatgcaatcactgcgggggggaaccgaagctatcgcccgcctcgatcaactggaagccgattactatgatctccagctgcagctatatgaggttcagtttgaaatcctcaaatgcgaggagcttctgctaacagcccagttagagagtatcaaacgactgatttccgaaaaaagggatgaggtggtctactatgacacatacgagtctatggaggcaatgttggagaaggaggaaatggctgcgtctgcgtacctccagagggaggaactacagaaactgcagcagaaagcacggcagctcgaggcccgacgagggagagtgagtgcaaaaaagtcttacctccggaacaagaaagaaatttgcattgctaagcacaatgaaaagattcagcaacgcaccagaattgaagacgagtacagaacacaccacacagtgcagctgaagcgcgaaaaattgcatgatgaggaggaaaggaaatccgcctgggtgagccaagagagacaacgaacccttgacaggctaaggacctttaagcagcgctacccgggccaggtgatcctgaagagtacgagacttcggttggcacatgccagaagaaagggcgctgcaagtcctgtcctacaggaagatcactgcgatagtctaccctctgtgctgcaagtggaggaaaagaccgaagaggtcggagagggaagagttaaacgcggaccctctcaaacgaccgagccacaatctctggtgcagctcgaagatacgtctttgacccagctggaggcaacgtccctgcctcttagcggcgtgacatccgaactccctccgaccatcagcctcccactgctgaacaataatctggagccctgctctgtgacgataaatcccctgccctcccctctgcctccaactcctccaccacccctgccggtcgccaaggatagcgggccggaaaccttggagaaggatctcccaaggaaggagggcaacgagaaacgtatacccaaatcagcttcggctccctccgcccacctgtttgactctagccagcttgtcagcgcccggaagaaactgcgaaagaccgccgaggggctgcagaggcggcgggtgagttcaccgatggacgaagtgctggcatcccttaagagaggcagttttcacctcaagaaggtggagcagcgtacactcccaccattcccagacgaggacgacagcaacaatattctagcccagattagaaagggggtgaagcttaaaaaggtccagaaggacgtcctccgcgagagctttactctgttgcctgacactgatccattgactaggagtattcacgaagctctgcggaggattaaagaggcttctccagagagcgaagacgaggaagaggccctgccttgcaccgattgggaaaactag

SEQ ID NO: 243305 - DNA, 2967 bp, Artificial Sequence
  derived and/or modified sequence
atgagcttcgccctggaggagaccctggagagcgactgggtggccgtgaggccccatgtctttgatgaaagggagaagcacaaatttgttttcatcgttgcatggaacgagatcgaaggcaaatttgctataacctgccataacagaacagcacagaggcagcgcagcggctctcgggagcaagctggggcaagaggtggagctgaagccgggggagctgcaagcgacggctctcgggggcccggctcacccgccggcaggggccggcctgaagctactgcttccgctactcttgtgcggtctcccgggccccgccgatccagtgcctgggcagaagggggttctccacgcagcacacgatccttgttgggcgacccccgtttgaggtcccctggatcgaagggcgctgaaagtcggctaagaagtcccgtccgagctaagcctatcccaggccagaagacatcagaagctgacgacgcggccggggccgcagccgctgctgcgcggccagcacctcgcgaggcccaagtttcatccgtgcgtattgtctccgcctccggcacggtcagcgaggaaatagaggttcttgagatggtaaaggaggatgaagcaccactggccctctctgatgctgaacagccgcccccggcaaccgaactggagtccccagccgaggaatgttcatgggccggtctgttctccttccaggacctgagggcggtccaccagcaattatgctccgtgaactcgcagctggagccttgcctgccggtgttccctgaggagccctcgggcatgtggacggtgctatttggcggtgcccccgagatgactgagcaggagatcgataccctgtgttaccaactgcaggtgtatctgggccacgggctagatacatgcggctggaaaatcctgagtcaggtgttgttcactgaaactgacgatcccgaggagtattacgaaagtctgtctgaactgcgccagaagggatatgaagaagtcctccagagggcccggaagcgtattcaggaactgctcgataaacataagaataccgagagcatggttgagctactggacctttaccagatggaggacgaggcctactctagcttggccgaagctactacagaattataccagtacctcctgcagcccttcagggatatgcgcgagttggccatgttgagacgccagcaaataaagatctccatggaaaatgactacttggggccccgccgtatcgagtccctccaaaaagaggacgcggactggcagaggaaggctcatatggcagtactgtccatccaagatctgacagtaaaatactttgagatcaccgccaaagcacagaaggcagtgtacgaccgcatgcgcgcagaccagaagaagttcggaaaagcatcctgggctgccgctgccgaacggatggagaaactgcagtacgccgtgagcaaagagactttgcagatgatgagagccaaagagatctgcctggagcaaaggaagcacgcactcaaggaagaaatgcagtccttaagaggcggaacagaagcaattgcgaggctcgatcaactcgaggctgattactatgatcttcagctacaattatacgaggttcaattcgaaattctcaaatgcgaagagcttcttctgacagcccagttggaaagtattaagaggctgatcagcgagaagagagacgaggtggtgtattatgatacctatgaatcaatggaggcgatgctcgagaaagaggaaatggccgcttcggcctaccttcagcgcgaggaacttcagaaattacagcagaaggctagacagctggaggcccgaagggggagagtttcagccaaaaaaagctacctgcgaaacaagaaggaaatttgtatagcaaagcataacgagaaaattcaacaacgtacacgtatcgaggacgaataccgcacccaccacacagtccaacttaaacgagagaaactgcatgacgaggaagagcggaaatcggcttgggtgagtcaggaaaggcagcggacacttgatagactgcgcacttttaagcagaggtacccggggcaggtcattcttaaatcaacacgcctccggctcgcccatgctcggcggaagggggctgctagcccagttctgcaggaggatcattgtgattcccttccgtcagtcctccaagtggaggagaagactgaggaggttggagagggcagggtcaagcgcgggcctagccagaccaccgaaccacagtctctcgtccaactagaagatacaagcctcacccagcttgaagccaccagcttaccactgtccggggtgaccagtgaactgccaccaaccatctcactgccactgttaaataacaatttggagccatgttcagtgacaatcaaccctctcccaagccccctgccacccacacccccccctccgccacctcccccccctcctccacctcccccacccctgcctgtggctaaagattcgggccccgagactctggaaaaagacctgccacggaaggagggcaatgagaaaaggattcccaaatcagccagtgctcccagtgcccatctgtttgacagctctcagctggttagtgccagaaaaaagctgcgcaagacagccgagggccttcagcgtagacgagttagttcccctatggatgaggttctggcatccctgaagcgcggttcttttcacttaaagaaggtcgagcaaagaactctccctccctttccagatgaggacgactcaaacaatattttggcccagatccgcaagggagttaagcttaagaaagtacagaaggatgtgctgagggagagttttactctgctccctgacaccgaccccctgacaaggagtatccatgaagcactaagaagaattaaagaagcatccccagagagtgaagatgaggaggaggcactgccttgtacagactgggagaattag

SEQ ID NO: 243306 - DNA, 2934 bp, Artificial Sequence
  derived and/or modified sequence
atgtctttcgctctggaagaaacactggaaagtgattgggtggccgtgcgcccacatgtgttcgatgagcgcgagaagcacaaattcgtcttcattgtggcgtggaacgaaattgaggggaagtttgccattacatgtcacaaccgaactgctcaacgccagcgaagcggtagtcgggagcaggccggtgcacggggaggcgctgaagctggcggtgccgcatccgacgggtctaggggtccagggagccccgctggaagaggcaggccagaagccacggcgtccgctacattagttagaagtccagggccacgtcggtccagcgcctgggctgaggggggttcaccgcgttccacaagaagtttgctgggcgatcctagactgaggtcccccggttccaaaggtgccgaatccagattaagaagccctgtccgggctaaacctatccctggacagaagaccagtgaggcagatgatgcagcaggagcagcggctgccgctgctagacctgctccaagggaggctcaagtaagctctgtgaggatcgtttcagccagcgggactgtttcagaggagattgaggtgctcgaaatggtgaaagaggacgaagcccctctcgccctgtcagacgccgagcagccgcctccagccacggagcttgaaagccctgccgaggaatgttcctgggcaggtctgttttcctttcaggaccttcgggcagtacaccaacagctttgctccgtaaatagtcagcttgagccatgtctgcctgtcttccccgaagagccatcaggcatgtggacagtcctcttcggaggcgctcctgagatgacagagcaggagattgacaccctctgttaccaactacaggtgtacctcggtcacggcttggacacctgcggctggaagattctgagccaggtgctatttactgaaactgatgacccagaggaatactatgagtcactgagcgagttgcggcagaaaggctacgaagaggttcttcaaagggctaggaaaagaatacaggagctgctcgataagcataaaaacaccgaaagcatggttgaactgctggatctgtatcaaatggaggacgaggcgtactcaagcttagcagaggccaccaccgagctgtaccaatacttgctgcagccctttagagacatgagagaactcgccatgcttcgccgacaacaaataaagatcagcatggagaatgactatctgggtccacgtcgtatcgagagcctgcaaaaggaagatgctgattggcaacggaaggcccacatggctgtgctgtcgatccaggatctaacagtaaagtacttcgaaataactgccaaggcccaaaaggcagtatacgatagaatgagggccgaccagaagaaattcggaaaagctagttgggccgcagccgctgaacgaatggagaagctgcagtacgctgtatctaaagagacccttcaaatgatgcgtgccaaagagatttgtcttgaacaacgcaagcacgccctaaaggaggaaatgcaatcactgaggggaggtacagaggccatcgccaggttagaccagctggaagcagactactatgaccttcagcttcagctgtacgaagtccagtttgagatattgaagtgtgaggagttgctgttgacagctcagctagagtcaattaagaggctcataagcgagaagcgggatgaggtagtttactacgatacctatgagtcaatggaggcgatgctggaaaaagaggagatggcggcttctgcctatctgcaacgcgaagagctgcagaagttgcaacagaaagcacggcaactggaagctaggcggggtcgcgtgtctgccaagaagagttacctgaggaacaagaaagaaatctgcatcgccaagcacaatgagaagatacagcagcggacacggatcgaagacgagtatcgtacacaccacacggtgcagctgaaacgcgaaaaactacacgatgaggaagaacgcaagtcagcctgggtgagccaggagaggcagcggaccttggacaggcttagaacttttaagcaacgctatcctggacaggtgatcctaaagtcgacgcgcctccgcctcgcccacgcccgacgtaagggcgctgcttcccccgtgctccaggaggaccactgcgactccctccccagcgttctgcaggtcgaggagaaaaccgaagaggtgggagagggtagggttaagcgcggaccatctcagacaaccgaaccgcagtcactagtgcagctggaagacacttctctgacccagctcgaggctacgtctttacccctaagcggggtgacctccgaattgcctccaacaatatcccttcctttgctaaataacaatctcgagccttgttccgtgactattaatcccctcccatcgccactcccacccaccccacccccacctctgcctgtagcaaaggactcaggtcccgagaccctggaaaaggacctgccccgtaaggagggcaacgagaaaagaatacctaagtccgcctccgccccatcagctcacttgttcgattccagccaactagtgtcggccaggaagaaactcagaaagacagctgaaggcctccaaaggaggcgtgtgagtagccccatggacgaggtgctcgcctccctgaagcgtgggtcatttcatctcaagaaggtggaacagagaaccctgccaccgttccctgacgaggatgactctaacaacatcctcgcacagatcaggaaaggggttaaactgaagaaagttcagaaggacgtgttgcgggagtcctttacgttgcttcctgatacggatccgctgactcggagcattcacgaggctctgcgcaggatcaaggaggcttccccagaaagtgaggacgaagaagaggcattaccgtgcaccgactgggaaaattag

SEQ ID NO: 243307 - DNA, 2967 bp, Artificial Sequence
  derived and/or modified sequence
atgtccttcgccctcgaagaaacattggagtccgactgggttgccgttcggccacacgtctttgatgagcgggaaaagcataagttcgtgtttatcgtcgcctggaacgaaatcgagggcaaattcgctataacgtgtcataatagaaccgctcaaagacaacggagtgggagcagagaacaggccggagctaggggcggagccgaagccggaggagctgcttccgacggaagtcgcggacctggttcccccgctggcagaggcagacccgaagccacagcgtctgctacgcttgttagatccccaggaccccgaagatctagcgcatgggctgaaggaggctctcctcgcagcacacggagcctgcttggagatccaaggttgaggtctcctggttctaagggtgcggagtctcggctgcggagcccagtacgggcaaagcctatacccggtcaaaagacaagcgaggccgacgacgctgcgggtgcagccgcagcagcagcacgtcctgcccctcgcgaagcccaggtttcatcagtgcgtatagtgagtgcttctgggaccgtttctgaggagatcgaggttttggaaatggtgaaggaagatgaggcccctcttgccctttcagatgccgagcagcctcctccagcgacagagctcgaatcacccgctgaggaatgctcttgggccggattgttcagttttcaggatttacgcgcagtgcaccagcagttgtgctctgtcaatagccagctggaaccatgtctcccagtcttccctgaggagcctagtgggatgtggaccgtgctgttcggcggagcacctgagatgacggagcaggagatcgacactttgtgttaccagctgcaggtatatctcgggcacggcttggacacctgcggttggaaaattctgagccaggtgctgttcactgaaaccgacgacccggaagagtattacgaatctcttagcgagctgagacaaaaaggatatgaagaggtgttacagagggccaggaagagaattcaagagctgttggacaagcacaaaaacacagagtcaatggtcgagctcctggatctctaccagatggaggacgaggcttatagcagcctggctgaggctaccaccgagctttaccagtatttgctgcaaccttttcgcgatatgcgagaacttgctatgcttagaagacagcagatcaagatttcgatggaaaacgactatctcgggccacgcaggattgagagtcttcagaaggaagacgcagactggcagagaaaagcccatatggccgttcttagtatacaggatctgactgttaagtactttgaaattactgctaaggctcagaaggcggtgtatgacagaatgcgcgctgaccagaagaagtttgggaaggcttcttgggccgctgccgcagagcgtatggagaaactgcagtacgctgtgagtaaagagacccttcagatgatgagagccaaggaaatctgcttggagcagagaaagcatgcgctgaaagaggaaatgcagtcactgcgcggaggcaccgaagccattgcccgtctggatcagcttgaggcggactactacgacctgcagttacaattatatgaggtacagtttgaaatcctgaagtgtgaagaactgctgttgaccgctcagcttgaatcaattaaacgcctgattagcgaaaagcgcgacgaagttgtgtattatgacacctatgagtcaatggaagctatgctcgagaaagaagagatggccgctagcgcctatctgcagagagaagagttgcagaagttgcagcagaaggctagacagctcgaggcaaggcggggacgcgtgagcgccaagaaatcttatttaaggaataagaaggaaatctgtatagcaaagcataatgagaagattcaacagcggactcgaattgaagacgagtacagaacgcaccacactgtccagctgaagagggagaagttacacgacgaggaggagaggaagtcagcctgggtcagtcaggaaagacaaagaacactcgatcgtctgagaaccttcaagcagcgatatcccggacaggttatcctgaaatccaccaggctgaggcttgcgcacgccagacgcaaaggcgcagctagccccgtcttgcaggaagaccactgtgattcactgccttccgttctgcaggtcgaggagaaaaccgaagaggttggagagggacgcgtaaagcgaggaccttctcaaactaccgagccccaaagcttggtgcagttagaggatacaagccttacacagctggaggcaaccagcctccctctgagtggtgtaacttctgagctcccacccactatttctctcccacttctgaataacaatcttgagccatgcagcgtcacgatcaatccactgccctctccattgccccctacccctccacctccaccacctcctcctccaccaccacctccccctcccctgcctgtggcaaaagactccggccctgagacactggagaaggacctgcctcgcaaagagggcaacgaaaagaggatacctaagtcggctagcgccccaagcgctcacctctttgattcaagccagctcgtgtccgctcgtaagaaactgagaaaaaccgctgaaggtctccaacgcaggagagtttccagccctatggacgaggtgctcgcctctctgaagcgtggaagtttccatctcaaaaaggtcgagcaacgcactctccctccctttccagacgaggacgatagcaataacatactggctcagataaggaaaggtgtgaagctcaagaaggtgcaaaaggacgtcctgcgggaatcttttacgttactccctgatacagacccattaactcgctcaattcacgaggcactgcgtaggattaaagaggcctcaccagagtctgaagatgaggaagaggctctaccctgtacagactgggaaaattag

SEQ ID NO: 243308 - DNA, 2934 bp, Artificial Sequence
  derived and/or modified sequence
atgagcttcgccctggaggagaccctggagagcgactgggtggccgtgagaccccacgtgttcgacgagagagagaagcacaagttcgtgttcatcgtggcctggaacgagatcgagggcaagttcgccatcacctgccacaacagaaccgcccagagacagagaagcggcagcagagagcaggccggcgccagaggcggcgccgaggccggcggcgccgccagcgacggcagcagaggccccggcagccccgccggcagaggcagacccgaggccaccgccagcgccaccctggtgagaagccccggccccagaagaagcagcgcctgggccgagggcggcagccccagaagcaccagaagcctgctgggcgaccccagactgagaagccccggcagcaagggcgccgagagcagactgagaagccccgtgagagccaagcccatccccggccagaagaccagcgaggccgacgacgccgccggcgccgccgccgccgccgccagacccgcccccagagaggcccaggtgagcagcgtgagaatcgtgagcgccagcggcaccgtgagcgaggagatcgaggtgctggagatggtgaaggaggacgaggcccccctggccctgagcgacgccgagcagcccccccccgccaccgagctggagagccccgccgaggagtgcagctgggccggcctgttcagcttccaggacctgagagccgtgcaccagcagctgtgcagcgtgaacagccagctggagccctgcctgcccgtgttccccgaggagcccagcggcatgtggaccgtgctgttcggcggcgcccccgagatgaccgagcaggagatcgacaccctgtgctaccagctgcaggtgtacctgggccacggcctggacacctgcggctggaagatcctgagccaggtgctgttcaccgagaccgacgaccccgaggagtactacgagagcctgagcgagctgagacagaagggctacgaggaggtgctgcagagagccagaaagagaatccaggagctgctggacaagcacaagaacaccgagagcatggtggagctgctggacctgtaccagatggaggacgaggcctacagcagcctggccgaggccaccaccgagctgtaccagtacctgctgcagcccttcagagacatgagagagctggccatgctgagaagacagcagatcaagatcagcatggagaacgactacctgggccccagaagaatcgagagcctgcagaaggaggacgccgactggcagagaaaggcccacatggccgtgctgagcatccaggacctgaccgtgaagtacttcgagatcaccgccaaggcccagaaggccgtgtacgacagaatgagagccgaccagaagaagttcggcaaggccagctgggccgccgccgccgagagaatggagaagctgcagtacgccgtgagcaaggagaccctgcagatgatgagagccaaggagatctgcctggagcagagaaagcacgccctgaaggaggagatgcagagcctgagaggcggcaccgaggccatcgccagactggaccagctggaggccgactactacgacctgcagctgcagctgtacgaggtgcagttcgagatcctgaagtgcgaggagctgctgctgaccgcccagctggagagcatcaagagactgatcagcgagaagagagacgaggtggtgtactacgacacctacgagagcatggaggccatgctggagaaggaggagatggccgccagcgcctacctgcagagagaggagctgcagaagctgcagcagaaggccagacagctggaggccagaagaggcagagtgagcgccaagaagagctacctgagaaacaagaaggagatctgcatcgccaagcacaacgagaagatccagcagagaaccagaatcgaggacgagtacagaacccaccacaccgtgcagctgaagagagagaagctgcacgacgaggaggagagaaagagcgcctgggtgagccaggagagacagagaaccctggacagactgagaaccttcaagcagagataccccggccaggtgatcctgaagagcaccagactgagactggcccacgccagaagaaagggcgccgccagccccgtgctgcaggaggaccactgcgacagcctgcccagcgtgctgcaggtggaggagaagaccgaggaggtgggcgagggcagagtgaagagaggccccagccagaccaccgagccccagagcctggtgcagctggaggacaccagcctgacccagctggaggccaccagcctgcccctgagcggcgtgaccagcgagctgccccccaccatcagcctgcccctgctgaacaacaacctggagccctgcagcgtgaccatcaaccccctgcccagccccctgccccccaccccccccccccccctgcccgtggccaaggacagcggccccgagaccctggagaaggacctgcccagaaaggagggcaacgagaagagaatccccaagagcgccagcgcccccagcgcccacctgttcgacagcagccagctggtgagcgccagaaagaagctgagaaagaccgccgagggcctgcagagaagaagagtgagcagccccatggacgaggtgctggccagcctgaagagaggcagcttccacctgaagaaggtggagcagagaaccctgccccccttccccgacgaggacgacagcaacaacatcctggcccagatcagaaagggcgtgaagctgaagaaggtgcagaaggacgtgctgagagagagcttcaccctgctgcccgacaccgaccccctgaccagaagcatccacgaggccctgagaagaatcaaggaggccagccccgagagcgaggacgaggaggaggccctgccctgcaccgactgggagaactag

SEQ ID NO: 243309 - DNA, 2967 bp, Artificial Sequence
  derived and/or modified sequence
atgagcttcgccctggaggagaccctggagagcgactgggtggccgtgagaccccacgtgttcgacgagagagagaagcacaagttcgtgttcatcgtggcctggaacgagatcgagggcaagttcgccatcacctgccacaacagaaccgcccagagacagagaagcggcagcagagagcaggccggcgccagaggcggcgccgaggccggcggcgccgccagcgacggcagcagaggccccggcagccccgccggcagaggcagacccgaggccaccgccagcgccaccctggtgagaagccccggccccagaagaagcagcgcctgggccgagggcggcagccccagaagcaccagaagcctgctgggcgaccccagactgagaagccccggcagcaagggcgccgagagcagactgagaagccccgtgagagccaagcccatccccggccagaagaccagcgaggccgacgacgccgccggcgccgccgccgccgccgccagacccgcccccagagaggcccaggtgagcagcgtgagaatcgtgagcgccagcggcaccgtgagcgaggagatcgaggtgctggagatggtgaaggaggacgaggcccccctggccctgagcgacgccgagcagcccccccccgccaccgagctggagagccccgccgaggagtgcagctgggccggcctgttcagcttccaggacctgagagccgtgcaccagcagctgtgcagcgtgaacagccagctggagccctgcctgcccgtgttccccgaggagcccagcggcatgtggaccgtgctgttcggcggcgcccccgagatgaccgagcaggagatcgacaccctgtgctaccagctgcaggtgtacctgggccacggcctggacacctgcggctggaagatcctgagccaggtgctgttcaccgagaccgacgaccccgaggagtactacgagagcctgagcgagctgagacagaagggctacgaggaggtgctgcagagagccagaaagagaatccaggagctgctggacaagcacaagaacaccgagagcatggtggagctgctggacctgtaccagatggaggacgaggcctacagcagcctggccgaggccaccaccgagctgtaccagtacctgctgcagcccttcagagacatgagagagctggccatgctgagaagacagcagatcaagatcagcatggagaacgactacctgggccccagaagaatcgagagcctgcagaaggaggacgccgactggcagagaaaggcccacatggccgtgctgagcatccaggacctgaccgtgaagtacttcgagatcaccgccaaggcccagaaggccgtgtacgacagaatgagagccgaccagaagaagttcggcaaggccagctgggccgccgccgccgagagaatggagaagctgcagtacgccgtgagcaaggagaccctgcagatgatgagagccaaggagatctgcctggagcagagaaagcacgccctgaaggaggagatgcagagcctgagaggcggcaccgaggccatcgccagactggaccagctggaggccgactactacgacctgcagctgcagctgtacgaggtgcagttcgagatcctgaagtgcgaggagctgctgctgaccgcccagctggagagcatcaagagactgatcagcgagaagagagacgaggtggtgtactacgacacctacgagagcatggaggccatgctggagaaggaggagatggccgccagcgcctacctgcagagagaggagctgcagaagctgcagcagaaggccagacagctggaggccagaagaggcagagtgagcgccaagaagagctacctgagaaacaagaaggagatctgcatcgccaagcacaacgagaagatccagcagagaaccagaatcgaggacgagtacagaacccaccacaccgtgcagctgaagagagagaagctgcacgacgaggaggagagaaagagcgcctgggtgagccaggagagacagagaaccctggacagactgagaaccttcaagcagagataccccggccaggtgatcctgaagagcaccagactgagactggcccacgccagaagaaagggcgccgccagccccgtgctgcaggaggaccactgcgacagcctgcccagcgtgctgcaggtggaggagaagaccgaggaggtgggcgagggcagagtgaagagaggccccagccagaccaccgagccccagagcctggtgcagctggaggacaccagcctgacccagctggaggccaccagcctgcccctgagcggcgtgaccagcgagctgccccccaccatcagcctgcccctgctgaacaacaacctggagccctgcagcgtgaccatcaaccccctgcccagccccctgccccccacccccccccccccccccccccccccccccccccccccccccccccccctgcccgtggccaaggacagcggccccgagaccctggagaaggacctgcccagaaaggagggcaacgagaagagaatccccaagagcgccagcgcccccagcgcccacctgttcgacagcagccagctggtgagcgccagaaagaagctgagaaagaccgccgagggcctgcagagaagaagagtgagcagccccatggacgaggtgctggccagcctgaagagaggcagcttccacctgaagaaggtggagcagagaaccctgccccccttccccgacgaggacgacagcaacaacatcctggcccagatcagaaagggcgtgaagctgaagaaggtgcagaaggacgtgctgagagagagcttcaccctgctgcccgacaccgaccccctgaccagaagcatccacgaggccctgagaagaatcaaggaggccagccccgagagcgaggacgaggaggaggccctgccctgcaccgactgggagaactag

SEQ ID NO: 243310 - protein, 768 aa, Artificial Sequence
  derived and/or modified sequence
MDRGQVLEQLLPELTGLLSLLDHEYLSDTTLEKKMAVASILQSLQPLPAKEVSYLYVNTADLHSGPSFVESLFEEFDCDLSDLRDMPEDDGEPSKGASPELAKSPRLRNAADLPPPLPNKPPPEDYYEEALPLGPGKSPEYISSHNGCSPSHSIVDGYYEDADSSYPATRVNGELKSSYNDSDAMSSSYESYDEEEEEGKSPQPRHQWPSEEASMHLVRECRICAFLLRKKRFGQWAKQLTVIREDQLLCYKSSKDRQPHLRLALDTCSIIYVPKDSRHKRHELRFTQGATEVLVLALQSREQAEEWLKVIREVSKPVGGAEGVEVPRSPVLLCKLDLDKRLSQEKQTSDSDSVGVGDNCSTLGRRETCDHGKGKKSSLAELKGSMSRAAGRKITRIIGFSKKKTLADDLQTSSTEEEVPCCGYLNVLVNQGWKERWCRLKCNTLYFHKDHMDLRTHVNAIALQGCEVAPGFGPRHPFAFRILRNRQEVAILEASCSEDMGRWLGLLLVEMGSRVTPEALHYDYVDVETLTSIVSAGRNSFLYARSCQNQWPEPRVYDDVPYEKMQDEEPERPTGAQVKRHASSCSEKSHRVDPQVKVKRHASSANQYKYGKNRAEEDARRYLVEKEKLEKEKETIRTELIALRQEKRELKEAIRSSPGAKLKALEEAVATLEAQCRAKEERRIDLELKLVAVKERLQQSLAGGPALGLSVSSKPKSGETANKPQNSVPEQPLPVNCVSELRKRSPSIVASNQGRVLQKAKEWEMKKT

SEQ ID NO: 243311 - DNA, 2307 bp, Artificial Sequence
  derived and/or modified sequence
atggatcgaggacaggtgctggaacaactattaccagagctcaccgggctgctctctctactcgatcatgagtatctttccgacaccacgctggagaagaagatggctgttgccagtattctgcagagcctccaaccactgccagccaaagaagtgagttatctgtatgtgaacaccgccgatctccactctggacctagcttcgtcgagtccctctttgaagaattcgattgcgacttgagcgacttgcgggacatgccagaggacgatggagagccatcgaaaggagccagtccggagttggccaagtcacctagattgcgaaatgctgctgatctgccacctccccttccaaataaacccccgcccgaggattattacgaggaagcactgcccctgggccccggaaaatcacctgagtacatttccagccacaatggatgcagcccctcccactccattgtcgatggctactacgaggacgcagactcttcataccctgctaccagggtaaacggcgaactgaagagcagctacaatgattccgatgccatgtcctcatcttacgagagttatgatgaagaagaagaagaaggtaagtcgcctcagccccggcatcagtggccatcagaggaggcaagcatgcacttggttcgtgagtgtaggatctgcgctttcctgctccggaagaagcgcttcgggcagtgggcaaaacagctaactgttatccgggaggaccagctgctttgctacaaaagctccaaggatcggcagcctcacttgagactggcattggacacctgcagtatcatatacgttccaaaggatagtagacacaaaagacacgaactgcgtttcacacagggagctaccgaggtgctagttctcgccctgcagtcaagagaacaggcggaggagtggctgaaagtgattagagaggtgagtaaacccgtcgggggcgcagaaggggtcgaagtccccagatctcccgttctgctttgcaagttagacttggacaagcggctgagtcaggaaaagcagacctctgactccgatagtgtcggggtgggggataactgcagcaccttagggaggagggagacttgtgatcatggaaagggtaagaagagcagtctcgctgagcttaaggggagtatgtcaagagcggcggggcgtaaaatcacccgcatcatcggtttctccaaaaagaagaccttggctgatgaccttcagaccagctcaaccgaggaggaagttccatgttgtggctatctgaatgtgcttgtgaaccagggctggaaggagcgctggtgccgtctaaagtgtaataccctgtatttccataaggaccatatggacttacgaacccatgttaatgcaatcgctctacaaggttgcgaggtggcccctggctttgggccacggcatccattcgcctttcggatccttaggaaccggcaggaagttgccattttggaggcttcttgttccgaggacatggggagatggcttgggctactgctagtggagatggggtcccgcgttactcccgaggccctgcactatgactacgtggacgtagagactcttacgtctatcgtgagcgctggacggaactctttcctatacgctcgctcatgccagaatcagtggcccgagcctcgcgtctatgatgatgtcccctacgagaaaatgcaggatgaggaaccagaaagacctactggcgctcaggtgaaaagacatgccagcagctgcagcgaaaaaagccaccgcgtcgaccctcaagtcaaggtgaagagacacgcttcaagtgctaaccaatacaaatatggcaaaaatagagctgaggaggacgcgagacgctacctggttgagaaggagaaacttgaaaaggagaaggaaactattcggacagagctcattgcactgagacaggaaaagagggaattgaaggaggcaatcagatcttcccctggtgccaagctgaaggccctagaggaggcagtggctaccctggaggcacagtgtcgggcaaaagaagagaggagaatcgatctggagctcaaactggttgccgtgaaggagcgactgcaacagtccttggccggcggacctgcgctaggcttgagcgtttcctcaaagccaaagagcggagagactgccaacaaaccacaaaacagtgtcccagagcaaccactgccagtgaactgtgtgtccgagctgcgcaagagaagtccatcaatcgttgctagcaatcagggcagagtgttacagaaagccaaagagtgggagatgaagaagacatag

SEQ ID NO: 243312 - DNA, 2307 bp, Artificial Sequence
  derived and/or modified sequence
atggaccggggccaggtgctggagcagctgctgcctgagctgaccggcctgctgagcctgctggaccacgagtacctgagtgacaccaccctggagaagaagatggctgtggccagcatcctgcagagcctgcagcccctgcctgccaaggaggtgtcctacctgtatgtgaacacagctgacctgcacagcggccccagctttgtggagagcctgtttgaggagtttgactgtgacctgagtgacctgcgggacatgccagaagatgatggagagcccagcaaaggagccagccctgagctggccaagagcccccggctgagaaatgctgctgacctgcccccacccctgcccaacaagcccccacctgaggactactatgaggaggccctgcccctgggccctgggaagagccctgagtacatcagcagccacaacggctgcagccccagccacagcatcgtggatggctactatgaagatgctgacagcagctacccagccaccagggtgaatggagagctgaagagcagctacaatgacagtgatgccatgagcagcagctatgagagctatgatgaggaggaggaggagggcaagagcccccagcccaggcaccagtggcccagcgaggaggcctccatgcacctggtgcgggagtgccgcatctgtgccttcctgctgaggaagaagagatttggccagtgggccaagcagctgaccgtcatccgggaggaccagctgctgtgctacaagagcagcaaggaccggcagccccacctgcggctggccctggacacctgcagcatcatctacgtgcccaaggacagccgccacaagagacatgagctgcgcttcacccagggcgccacagaggtgctggtgctggccctgcagagccgggagcaggccgaggagtggctgaaggtgatccgggaggtgtccaagcctgtgggcggcgctgagggcgtggaggtgcccaggagccctgtgctgctgtgcaagctggacctggacaagaggctgagccaggagaagcagaccagtgacagcgacagcgtgggcgtgggggacaactgcagcaccctgggcagaagagagacctgtgaccacggcaagggcaagaagagcagcctggccgagctgaagggctccatgagcagagctgctggcaggaagatcacccgcatcatcggcttcagcaagaagaagaccctggctgatgacctgcagaccagcagcacagaggaggaggtgccctgctgcggctacctgaatgtgctggtgaaccagggctggaaggagcgctggtgccgcctgaagtgcaacaccctgtacttccacaaggaccacatggacctgcggacccacgtgaatgccatcgccctgcagggctgtgaggtggcccctggcttcggccccaggcacccctttgccttccgcatcctgaggaaccggcaggaggtggccatcctggaggccagctgcagcgaggacatgggccgctggctgggcctgctgctggtggagatgggcagccgggtgaccccagaggccctgcactatgactatgtggatgtggagaccctgaccagcatcgtgtctgctggcaggaacagcttcctgtatgcccggagctgccagaaccagtggccagagccccgggtgtatgatgatgtgccctatgagaagatgcaggatgaggagcctgagcggcccaccggggcccaggtgaagagacatgccagcagctgcagcgagaagagccaccgggtggacccccaggtgaaggtgaagagacatgccagcagcgccaaccagtacaagtatggcaagaacagagcagaagaagatgcccggcgctacctggtggagaaggagaagctggagaaggagaaggagaccatcagaacagagctgattgccctgcggcaggagaagcgggagctgaaggaggccatccgcagcagccctggggccaagctgaaggccctggaggaggccgtggccaccctggaggcccagtgccgggccaaggaggagaggagaattgacctggagctgaagctggtggccgtgaaggagcggctgcagcagagcctggccggcggccctgccctgggcctgtctgtgagcagcaagcccaagtctggagaaacagccaacaagccccagaacagcgtgcctgagcagcccctgcctgtgaactgtgtgtctgagctgaggaagaggagccccagcatcgtggccagcaaccagggccgggtgctgcagaaggccaaggagtgggagatgaagaagacctag

SEQ ID NO: 243313 - DNA, 2307 bp, Artificial Sequence
  derived and/or modified sequence
atggaccggggccaggtgctggagcagctgctgcccgagctgaccgggttgctgtcgttactcgaccacgaatatctttctgacaccacactagagaaaaagatggctgtagccagcatccttcaaagccttcagcctctgccagctaaagaagtgagttatctctacgtgaacaccgccgatcttcattctggcccgagctttgtcgagagtttattcgaggagtttgactgcgatcttagcgatctgagagacatgcctgaggacgatggcgagccctccaagggcgcgtcccccgagcttgctaagagcccccggctcagaaacgccgctgacttaccgccaccactgccaaacaagcctccccccgaagattactacgaggaggccctacccttaggccccggaaagtcccccgaatacatcagcagtcacaatggctgtagccccagtcatagcattgtggacggatattacgaggacgcggactcctcatatcctgctactagagtgaacggagaactaaagagctcctacaacgattccgatgccatgtcctccagctacgagtcatatgatgaagaagaggaggaaggtaagtccccccagccaaggcaccagtggccaagcgaggaggcatctatgcacctggtccgagagtgtaggatctgcgcgtttctgctgagaaaaaagcgcttcggacagtgggccaagcagctcacggtgattcgcgaggatcaacttttatgctacaagagttctaaggatcgccagccccatttgcggctggccctcgacacatgctctataatctatgtccccaaggattctaggcataagagacacgagctgcgctttacacagggcgccactgaagttcttgtacttgcattgcagtccagagagcaagctgaggaatggttgaaggtgattcgcgaggtcagcaaacctgtcgggggtgccgagggtgtggaggtgccacgcagcccggtgctcctgtgtaagctggacttagacaaacggcttagtcaggaaaaacagacctccgacagcgactccgtcggagtgggcgacaactgcagcacactggggcgaagagagacctgcgaccatggcaagggcaagaaatcttcactggctgaactgaaggggtccatgagtcgcgccgcaggtcgcaaaataacgagaataatcgggttttcaaagaagaagactttggctgacgatctgcagacttcctccaccgaagaggaagtgccatgctgtggctaccttaatgtgctagtgaaccagggttggaaagaacggtggtgtagattaaagtgcaataccctgtacttccataaggaccacatggacctccggactcatgtcaacgccattgccttgcaggggtgcgaggtggctccaggttttggaccacgtcatccttttgcattccgaattcttaggaaccggcaggaggtggccatactcgaggcatcttgttccgaagatatgggacggtggttgggtcttctacttgtggagatgggatcccgcgttaccccggaggctctgcactacgactatgtcgacgtcgagaccttaacgtcgatcgtttccgccggtcgcaacagttttttgtatgcacggtcctgccagaatcaatggcctgaacctcgcgtttatgatgacgtgccttacgaaaagatgcaggacgaggagcccgagaggcccacgggcgcacaggtgaagcggcacgccagttcatgttcagaaaagagccaccgtgtggatccccaggtcaaagtcaagcggcatgccagcagtgcaaaccagtataagtatggaaaaaaccgagccgaggaggacgcccgtaggtacctcgtggagaaagagaaattagagaaggagaaagagacgattcggacagagttgatcgcgctgcgccaggagaaacgggagctcaaggaggctattcgctccagtcctggggccaaacttaaagccctggaagaggccgttgcaacactcgaggctcagtgccgtgcaaaagaagagcggcgtattgacctggagctcaaactggtggccgtgaaggagcgattacagcagagtctggccggtggccctgcgctcggactgtccgtctcttccaaacctaagtccggggagactgcgaataagccacagaacagcgtcccagaacaacccttgcccgtgaactgcgtcagtgaactgaggaagcgtagtcctagcatagtcgcatccaaccaggggcgggtgcttcagaaagccaaagaatgggaaatgaaaaagacatag

SEQ ID NO: 243314 - DNA, 2307 bp, Artificial Sequence
  derived and/or modified sequence
atggaccgagggcaggtgttggaacagttgctgcctgaattaactggtctgctgtcactgctcgatcacgagtatctcagtgacactacactggaaaagaagatggctgttgccagcattctgcagagcctgcaacccttgccagccaaggaggtctcgtatctgtacgtgaacactgccgatttacattccggcccatccttcgtggaatccttatttgaggaatttgattgcgatctgtccgaccttcgggacatgcctgaagatgacggcgagccttccaagggcgcatcgccggagttggcgaagtcccctaggttgcgcaatgccgctgatctgccgccacctctacctaacaagcctcccccagaagattactacgaagaagctctgcctctgggtccaggcaagtcgcccgaatatatatcatctcacaatgggtgttcaccttctcattccattgtggacggttactatgaagatgctgatagctcgtacccagccacacgggttaacggggaactgaaatcctcctataacgactctgatgcaatgtctagcagctatgagtcttatgacgaggaagaagaggaaggtaagagtccgcagccacggcaccagtggccttctgaggaggccagtatgcaccttgtccgcgaatgccgaatttgcgcctttctgctccgcaaaaagcggtttgggcagtgggcaaagcagctaactgtgatcagagaagatcagttactgtgctataagagcagcaaagaccgccagccacacttacgtctggccctggatacttgctccatcatttacgtgcctaaagacagccgacacaagaggcacgagctgaggtttacccagggcgcaactgaggtgctggttctagcattgcagagtagggaacaggctgaggagtggttaaaggtgatacgggaagtgtcaaagcctgtaggtggagcagagggagtggaggtgcccaggtcccccgtcttgctgtgcaagttagacctggacaagaggctgagtcaggagaaacagacatctgatagcgattctgtgggagtcggagataactgctctacactgggcagacgtgagacctgcgaccacggtaaaggcaagaagtctagcctggcggagctgaaagggagcatgagcagagccgcaggcaggaagattacacgcataattggattcagcaagaaaaaaaccctcgccgacgacttacagacttcctccaccgaagaagaagtcccctgctgtggatatctaaacgtcctcgtgaatcaggggtggaaggaacgttggtgccgtctcaaatgcaacaccctttattttcataaagatcatatggacctgcggacccatgtgaatgcgattgcactccagggatgtgaagtcgctccgggttttggaccacggcacccttttgctttccgtattctccgcaatcgccaagaggtggcgatcttggaggcctcctgttccgaagatatggggagatggctgggtctgcttcttgtagaaatgggttctcgagtcactccagaagccctgcactacgattacgtggacgtcgagacactaactagtatagtgtctgctggcaggaactcgtttttatatgcaaggagctgccaaaatcagtggcccgagccacgggtgtatgacgatgtgccctatgaaaaaatgcaagacgaggaacctgagagaccaactggcgctcaggtaaaaaggcatgcttctagttgttcggagaaatcccatcgcgtggatcctcaagtgaaggtcaagaggcatgccagctccgctaaccagtataaatacggcaagaatagggctgaggaagatgccaggagatacctggttgaaaaggagaagctcgagaaggaaaaggagacgatccgaacagaattgatcgctctgcgtcaggaaaagagggaactgaaggaagcaattcggagttcacccggtgccaagctgaaagccctggaagaagcagtcgcaacgctcgaggcccagtgtcgcgctaaagaggagcgacgaatcgatttggagctcaaacttgtggccgtgaaagagcggttgcagcaatcacttgccggtggtccggcactggggttaagcgtatcctccaagcccaaatccggagaaacggccaacaaaccgcaaaactcggtgcctgagcaaccccttccagtaaattgtgtttctgagctgcggaagagaagcccgtctattgtagcctcgaaccaaggcagagtccttcagaaggctaaagaatgggagatgaagaagacctag

SEQ ID NO: 243315 - DNA, 4177 bp, Artificial Sequence
  derived and/or modified sequence
ccgctgggctggcctgagagcgcagcgcgccggccgctaccagccgcgccggagcccctgcgccctgcggcccgctccccggggaccgggccggcgccatggaccgaggccaggtgctggagcagctgctcccagagctcaccgggctgctcagcctcctggaccacgagtacctcagcgataccaccctggaaaagaagatggccgtggcctccatcctgcagagcctgcagccccttccagcaaaggaggtctcctacctgtatgtgaacacagcagacctccactcggggcccagcttcgtggaatccctctttgaagaatttgactgtgacctgagtgaccttcgggacatgccagaggatgatggggagcccagcaaaggagccagccctgagctagccaagagcccacgcctgagaaacgcggccgacctgcctccaccgctccccaacaagcctccccctgaggactactatgaagaggcccttcctctgggacccggcaagtcgcctgagtacatcagctcccacaatggctgcagcccctcacactcgattgtggatggctactatgaggacgcagacagcagctaccctgcaaccagggtgaacggcgagcttaagagctcctataatgactctgacgcaatgagcagctcctatgagtcctacgatgaagaggaggaggaagggaagagcccgcagccccgacaccagtggccctcagaggaggcctccatgcacctggtgagggaatgcaggatatgtgccttcctgctgcggaaaaagcgtttcgggcagtgggccaagcagctgacggtcatcagggaggaccagctcctgtgttacaaaagctccaaggatcggcagccacatctgaggttggcactggatacctgcagcatcatctacgtgcccaaggacagccggcacaagaggcacgagctgcgtttcacccagggggctaccgaggtcttggtgctggcactgcagagccgagagcaggccgaggagtggctgaaggtcatccgagaagtgagcaagccagttgggggagctgagggagtggaggtccccagatccccagtcctcctgtgcaagttggacctggacaagaggctgtcccaagagaagcagacctcagattctgacagcgtgggtgtgggtgacaactgttctacccttggccgccgggagacctgtgatcacggcaaagggaagaagagcagcctggcagaactgaagggctcaatgagcagggctgcgggccgcaagatcacccgtatcattggcttctccaagaagaagacactggccgatgacctgcagacgtcctccaccgaggaggaggttccctgctgtggctacctgaacgtgctggtgaaccagggctggaaggaacgctggtgccgcctgaagtgcaacactctgtatttccacaaggatcacatggacctgcgaacccatgtgaacgccatcgccctgcaaggctgtgaggtggccccgggctttgggccccgacacccatttgccttcaggatcctgcgcaaccggcaggaggtggccatcttggaggcaagctgttcagaggacatgggtcgctggctcgggctgctgctggtggagatgggctccagagtcactccggaggcgctgcactatgactacgtggatgtggagaccttaaccagcatcgtcagtgctgggcgcaactccttcctatatgcaagatcctgccagaatcagtggcctgagccccgagtctatgatgatgttccttatgaaaagatgcaggacgaggagcccgagcgccccacaggggcccaggtgaagcgtcacgcctcctcctgcagtgagaagtcccatcgtgtggacccgcaggtcaaagtcaaacgccacgcctccagtgccaatcaatacaagtatggcaagaaccgagccgaggaggatgcccggaggtacttggtagaaaaagagaagctggagaaagagaaagagacgattcggacagagctgatagcactgagacaggagaagagggaactgaaggaagccattcggagcagcccaggagcaaaattaaaggctctggaagaagccgtggccaccctggaagctcagtgtcgggcaaaggaggagcgccggattgacctggagctgaagctggtggctgtgaaggagcgcttgcagcagtccctggcaggagggccagccctggggctctccgtgagcagcaagcccaagagtggggaaactgcaaataaaccccagaacagcgttccagagcaacctctccctgtcaactgtgtttctgagctgaggaagaggagcccatccatcgtagcctccaaccaaggaagggtgctacagaaagccaaggaatgggaaatgaagaagacctaggaagaggatgaggatttcattccaaaggaaataccagcttgtccacctgaggaagaaatgcttttttcacaaggagacaccaagagaagactaggaagtagccctcgttctccagggcacccaaaataccagcctttattgtctgcatgattttaggggatatggggagggaacaagtagaagggaagagggaaatggagagcatccttatgactttacaaagggtggaaatgaggatggagggatacagaagtctgcacagctgtaaaggttttatagatgtctttgccttcccttctgaggaagggaagaagtaatgaaagcacatgtgaataaccccttccatcccattcacagcatcgcactcccagtccttaaggcaaagggaggcagtgctgaagcattggtggtgcagtgtaaagagacaagacctgatcatctgatcacacttgtgccaacttgattcatattgggcattactaacaacccctggtcaaggtaaataggttgaacaatcaataacattatccctgcctgcatacatgtgaacaaaagctatagaggacatgcaaattctacagtcattcctcatatgctttagacagagtgcagctactggaatcttccagatttcagtgttttaaaatcagagctctgaatacacaaaaggaaagagaaatggagcagctgacatattttaagctcacagtgatactcagtgacaggagcacagagctctaatgtccacaggatgttgtagggtagggtctctcagtaaatcaagtcccttacctatgttctgacactgaggctcttggagctatgggttagaaatccaggaggcaatatgtctttattctaatgaagtcctcatcttgcactcagaggcccactagtttgcccttctatatattaagtaaaaccaagagaaattaagaggatgatggcttctttctgtcacatgggtgctaaaccttttacaaacacttgatacttctatagagggaccaaggacctcaagtcctgggcagtctccttactgtgctactcactactgtctcaacactgtagtgagtctgtctttaacacatttccttccaataaagataaaaccacttaactcttaagtgccagtgcttagctcaagaggaaagaaggaaaatcccagaataaccgtggccactttgctataggggttacatattttaacccacctaaggttttacagactttagcctcactcaaactttatcaccctctgaggtagctggagaccacagcaggaaaaataacctgaccagtaatcacccactgattagtggcagagcgtaggacttaggggttataagcccagatccagatagggctaggtttgagccatgcctctaatgaccagctgggtgaccttgggaaagtcacttgattgctctgattcttgttttccttatctgtgaaatgggactaacaattgttacttttctcccaagattgttgggaagatttaataagataatatatagtaggcatcttgcatagtgtctgagaaataagaaatgctcagtcaatagtggctctcattagccaggcatggtggtactcgcctgtagtcccagctactcaggaggctgaggcaggaggaccgcttgagcccaggagtttgagactgtagtgcactatgatcacgcctgtgaattgccactgcactccagcctaagcaaatagcaagaccccatctattaaaaaaaaaaagtggctattattagctatatcag

SEQ ID NO: 243316 - DNA, 2307 bp, Artificial Sequence
  derived and/or modified sequence
atggacagaggccaggtgctggagcagctgctgcccgagctgaccggcctgctgagcctgctggaccacgagtacctgagcgacaccaccctggagaagaagatggccgtggccagcatcctgcagagcctgcagcccctgcccgccaaggaggtgagctacctgtacgtgaacaccgccgacctgcacagcggccccagcttcgtggagagcctgttcgaggagttcgactgcgacctgagcgacctgagagacatgcccgaggacgacggcgagcccagcaagggcgccagccccgagctggccaagagccccagactgagaaacgccgccgacctgcccccccccctgcccaacaagcccccccccgaggactactacgaggaggccctgcccctgggccccggcaagagccccgagtacatcagcagccacaacggctgcagccccagccacagcatcgtggacggctactacgaggacgccgacagcagctaccccgccaccagagtgaacggcgagctgaagagcagctacaacgacagcgacgccatgagcagcagctacgagagctacgacgaggaggaggaggagggcaagagcccccagcccagacaccagtggcccagcgaggaggccagcatgcacctggtgagagagtgcagaatctgcgccttcctgctgagaaagaagagattcggccagtgggccaagcagctgaccgtgatcagagaggaccagctgctgtgctacaagagcagcaaggacagacagccccacctgagactggccctggacacctgcagcatcatctacgtgcccaaggacagcagacacaagagacacgagctgagattcacccagggcgccaccgaggtgctggtgctggccctgcagagcagagagcaggccgaggagtggctgaaggtgatcagagaggtgagcaagcccgtgggcggcgccgagggcgtggaggtgcccagaagccccgtgctgctgtgcaagctggacctggacaagagactgagccaggagaagcagaccagcgacagcgacagcgtgggcgtgggcgacaactgcagcaccctgggcagaagagagacctgcgaccacggcaagggcaagaagagcagcctggccgagctgaagggcagcatgagcagagccgccggcagaaagatcaccagaatcatcggcttcagcaagaagaagaccctggccgacgacctgcagaccagcagcaccgaggaggaggtgccctgctgcggctacctgaacgtgctggtgaaccagggctggaaggagagatggtgcagactgaagtgcaacaccctgtacttccacaaggaccacatggacctgagaacccacgtgaacgccatcgccctgcagggctgcgaggtggcccccggcttcggccccagacaccccttcgccttcagaatcctgagaaacagacaggaggtggccatcctggaggccagctgcagcgaggacatgggcagatggctgggcctgctgctggtggagatgggcagcagagtgacccccgaggccctgcactacgactacgtggacgtggagaccctgaccagcatcgtgagcgccggcagaaacagcttcctgtacgccagaagctgccagaaccagtggcccgagcccagagtgtacgacgacgtgccctacgagaagatgcaggacgaggagcccgagagacccaccggcgcccaggtgaagagacacgccagcagctgcagcgagaagagccacagagtggacccccaggtgaaggtgaagagacacgccagcagcgccaaccagtacaagtacggcaagaacagagccgaggaggacgccagaagatacctggtggagaaggagaagctggagaaggagaaggagaccatcagaaccgagctgatcgccctgagacaggagaagagagagctgaaggaggccatcagaagcagccccggcgccaagctgaaggccctggaggaggccgtggccaccctggaggcccagtgcagagccaaggaggagagaagaatcgacctggagctgaagctggtggccgtgaaggagagactgcagcagagcctggccggcggccccgccctgggcctgagcgtgagcagcaagcccaagagcggcgagaccgccaacaagccccagaacagcgtgcccgagcagcccctgcccgtgaactgcgtgagcgagctgagaaagagaagccccagcatcgtggccagcaaccagggcagagtgctgcagaaggccaaggagtgggagatgaagaagacctag

SEQ ID NO: 243317 - protein, 550 aa, Artificial Sequence
  derived and/or modified sequence
MKWEEYEELLHYAIVTPNIEPCASQSSHPKGELVPDVRISTIHDILHSQGNNSEVRETAIEVGKGCDFHISSHSKTDESSPVLSPRKPSHPVMDFFSSHLLADSSSPATNSSHTDAHEILVSDFLVSDENLQKMENVLDLWSSGLKTNIISELSKWRLNFIDWHRMEMRKEKEKHAAHLKQLCNQINELKELQKTFEISIGRKDEVISSLSHAIGKQKEKIELMRTFFHWRIGHVRARQDVYEGKLADQYYQRTLLKKVWKVWRSVVQKQWKDVVERACQARAEEVCIQISNDYEAKVAMLSGALENAKAEIQRMQHEKEHFEDSMKKAFMRGVCALNLEAMTIFQNRNDAGIDSTNNKKEEYGPGVQGKEHSAHLDPSAPPMPLPVTSPLLPSPPAAVGGASATAVPSAASMTSTRAASASSVHVPVSALGAGSAATAASEEMYVPRVVTSAQQKAGRTITARITGRCDFASKNRISSSLAIMGVSPPMSSVVVEKHHPVTVQTIPQATAAKYPRTIHPESSTSASRSLGTRSAHTQSLTSVHSIKVVD

SEQ ID NO: 243318 - DNA, 1653 bp, Artificial Sequence
  derived and/or modified sequence
atgaagtgggaggagtacgaggagctgctgcactacgccatcgtgacccccaacatcgagccctgcgccagccagagcagccaccccaagggcgagctggtgcccgacgtgagaatcagcaccatccacgacatcctgcacagccagggcaacaacagcgaggtgagagagaccgccatcgaggtgggcaagggctgcgacttccacatcagcagccacagcaagaccgacgagagcagccccgtgctgagccccagaaagcccagccaccccgtgatggacttcttcagcagccacctgctggccgacagcagcagccccgccaccaacagcagccacaccgacgcccacgagatcctggtgagcgacttcctggtgagcgacgagaacctgcagaagatggagaacgtgctggacctgtggagcagcggcctgaagaccaacatcatcagcgagctgagcaagtggagactgaacttcatcgactggcacagaatggagatgagaaaggagaaggagaagcacgccgcccacctgaagcagctgtgcaaccagatcaacgagctgaaggagctgcagaagaccttcgagatcagcatcggcagaaaggacgaggtgatcagcagcctgagccacgccatcggcaagcagaaggagaagatcgagctgatgagaaccttcttccactggagaatcggccacgtgagagccagacaggacgtgtacgagggcaagctggccgaccagtactaccagagaaccctgctgaagaaggtgtggaaggtgtggagaagcgtggtgcagaagcagtggaaggacgtggtggagagagcctgccaggccagagccgaggaggtgtgcatccagatcagcaacgactacgaggccaaggtggccatgctgagcggcgccctggagaacgccaaggccgagatccagagaatgcagcacgagaaggagcacttcgaggacagcatgaagaaggccttcatgagaggcgtgtgcgccctgaacctggaggccatgaccatcttccagaacagaaacgacgccggcatcgacagcaccaacaacaagaaggaggagtacggccccggcgtgcagggcaaggagcacagcgcccacctggaccccagcgccccccccatgcccctgcccgtgaccagccccctgctgcccagcccccccgccgccgtgggcggcgccagcgccaccgccgtgcccagcgccgccagcatgaccagcaccagagccgccagcgccagcagcgtgcacgtgcccgtgagcgccctgggcgccggcagcgccgccaccgccgccagcgaggagatgtacgtgcccagagtggtgaccagcgcccagcagaaggccggcagaaccatcaccgccagaatcaccggcagatgcgacttcgccagcaagaacagaatcagcagcagcctggccatcatgggcgtgagcccccccatgagcagcgtggtggtggagaagcaccaccccgtgaccgtgcagaccatcccccaggccaccgccgccaagtaccccagaaccatccaccccgagagcagcaccagcgccagcagaagcctgggcaccagaagcgcccacacccagagcctgaccagcgtgcacagcatcaaggtggtggactag

SEQ ID NO: 243319 - DNA, 1653 bp, Artificial Sequence
  derived and/or modified sequence
atgaaatgggaagagtatgaggagctcctgcactatgcaatcgtgaccccaaacatagaaccttgcgctagtcagagtagccatccgaagggggaactcgtacccgacgttagaatctcgactattcacgacattctccactctcaaggcaacaacagcgaggtgcgggagaccgccattgaggtaggcaaggggtgcgattttcatataagttcacatagcaagacagacgaaagcagtccggtgctctcccctcgcaagccctcacatcctgtcatggacttctttagctctcacctactggctgattcgtcctcacccgccaccaactcttctcataccgatgcgcacgaaattcttgtgtctgatttcctggtgtctgacgagaatctacagaagatggagaacgttctggacctttggtcctctggccttaaaacaaatatcatatccgaactgtctaaatggaggcttaatttcatagattggcaccgcatggagatgcgaaaagagaaggaaaagcatgctgcacacctgaagcaactgtgtaaccaaataaacgaattgaaagagttgcagaagacattcgaaatctcaatcggtaggaaagacgaagtgatctcaagcctaagccatgccatcggtaaacagaaggagaagattgaactgatgagaacctttttccactggaggatcggacatgtaagagccagacaggacgtttacgaaggaaagttggctgaccaatactaccagagaaccctgctgaaaaaggtgtggaaggtatggcgttcggtcgttcagaagcagtggaaggatgtggtggagcgggcctgccaggccagagccgaagaagtatgcatccagatatcgaatgactacgaagctaaagtggccatgctctcgggtgctttggaaaatgctaaagcagaaatccagcgcatgcaacacgagaaggagcactttgaagatagcatgaagaaggcgttcatgaggggcgtgtgcgcactgaatttggaggctatgaccatctttcaaaatcgcaacgacgccggaatcgacagcaccaataataaaaaggaggagtatggtcctggggtgcagggtaaagaacactctgcccatcttgacccatctgctcccccgatgccacttcccgtgacgtctcccttactcccttccccgcccgcagccgtagggggagcgagtgcgaccgcagtgccctccgcggcaagcatgacgagtacccgcgcagcatccgctagttcagtgcacgttcccgtgtctgcactaggagccgggtcggccgcaaccgcagcttccgaggagatgtacgttccccgggtcgtgaccagcgcacagcagaaggctggaagaactataactgcaaggattaccggccgttgcgacttcgccagcaaaaatcggattagtagctcgctagcaattatgggggtctctcctcctatgtctagcgttgtggtggagaagcaccatcccgtgacagtgcaaacaattccccaagctacggcagcaaagtatccccgcactatccacccagagagcagcacgagcgctagccgcagtttgggcactaggtccgcgcatacacagtccctcacgtcggtccactccatcaaggtggtagactag

SEQ ID NO: 243320 - DNA, 1653 bp, Artificial Sequence
  derived and/or modified sequence
atgaagtgggaggagtatgaggagctgctgcactacgccatcgtgacccccaacatcgagccctgtgccagccagagcagccaccccaagggggagctggtgcctgatgtgcgcatcagcaccatccatgacatcctgcacagccagggcaacaacagcgaggtgcgggagacagccatcgaggtgggcaagggctgtgacttccacatcagcagccacagcaagacagatgagagcagccctgtgctgagccccaggaagcccagccaccctgtgatggacttcttcagcagccacctgctggccgacagcagcagccctgccaccaacagcagccacacagatgcccacgagatcctggtgtctgacttcctggtgtctgatgagaacctgcagaagatggagaatgtgctggacctgtggagcagcggcctgaagaccaacatcatcagcgagctgagcaagtggaggctgaacttcatcgactggcacaggatggagatgaggaaggagaaggagaagcacgccgcccacctgaagcagctgtgcaaccagatcaatgagctgaaggagctgcagaagacctttgagatcagcatcggcaggaaggatgaggtgatcagcagcctgagccacgccatcggcaagcagaaggagaagattgagctgatgaggaccttcttccactggagaattggccacgtgcgggcccggcaggatgtgtatgagggcaagctggccgaccagtactaccagaggaccctgctgaagaaggtgtggaaggtgtggaggtctgtggtgcagaagcagtggaaggatgtggtggagcgggcctgccaggcccgggcagaggaggtgtgcatccagatcagcaatgactatgaggccaaggtggccatgctgagcggggccctggagaatgccaaggccgagatccagaggatgcagcacgagaaggagcactttgaagattccatgaagaaggccttcatgagaggagtgtgtgccctgaacctggaggccatgaccatcttccagaacagaaatgatgctggcatcgacagcaccaacaacaagaaggaggagtatggccctggggtgcagggcaaggagcacagcgcccacctggaccccagcgccccacccatgcccctgcctgtgaccagccccctgctgcccagccccccagctgctgtgggcggggccagcgccacagctgtgcccagcgctgcctccatgaccagcacccgggccgccagcgccagctctgtgcacgtgcctgtgtctgccctgggcgccggcagcgctgccacagctgccagcgaggagatgtatgtgccccgggtggtgaccagcgcccagcagaaggccggccgcaccatcacagcccgcatcaccggccgctgtgactttgccagcaagaaccgcatcagcagcagcctggccatcatgggcgtgagcccccccatgagctctgtggtggtggagaagcaccaccctgtgacagtgcagaccatcccccaggccacagctgccaagtaccccaggaccatccaccctgagagcagcaccagcgccagccgcagcctgggcaccaggtctgcccacacccagagcctgacctctgtgcacagcatcaaggtggtggactag

SEQ ID NO: 243321 - DNA, 1653 bp, Artificial Sequence
  derived and/or modified sequence
atgaagtgggaggagtacgaggagctgctgcactacgccatcgtgacacccaatattgagccttgtgcctcccagtcctctcaccctaagggagagctcgtgcccgacgtccgcatatcaaccatccacgacatcctgcattcacaagggaataattcggaggtgagggaaaccgcaattgaagtcggaaagggttgtgatttccatatttcttcacactccaagactgacgagtcgagtccggttttaagcccaagaaagccttctcacccagtgatggactttttctccagccatctcctcgccgacagctcctccccagccaccaattcctcccacactgacgcccatgagattctggttagcgatttcctagtgagcgacgaaaatctgcagaaaatggaaaatgttctggacctgtggtcttccggactgaagacaaacattatatccgagctgagcaaatggcgcctcaattttatcgattggcatagaatggagatgaggaaagagaaagagaagcacgccgctcaccttaagcagctgtgcaaccagatcaatgaattgaaggagcttcagaaaactttcgaaatcagtatcggccgaaaagacgaagtcatcagttccttgagccatgcgattggaaaacagaaggagaaaatcgaactgatgcggacattttttcattggcgtatagggcatgtgcgtgcaagacaggacgtgtacgaaggcaagttagcggaccagtactaccaacgcactctccttaaaaaggtgtggaaagtgtggcgcagcgtcgttcagaaacagtggaaggacgtcgtagagagagcttgtcaggcccgcgccgaggaagtctgcatccagatttccaatgactacgaggccaaagtcgcgatgttgtccggcgccctcgaaaatgcgaaagcagagatccagaggatgcagcacgagaaggaacacttcgaagactctatgaaaaaagcgttcatgagaggcgtctgcgcacttaacttagaagctatgaccatcttccagaatagaaacgacgctggtatcgacagtactaataataagaaggaggagtacggtccaggtgtccagggtaaagagcatagcgcccacctcgatccctcagctccaccaatgccactgcctgtaactagcccactactcccaagtccacctgccgctgtgggcggcgcctctgccacagccgtgccaagcgcagcgtcaatgacaagcacccgagcagcttccgcatcatctgtgcatgttcccgtgagcgcgttgggcgcggggtcggccgccaccgccgcttccgaagaaatgtacgtgccaagggtggtgacttcagcgcagcaaaaggccggcaggacgataacagctcgcatcactggccgctgcgactttgccagcaaaaaccgtatctcctcttctctcgccataatgggcgtttctccacccatgtcttcagtcgtggtggagaagcaccatcctgtgactgtccagacaataccccaggctactgcagccaagtaccctaggaccatccatccagaaagttctacgagtgccagcagaagcttaggcacacggagcgcccatacccagagcctgacatcagtccatagcattaaggttgtagactag

SEQ ID NO: 243322 - DNA, 1653 bp, Artificial Sequence
  derived and/or modified sequence
atgaagtgggaagagtacgaagaactgctgcattatgcaatagtcacccctaacatcgaaccatgtgccagccagtcttctcaccccaagggggaacttgtgccagatgtgcgtatatccactatccacgacatactccacagtcagggcaacaatagcgaggttcgggagacagcgattgaagtggggaaggggtgcgatttccacatctccagccatagtaaaactgacgaatcatctccagtcctttcccctcgcaagccttcacaccccgtcatggattttttttcaagccacttactcgcggactcatcgtcgcctgctacaaattcaagccatacagacgcacatgagatcctggttagcgatttcctggtgtccgatgagaacctgcagaaaatggaaaatgtactcgacctatggtctagtggattgaaaacgaacataatcagcgagctgtctaaatggcgactgaactttattgactggcaccgcatggagatgaggaaagaaaaagagaagcatgctgcccacctcaaacaactctgcaaccaaataaacgagttaaaggagctgcagaagaccttcgaaatatccatcggccgtaaagatgaagtcatcagctctctgtcccacgctatcgggaaacagaaggaaaagatcgaactcatgaggacgttctttcattggcggatcgggcacgtgagggcacgtcaggacgtgtacgaaggcaaactggccgaccaatactatcagaggaccttactgaagaaagtctggaaagtttggcggagcgttgtccaaaaacaatggaaagatgtcgtcgagcgagcctgtcaggcaagagcggaggaggtatgtattcagatctcaaacgattatgaggcaaaagtcgccatgctctcaggcgctctggaaaacgccaaagcagaaatccagcggatgcagcatgaaaaagagcatttcgaagattcaatgaaaaaggccttcatgcgcggagtgtgtgccctgaatcttgaggctatgaccatcttccagaatcgaaacgatgctggcatagacagcaccaacaataagaaagaggagtacggcccaggagtccaagggaaagagcattcagctcacctcgacccctcagccccacctatgccactgcctgtcactagtcctttgcttcccagtcctcctgctgcagtaggtggcgcttcagccactgccgtgccgtccgccgctagtatgacgtcaactcgggctgcttctgcttcttcagtgcatgtccctgtcagcgcacttggcgctggatcagctgccaccgccgctagcgaagaaatgtatgttccaagggttgtgacgtcagcccagcagaaggccggtcggacgattacagctcgaataacaggcaggtgtgatttcgccagtaaaaatagaattagtagcagccttgcaattatgggcgtgagccccccaatgtcctccgtggtcgttgaaaaacaccatcccgtaaccgtgcaaacaattccccaagccacagccgctaagtatccaaggactatccaccccgagtccagtaccagcgccagccggagcttaggaacaaggtcagctcacacgcaatcacttaccagtgtgcactcaatcaaggtggttgattag

SEQ ID NO: 243323 - DNA, 1728 bp, Artificial Sequence
  derived and/or modified sequence
tgaggtttggtctctgttgtcacaacattcagtacaatctgctgcccaggacctggacattgacagataaaatgaagtgggaagaatatgaagaactgcttcattatgctatagtgactccaaatattgaaccctgtgcttcacagtcatctcatcctaagggagaattggtgccagatgtcagaatttctacaattcatgatattcttcatagtcaaggaaataactctgaagtaagagaaactgcaatagaagttggaaaaggatgtgatttccatatttcaagtcattcaaagacagatgagtcatcaccagtgttatcgccaaggaagccttctcacccagtcatggattttttcagttcacatcttttagctgactcttcctcaccagcaacaaattctagtcatacagatgcccatgaaatacttgtgagcgattttcttgtttctgatgaaaaccttcagaagatggaaaatgtgcttgatctttggagttcaggtcttaagacaaacatcatatctgaactaagtaaatggagacttaattttattgactggcaccgaatggaaatgagaaaagagaaagaaaaacatgcagcacatttaaaacaactgtgtaatcagatcaatgaattgaaggagctgcaaaaaacctttgaaatctccattgggagaaaagatgaggtgatttctagcttgtctcatgccataggcaagcaaaaggaaaagatagagttgatgagaacattcttccactggcgaatcggccatgtcagagccagacaggatgtttatgaaggtaaactagctgaccagtactaccagagaactttactgaagaaagtctggaaagtctggcgttccgtagtgcaaaagcagtggaaagatgtggtagaaagagcttgtcaagcaagagctgaagaagtttgtatccagatttccaatgattatgaagccaaagttgctatgttatctggagctttggaaaatgcaaaagctgagattcaaagaatgcaacatgaaaaagagcactttgaagattccatgaaaaaagctttcatgaggggtgtatgtgcattaaatcttgaagccatgactatatttcaaaacagaaatgatgcagggatagactccacaaataataaaaaggaagagtatggtcctggtgttcaaggaaaagaacattctgctcatttggatccttcagctcctccgatgcccttaccagttacatcaccactgctgccatccccaccagccgccgtcggaggagccagcgcgactgccgttccctcagctgcttcgatgacttctaccagggctgcttccgcatcttctgttcacgttcctgtttctgctcttggtgcaggatctgcagctactgctgcatcagaagaaatgtatgtgccaagagttgtaacctctgcacaacagaaagcaggaagaactattacagcccggatcacaggaagatgtgattttgcttcaaaaaatagaattagcagcagtttagctataatgggagtttctcctcccatgagctcagttgttgtggaaaaacatcatccagtcacagtgcaaaccattcctcaagcaactgcagcaaaatatccccggaccattcatcctgaaagtagtacctcagcttccagatcacttggaaccagatcagctcacacccagtctctcacaagtgttcattccataaaagtggttgactaaagtg

SEQ ID NO: 243324 - protein, 296 aa, Artificial Sequence
  derived and/or modified sequence
MVAEKETLSLNKCPDKMPKRTKLLAQQPLPVHQPHSLVSEGFTVKAMMKNSVVRGPPAAGAFKERPTKPTAFRKFYERGDFPIALEHDSKGNKIAWKVEIEKLDYHHYLPLFFDGLCEMTFPYEFFARQGIHDMLEHGGNKILPVLPQLIIPIKNALNLRNRQVICVTLKVLQHLVVSAEMVGKALVPYYRQILPVLNIFKNMNGSYSLPRLECSGAIMARCNLDHLGSSDPPTSASQVAEIIVNSGDGIDYSQQKRENIGDLIQETLEAFERYGGENAFINIKYVVPTYESCLLN

SEQ ID NO: 243325 - DNA, 891 bp, Artificial Sequence
  derived and/or modified sequence
atggtcgcagagaaggagactctgagcttgaacaagtgcccggataaaatgcctaaaaggacaaagttgctggctcagcagccattaccagtgcatcaaccacattctctggtgagcgaaggcttcacagtgaaggcaatgatgaagaacagcgttgtaaggggcccacctgccgccggcgcattcaaggagcgaccgacgaagccgaccgcctttaggaagttttacgagcgcggcgacttccccattgccctggaacatgactcaaaaggcaacaagattgcatggaaagtagaaatagaaaagttggactatcaccactatcttcccctgttttttgacgggctgtgcgagatgaccttcccatatgaattctttgcccgacagggcattcacgacatgctggagcacggcggcaacaaaattctccctgtcctgccccagctgatcatccccattaagaatgcactgaatttaagaaatcgccaggtgatctgcgttaccctgaaagttctgcagcacctggtcgtgtccgctgagatggtcgggaaggcactggtgccgtactacagacagatcctgccagtactgaatatcttcaagaatatgaatggttcctacagcttgccaagactagaatgtagcggggctatcatggccagatgtaaccttgaccatttgggaagttccgaccctccaacatctgcctctcaggtagctgaaataatcgtgaattccggtgacggtatcgactattcccaacaaaaacgcgaaaacattggagatcttatccaagaaactctggaggccttcgaacgctacggaggtgaaaatgctttcattaatattaagtacgtcgtacctacttatgaatcatgtttgctgaattag

SEQ ID NO: 243326 - DNA, 891 bp, Artificial Sequence
  derived and/or modified sequence
atggtggccgagaaggagaccctgagcctgaacaagtgcccagacaagatgcccaagaggaccaagctgctggcccagcagcccctgcctgtgcaccagccccacagcctggtgtctgagggcttcaccgtgaaggccatgatgaagaacagcgtggtgcggggccccccagctgctggggccttcaaggagcggcccaccaagcccacagccttcaggaagttctatgaaagaggagacttccccatcgccctggagcatgacagcaagggcaacaagatcgcctggaaggtggagattgagaagctggactaccaccactacctgcccctcttctttgatggcctgtgtgagatgaccttcccctatgagttctttgcccggcagggcatccatgacatgctggagcacggcggcaacaagatcctgcctgtgctgccccagctgatcatccccatcaagaatgccctgaacctgaggaaccggcaggtgatctgtgtgaccctgaaggtgctgcagcacctggtggtgtctgctgagatggtgggcaaggccctggtgccctactaccggcagatcctgcctgtgctgaacatcttcaagaacatgaatggcagctacagcctgccccggctggagtgcagcggggccatcatggcccgctgcaacctggaccacctgggcagcagtgacccccccaccagcgccagccaggtggccgagatcatcgtgaacagcggagatggcatcgactacagccagcagaagcgggagaacatcggggacctgatccaggagaccctggaggcctttgaaagatatggaggagaaaatgccttcatcaacatcaagtatgtggtgcccacctatgagagctgcctgctgaactag

SEQ ID NO: 243327 - DNA, 891 bp, Artificial Sequence
  derived and/or modified sequence
atggtggccgagaaggagaccctgagcctgaacaagtgccccgacaagatgccaaaaaggactaaactccttgcccagcaaccgctgcccgtgcaccaaccacattcactggtgtccgaaggatttactgtgaaagccatgatgaaaaatagcgtcgttcgcggaccacctgcagcaggcgcattcaaagaaagacccaccaaaccaaccgcttttcggaaattttacgagaggggtgactttcctatagcccttgaacatgacagcaaagggaataagattgcctggaaagtggagatagagaagctcgactatcaccattatctgcctctgttcttcgatgggctttgtgagatgacttttccctatgagttcttcgcacgtcagggtatccacgacatgttggaacacggaggcaataaaatcctccccgtgctgccccagctcattattcctattaagaacgccttaaatctgcgtaaccgccaggtcatatgcgtgactctgaaggtgctgcaacacctcgtggtgagcgccgaaatggtcgggaaagcgctcgtgccctattataggcagattctccccgtactgaacatattcaaaaacatgaatggaagttactcgctgccaagattagaatgtagcggcgccatcatggcacgctgcaatctcgatcacctcgggtcgtcggaccctccaacatcggcctctcaggtggccgaaatcatcgtgaatagtggggatggtatcgactactctcaacagaagagagagaatatcggagacctgatccaggagaccttggaagccttcgaaaggtacggaggcgagaatgcctttattaacatcaagtatgttgtcccaacatatgagtcctgcctcctaaactag

SEQ ID NO: 243328 - DNA, 1619 bp, Artificial Sequence
  derived and/or modified sequence
agatctatctggaggagtttctgtggagccagccaccctcaccaggtgccttccattagagtttaatgctttgctgcggtttcctgaaagagccccacagagagtgggtctcgatgggtcctgaaccgcaccacaaccggccagtgagacctcctgctcacatccgtaaagcccactgattcttttactacactttttatgagaacaagacattttctaggaagatggtggcagaaaaagagaccctgagcttaaacaaatgcccagacaagatgccgaagaggaccaagctgctggcacaacagccgctcccggtgcaccagcctcactctctggtttctgagggtttcacagtcaaagccatgatgaaaaactcagtcgtgagaggccctccagctgcaggggcatttaaagaaagaccaaccaagcccacagcatttcgaaaattctatgagcgaggtgacttcccaattgcccttgagcatgattcgaaaggaaacaaaatcgcctggaaggtagaaattgagaagctggattaccatcattatctgcctctgttttttgatgggctttgtgaaatgacatttccctatgagttttttgctcggcaaggaatccacgacatgctggaacacggtgggaacaagatcctacctgtccttccacagctcattatcccgataaaaaatgccttgaacctccgaaaccgacaggtcatctgtgtcactctcaaggtcctccagcatctggttgtgtcagctgagatggtgggcaaggccttggtgccttattaccgtcaaatcctccctgtcctgaacatctttaagaatatgaatgggtcttactctttgcccaggctggagtgcagtggcgcgatcatggctcgttgcaacctcgaccacctgggctcaagtgatcctcccacctcagcctctcaagtagctgagattatagtgaactccggagacggcattgactacagccagcagaagagggagaacattggggacttgatccaggagacactggaggccttcgagcgctacggaggagaaaatgcctttatcaacattaagtacgtggtcccaacctacgagtcttgcttgctaaactaacagtggcagcagctgggacttgaaacctcccgttggtgttgggatcatctgtctctgttgcttttagcatctcattccttgtgacttccacagctttcttttctacagctgctaaaatagtggcttatgggccattggactgttagccctattgagagcaaggctttccaatacataaatagtgtctgtttcttagattacaatagtgtactgtgcttatttgttctaagagaagaattgcttctttatacagctccgacagaagcaggagtccgagttaaaccttcagttgtatagacaataaactataattttcatatgcaattcagcaattgctgttctgtgtgtgcctgccctgggggtgatgtcagaggttgtaagggaagagtttatgctgactgcttactaggtgtttgtcatggaagagaagcatgggttcagcagtgcctctctagcagctgtgcggaataatgtgctttgacattcaataaaactgttgaatct

SEQ ID NO: 243329 - DNA, 891 bp, Artificial Sequence
  derived and/or modified sequence
atggtcgccgagaaagaaactctgtcactcaataaatgtcccgataaaatgccaaaacggactaaactcctggcacagcaaccacttcctgtgcatcaacctcatagcctggtgtctgagggatttactgtcaaagccatgatgaaaaactccgtagtaaggggaccacccgcagccggtgccttcaaggagcgcccaaccaaacccactgcatttagaaagttctacgagcggggtgattttcctatcgccctagagcacgactccaaggggaataaaattgcatggaaggtcgaaatcgagaagctggattatcatcactacctacctttgttcttcgacgggctctgcgaaatgaccttcccgtacgagtttttcgctaggcaaggcatacacgacatgctggagcacgggggaaataaaatcttgccagtgcttccccagctgattattcctatcaaaaatgctctcaacctgagaaatcggcaggtcatttgtgtcacactgaaggtgctgcaacatctggtggtgagcgcagaaatggttgggaaagcgcttgtgccttactatcggcagatattgcccgtcctgaatatctttaaaaacatgaacggaagttatagcctcccacgcctagagtgctcaggcgcaataatggccagatgcaacttagaccatttggggtcatctgacccacctacaagcgccagccaagtggctgaaatcattgtgaattccggcgatggcatcgactactctcaacagaagcgcgaaaatattggggatctaattcaagagactctggaagccttcgaacgctacgggggagagaatgcttttattaacataaaatatgtcgtgcccacgtacgagtcttgtctgctgaactag

SEQ ID NO: 243330 - DNA, 891 bp, Artificial Sequence
  derived and/or modified sequence
atggtggccgagaaggagaccctgagcctgaacaagtgccccgacaagatgcccaagagaaccaagctgctggcccagcagcccctgcccgtgcaccagccccacagcctggtgagcgagggcttcaccgtgaaggccatgatgaagaacagcgtggtgagaggcccccccgccgccggcgccttcaaggagagacccaccaagcccaccgccttcagaaagttctacgagagaggcgacttccccatcgccctggagcacgacagcaagggcaacaagatcgcctggaaggtggagatcgagaagctggactaccaccactacctgcccctgttcttcgacggcctgtgcgagatgaccttcccctacgagttcttcgccagacagggcatccacgacatgctggagcacggcggcaacaagatcctgcccgtgctgccccagctgatcatccccatcaagaacgccctgaacctgagaaacagacaggtgatctgcgtgaccctgaaggtgctgcagcacctggtggtgagcgccgagatggtgggcaaggccctggtgccctactacagacagatcctgcccgtgctgaacatcttcaagaacatgaacggcagctacagcctgcccagactggagtgcagcggcgccatcatggccagatgcaacctggaccacctgggcagcagcgacccccccaccagcgccagccaggtggccgagatcatcgtgaacagcggcgacggcatcgactacagccagcagaagagagagaacatcggcgacctgatccaggagaccctggaggccttcgagagatacggcggcgagaacgccttcatcaacatcaagtacgtggtgcccacctacgagagctgcctgctgaactag

SEQ ID NO: 243331 - protein, 381 aa, Artificial Sequence
  derived and/or modified sequence
MERGMHLGAAAAGEDDLFLHKSLSASTSKRLEAAFRSTPPGMDLSLAPPPRERPASSSSSPLGCFEPADPEGAGLLLPPPGGGGGGSAGSGGGGGGGVGVPGLLVGSAGVGGDPSLSSLPAGAALCLKYGESASRGSVAESSGGEQSPDDDSDGRCELVLRAGVADPRASPGAGGGGAKAAEGCSNAHLHGGASVPPGGLGGGGGGGSSSGSSGGGGGSGSGSGGSSSSSSSSSKKSKEQKALRLNINARERRRMHDLNDALDELRAVIPYAHSPSVRKLSKIATLLLAKNYILMQAQALEEMRRLVAYLNQGQAISAASLPSSAAAAAAAAALHPALGAYEQAAGYPFSAGLPPAASCPEKCALFNSVSSSLCKQCTEKP

SEQ ID NO: 243332 - DNA, 3388 bp, Artificial Sequence
  derived and/or modified sequence
gtttgttaccgttttaatcctattaattaaaacgttaacctgattgggtagaaagcgctgtcccaacaggcgagtcttcttcataataacctactcagagataatgatgtaaaagactcccccgtctgtggcggcggctgtttgatgggtccggaaatctcttgaaggtgaatccaagcaagataaacggtgcggagaggaggcgcggggctgggctcagagcggcggcggcggcggctccactccctccgcgcccaccctcccaccatgcggggccgcggcccatggtgagccccagcagccagcaccatcggctggagacgaagaagaagaagaagaggaggcggcgagcgcgggggaaggcgaaaaagaaaaagaaagaaggggagagggctcccggcagcaccaggaccgacgcgcgcaccagctccggagcccagctcgcgcgcgtctgtggggccgcctgactccggggccgaggcggcggcggcggcagcgggcgcggcggcccgggctgcgcgccggcgcgggaccatggagcgcgggatgcacctcggtgcagcggccgccggcgaggacgacctcttcctgcacaagagcctgagcgcctccacctccaagcgcttggaagcggctttccgctccacgcccccgggcatggacctgtccctggcgccgccgcctcgggaacgcccggcgtcctcctcctcgtcgcccctgggctgcttcgagccggctgaccccgagggggcagggctgctgttgccgccgcctggaggaggcggcggcggcagcgcgggaagtggcggcggcggcggcggcggggtgggtgtccccgggctgctagtaggttcagccggcgttgggggcgaccctagcctaagcagcctgccggccggggccgccctttgcctcaagtacggcgaaagcgcgagccggggctcggtggccgagagcagcggcggcgagcagagccccgacgacgacagcgacggtcgctgcgagctcgtgctgcgggccggagtagccgacccgcgggcctccccgggagcgggaggtggtggcgcgaaggcagccgagggctgctccaatgcccacctccacggcggcgccagcgtccccccggggggcctgggcggcggcggcggcgggggtagcagcagcggtagcagtggcggcggtggcggtagcggtagcggcagcggcggcagcagcagcagcagcagcagcagcagcaagaaatccaaagagcaaaaggcgctgcggcttaacatcaatgcccgagagcgccggcggatgcacgacctgaacgacgcgctggacgagctgcgcgcggtgatcccctacgcgcacagcccctcggtgcgaaagctctccaagatcgccacgctgctgctcgccaagaactacatcctcatgcaggcgcaggccctggaggagatgcggcgcctagtcgcctacctcaaccagggccaggccatctcggctgcctccctgcccagctcggcggctgcagcggcagcagctgctgccctgcacccggcgctcggcgcctacgagcaggcagccggctacccgttcagcgccggactgcccccggctgcctcctgcccggagaagtgcgccctgtttaacagcgtctcctccagcctctgcaaacagtgcacggagaagccttaaacacacccccgaaaaacacaagaccgacccaaaatctagaggaaagcgaaaagctgctccccaccccctttattttggtcctctcgtagttgtgaaacacttgcagagcaaacaaagcagaggcaagaactgaggagaagtatcagagacaaacgggacttttagccttgacatccccagaatctcggtctttggggtggggagggagggaggagggaggtggagttgggatggagtatggatgtcttttttttctcagaaaagtggcaactttggtggcagcctagaccgcgaggaagtggaatcttccttaaaggtgaaacataagttgagaagtagtgcttggttattaagcctggagagtgtttgaatggcaaaatactaatcctactaataattgtggatttggctagtgctgagggggagaggaggggttaggggttgggtagcatgagagatggaatattcattcagacaaatcagaaagggcacttgaaaataaattttgattctgagccaggagaaaaacttgaaatgttgacttaagtgagggggaaataaaacccagagagagagagagagcgagagagagagacatgttactatgaaagacttgtattttttattgtctctgaactttaatcctgtgaaaatgctcaaagttttggcgagagtgatataaaaaaactgactgtggctgaaagaattgcatttaaaaatatttatgtgcaccttgttactttctactctgcaatgatgtattaacaattcatggtatttatttgttattcttcaatgacccttccacatcaacagtatttatcatgtgttaaagtcatgggtcttatgtgcagatttttttaatgcctctaaaattgttttatagattacttatgctgtgtgccaagtgtttaaaggtttatttgccaacaagtatgaagagaaatattgatgtatctgagctgcttaggtttatgaaaggtcacctggatattttcagttgcatcatccctgtatttaaattgagctttaataaattgcttcagtccaaaaattacaggaaaggtgtattcttaattgatgaatgaattgatctcttttttgaaaggggactcctttacattccaaaagggaaaaacatcacagcaatagttgctatacgtaagaacatgctaagcaaatatttttccaggctgtgctgtgcatttttaaaaggtctaatttaattgcttttaatatatatgtacatatatgttattttaactgtggagaattatttaagttaaaagactggtttgatttgcctatggtgtgaaatcctttgttatttttctaaaaaaataaaatttaaaaagaaagaaaactaaggaagaacaagaagctatttacccaaagtgagctttcagttttagttttgcatggctgtttgactgcctttccgccctatgaaaatcaagaaaatcttttttaaaaatggagtcctgctattttccactccttgcagataatacaaattcagtttgtcaggttggatggtgagttgggagctgtgatggatctgttggcgggttttggatgtgtaaagaatgatatatatattaaataggtcaatcagactatgacagctatgtacgaccatttgtatgtgtatctatgtcagaaagaatctttattaaaatattttgatcaaacaaaaaaaaaaaaaaaa

SEQ ID NO: 243333 - DNA, 1146 bp, Artificial Sequence
  derived and/or modified sequence
atggagcgaggcatgcacctgggtgccgctgcagcaggcgaagacgacctctttctccacaagtcactgagtgccagcaccagtaaaaggttggaggccgccttccggtccacacctcccgggatggatttgagcctcgcaccccccccccgtgagcggcccgctagttcctcaagctcccctttaggctgcttcgaacccgcggatccggaaggagccggtctgttactgccaccacctgggggaggtggtggggggagtgccggaagtggaggagggggcggcggcggggttggagtcccagggttattggtcgggagtgcgggggtcgggggcgatccaagcttgtcgtccctgccggctggcgccgctctctgtctgaagtacggggagtccgctagcaggggatccgtcgcggaaagttcgggcggggagcagtctccagatgatgacagtgacgggaggtgcgaactagtcctgcgcgcaggggtggctgacccgagagcatcgccgggcgcgggagggggaggagcgaaggccgctgaggggtgtagcaacgcacacctgcatgggggagcctccgtccccccaggtggcctcggcggggggggaggcggtggttcaagctcagggagtagcgggggcggtggtggctctggttccggtagcggtggctcctccagctcttctagtagtagcagcaagaagagtaaggagcagaaggctttgcggctgaacattaacgccagagaacgcaggaggatgcatgatctgaatgacgccctagacgagcttcgcgccgtgatcccatacgcacattccccctcagtgcgcaagctgtcgaagatagctactctactgctggctaagaattacattctcatgcaggcccaggccttggaagagatgagacggttagtggcctacctaaaccaggggcaagccatctcagctgcctccctgccctcctccgctgctgccgcagctgctgccgccgccctgcatcccgctttaggagcctatgagcaggctgcggggtatccatttagtgcgggactgccgcccgccgcctcctgtccagagaagtgcgcactgttcaactcagtttcttctagcctgtgtaagcagtgcacggaaaagccatag

SEQ ID NO: 243334 - DNA, 1146 bp, Artificial Sequence
  derived and/or modified sequence
atggagcggggcatgcacctgggcgctgctgctgctggggaggatgacctcttcctgcacaagagcctgagcgccagcaccagcaagaggctggaggccgccttccgcagcaccccacctggcatggacctgagcctggcccccccaccccgggagaggcctgccagcagcagcagcagccccctgggctgctttgagcctgctgaccctgagggcgccggcctgctgctgcccccacctgggggcggcggcggcggcagcgctggcagcggcggcggcggcggcggcggcgtgggcgtgcccggcctgctggtgggcagcgctggggtgggcggggaccccagcctgagcagcctgcctgctggagctgccctgtgcctgaagtatggagagagcgccagccggggctctgtggccgagagcagcggcggggagcagagcccagatgatgacagtgatggccgctgtgagctggtgctgcgggccggcgtggccgacccccgggccagccctggagctgggggcggcggggccaaggctgctgagggctgcagcaatgcccacctgcacggcggggcctctgtgcccccaggcggcctgggcggcggcggcggcggcggcagcagcagcggcagcagcggcggcggcggcggcagcggcagcggcagcggcggcagcagcagcagcagcagcagcagcagcaagaagagcaaggagcagaaggccctgcggctgaacatcaatgcccgggagaggaggaggatgcatgacctgaatgatgccctggatgagctgcgggctgtgatcccctatgcccacagccccagcgtgaggaagctgagcaagatcgccaccctgctgctggccaagaactacatcctgatgcaggcccaggccctggaggagatgaggcggctggtggcctacctgaaccagggccaggccatctctgctgccagcctgcccagcagcgctgctgctgctgctgctgctgctgccctgcacccagccctgggcgcctatgagcaggccgccggctaccccttctctgctggcctgcccccagctgccagctgcccagagaagtgtgccctcttcaacagcgtgagcagcagcctgtgcaagcagtgcacagagaagccctag

SEQ ID NO: 243335 - DNA, 1146 bp, Artificial Sequence
  derived and/or modified sequence
atggagcggggcatgcacctgggcgccgccgccgccggcgaggacgatcttttcctgcacaaatcactctcagcgtcaacatcgaaacggctcgaagcagctttcagatccacaccacctggaatggaccttagcctcgccccgcctccgcgtgagcgccccgccagctccagttcctcccccctggggtgtttcgaacctgctgacccggagggcgctggactcctgctgccgccacctggcggggggggcggcggttccgccgggtctggcgggggcggggggggcggtgtgggtgttcccggattgctcgtcgggtcagcaggtgtgggaggggatccatccctctcttctttaccagcaggcgctgcactctgtttgaaatatggggaaagtgcaagccggggatcagtggcagagtctagtggaggagagcagagccccgatgacgacagcgacggccggtgtgagctcgtattgagggccggtgtggcagacccacgagcatctccaggcgctgggggagggggagctaaggccgccgagggttgtagcaatgctcacctgcatggtggcgctagcgtgcctcccggtggcctcggggggggtggaggcgggggcagttctagtggtagttccggtggaggaggtggttccggatcaggatcgggtgggagctcatccagctcatccagtagctcaaagaaaagcaaggaacaaaaggcgctgcgcctaaacatcaacgcccgcgaaaggcgtcggatgcacgatctgaatgacgctttagatgagttgcgcgctgtgatcccttacgcacatagccctagcgtgaggaagctctccaaaattgcaaccctgttgctggccaaaaactatatcctgatgcaggcgcaggccctcgaggaaatgcgtcgattggtggcctatcttaaccaggggcaggcaatcagcgccgcaagtttaccgtcatctgccgctgctgctgcggcggccgcggcattacatccagccctgggagcctacgagcaggctgccggctatccattctccgccggcctacccccggccgcgtcctgtccagaaaagtgcgcactgttcaacagcgtcagctcatccctatgcaaacagtgcacagaaaagccctag

SEQ ID NO: 243336 - DNA, 1146 bp, Artificial Sequence
  derived and/or modified sequence
atggagcgcggaatgcatctgggtgccgcagccgctggcgaggacgacctctttttgcataagtccctgtccgcctctactagcaagcggctcgaagcggcttttagatcaacaccccctggcatggatctgtctctcgcacccccaccgagggagagacccgcatcaagttcttctagccctcttggttgttttgagcccgcagatcccgagggggctggattgctcctgccacccccaggtggcggaggcggtgggagcgctggatccggaggaggaggcggaggcggagtcggcgtgccaggtctgctggtagggtctgctggggtagggggagacccaagcctatcgtccttacctgccggagctgccctctgtctgaagtatggagaaagtgcaagccgaggatccgtcgcggaatctagcggcggagagcagagtcccgacgacgacagcgacggtcggtgcgagctggtgctccgggctggcgtggctgaccccagagcctcacctggggcaggtggtgggggagcaaaagccgcagagggctgctccaacgcccatttacatggtggcgcaagcgtccccccaggcggattgggcggtgggggtggtgggggatccagcagcggttcctcggggggtgggggtggcagtggtagcggatcaggtggcagcagctcctccagcagctcctctagtaaaaagtccaaagaacagaaggctctgaggctgaatatcaatgctagagagcggaggcgtatgcatgacctgaacgacgccctcgacgagctccgggctgttattccttacgcccactctccctcggtgagaaagttatccaaaatcgcaaccctgctgcttgccaaaaactacattttgatgcaggcccaagcccttgaagagatgcggcgactcgtcgcttacctaaatcagggccaggcaatttccgctgccagccttccaagctcagcagctgcggctgctgcggctgccgctctgcatcccgctcttggggcatacgagcaggccgctggctatccattctcagccggtttgcccccagctgcatcttgtcctgagaaatgcgccctctttaatagcgtgtcctcgtctctgtgtaagcagtgtacggaaaagccttag

SEQ ID NO: 243337 - DNA, 3368 bp, Artificial Sequence
  derived and/or modified sequence
gtttgttaccgttttaatcctattaattaaaacgttaacctgattgggtagaaagcgctgtcccaacaggcgagtcttcttcataataacctactcagagataatgatgtaaaagactcccccgtctgtggcggcggctgtttgatgggtccggaaatctcttgaaggtgaatccaagcaagataaacggtgcggagaggaggcgcggggctgggctcagagcggcggcggcggcggctccactccctccgcgcccaccctcccaccatgcggggccgcggcccatggtgagccccagcagccagcaccatcggctggagacgaagaagaagaagaagaggaggcggcgagcgcgggggaaggcgaaaaagaaaaagaaagaaggggagagggctcccggcagcaccaggaccgacgcgcgcaccagctccggagcccagctcgcgcgcgtctgtggggccgcctgactccggggccgaggcggcggcggcggcagcgggcgcggcggcccgggctgcgcgccggcgcgggaccatggagcgcgggatgcacctcggtgcagcggccgccggcgaggacgacctcttcctgcacaagagcctgagcgcctccacctccaagcgcttggaagcggctttccgctccacgcccccgggcatggacctgtccctggcgccgccgcctcgggaacgcccggcgtcctcctcctcgtcgcccctgggctgcttcgagccggctgaccccgagggggcagggctgctgttgccgccgcctggaggaggcggcggcggcagcgcgggaagtggcggcggcggcggcggcggggtgggtgtccccgggctgctagtaggttcagccggcgttgggggcgaccctagcctaagcagcctgccggccggggccgccctttgcctcaagtacggcgaaagcgcgagccggggctcggtggccgagagcagcggcggcgagcagagccccgacgacgacagcgacggtcgctgcgagctcgtgctgcgggccggagtagccgacccgcgggcctccccgggagcgggaggtggtggcgcgaaggcagccgagggctgctccaatgcccacctccacggcggcgccagcgtccccccggggggcctgggcggcggcggcggcgggggtagcagcagcggtagcagtggcggcggtggcggtagcggtagcggcagcggcggcagcagcagcagcagcagcagcagcagcaagaaatccaaagagcaaaaggcgctgcggcttaacatcaatgcccgagagcgccggcggatgcacgacctgaacgacgcgctggacgagctgcgcgcggtgatcccctacgcgcacagcccctcggtgcgaaagctctccaagatcgccacgctgctgctcgccaagaactacatcctcatgcaggcgcaggccctggaggagatgcggcgcctagtcgcctacctcaaccagggccaggccatctcggctgcctccctgcccagctcggcggctgcagcggcagcagctgctgccctgcacccggcgctcggcgcctacgagcaggcagccggctacccgttcagcgccggactgcccccggctgcctcctgcccggagaagtgcgccctgtttaacagcgtctcctccagcctctgcaaacagtgcacggagaagccttaaacacacccccgaaaaacacaagaccgacccaaaatctagaggaaagcgaaaagctgctccccaccccctttattttggtcctctcgtagttgtgaaacacttgcagagcaaacaaagcagaggcaagaactgaggagaagtatcagagacaaacgggacttttagccttgacatccccagaatctcggtctttggggtggggagggagggaggagggaggtggagttgggatggagtatggatgtcttttttttctcagaaaagtggcaactttggtggcagcctagaccgcgaggaagtggaatcttccttaaaggtgaaacataagttgagaagtagtgcttggttattaagcctggagagtgtttgaatggcaaaatactaatcctactaataattgtggatttggctagtgctgagggggagaggaggggttaggggttgggtagcatgagagatggaatattcattcagacaaatcagaaagggcacttgaaaataaattttgattctgagccaggagaaaaacttgaaatgttgacttaagtgagggggaaataaaacccagagagagagagagagcgagagagagagacatgttactatgaaagacttgtattttttattgtctctgaactttaatcctgtgaaaatgctcaaagttttggcgagagtgatataaaaaaactgactgtggctgaaagaattgcatttaaaaatatttatgtgcaccttgttactttctactctgcaatgatgtattaacaattcatggtatttatttgttattcttcaatgacccttccacatcaacagtatttatcatgtgttaaagtcatgggtcttatgtgcagatttttttaatgcctctaaaattgttttatagattacttatgctgtgtgccaagtgtttaaaggtttatttgccaacaagtatgaagagaaatattgatgtatctgagctgcttaggtttatgaaaggtcacctggatattttcagttgcatcatccctgtatttaaattgagctttaataaattgcttcagtccaaaaattacaggaaaggtgtattcttaattgatgaatgaattgatctcttttttgaaaggggactcctttacattccaaaagggaaaaacatcacagcaatagttgctatacgtaagaacatgctaagcaaatatttttccaggctgtgctgtgcatttttaaaaggtctaatttaattgcttttaatatatatgtacatatatgttattttaactgtggagaattatttaagttaaaagactggtttgatttgcctatggtgtgaaatcctttgttatttttctaaaaaaataaaatttaaaaagaaagaaaactaaggaagaacaagaagctatttacccaaagtgagctttcagttttagttttgcatggctgtttgactgcctttccgccctatgaaaatcaagaaaatcttttttaaaaatggagtcctgctattttccactccttgcagataatacaaattcagtttgtcaggttggatggtgagttgggagctgtgatggatctgttggcgggttttggatgtgtaaagaatgatatatatattaaataggtcaatcagactatgacagctatgtacgaccatttgtatgtgtatctatgtcagaaagaatctttattaaaatattttgatc

SEQ ID NO: 243338 - DNA, 1146 bp, Artificial Sequence
  derived and/or modified sequence
atggagagaggcatgcacctgggcgccgccgccgccggcgaggacgacctgttcctgcacaagagcctgagcgccagcaccagcaagagactggaggccgccttcagaagcaccccccccggcatggacctgagcctggcccccccccccagagagagacccgccagcagcagcagcagccccctgggctgcttcgagcccgccgaccccgagggcgccggcctgctgctgcccccccccggcggcggcggcggcggcagcgccggcagcggcggcggcggcggcggcggcgtgggcgtgcccggcctgctggtgggcagcgccggcgtgggcggcgaccccagcctgagcagcctgcccgccggcgccgccctgtgcctgaagtacggcgagagcgccagcagaggcagcgtggccgagagcagcggcggcgagcagagccccgacgacgacagcgacggcagatgcgagctggtgctgagagccggcgtggccgaccccagagccagccccggcgccggcggcggcggcgccaaggccgccgagggctgcagcaacgcccacctgcacggcggcgccagcgtgccccccggcggcctgggcggcggcggcggcggcggcagcagcagcggcagcagcggcggcggcggcggcagcggcagcggcagcggcggcagcagcagcagcagcagcagcagcagcaagaagagcaaggagcagaaggccctgagactgaacatcaacgccagagagagaagaagaatgcacgacctgaacgacgccctggacgagctgagagccgtgatcccctacgcccacagccccagcgtgagaaagctgagcaagatcgccaccctgctgctggccaagaactacatcctgatgcaggcccaggccctggaggagatgagaagactggtggcctacctgaaccagggccaggccatcagcgccgccagcctgcccagcagcgccgccgccgccgccgccgccgccgccctgcaccccgccctgggcgcctacgagcaggccgccggctaccccttcagcgccggcctgccccccgccgccagctgccccgagaagtgcgccctgttcaacagcgtgagcagcagcctgtgcaagcagtgcaccgagaagccctag

SEQ ID NO: 243339 - protein, 397 aa, Artificial Sequence
  derived and/or modified sequence
MSWLFPLTKSASSSAAGSPGGLTSLQQQKQRLIESLRNSHSSIAEIQKDVEYRLPFTINNLTININILLPPQFPQEKPVISVYPPIRHHLMDKQGVYVTSPLVNNFTMHSDLGKIIQSLLDEFWKNPPVLAPTSTAFPYLYSNPSGMSPYASQGFPFLPPYPPQEANRSITSLSVADTVSSSTTSHTTAKPAAPSFGVLSNLPLPIPTVDASIPTSQNGFGYKMPDVPDAFPELSELSVSQLTDMNEQEEVLLEQFLTLPQLKQIITDKDDLVKSIEELARKNLLLEPSLEAKRQTVLDKYELLTQMKSTFEKKMQRQHELSESCSASALQARLKVAAHEAEEESDNIAEDFLEGKMEIDDFLSSFMEKRTICHCRRAKEEKLQQAIAMHSQFHAPL

SEQ ID NO: 243340 - DNA, 1194 bp, Artificial Sequence
  derived and/or modified sequence
atgagctggctgttccccctgaccaagagcgccagcagcagcgccgccggcagccccggcggcctgaccagcctgcagcagcagaagcagagactgatcgagagcctgagaaacagccacagcagcatcgccgagatccagaaggacgtggagtacagactgcccttcaccatcaacaacctgaccatcaacatcaacatcctgctgcccccccagttcccccaggagaagcccgtgatcagcgtgtacccccccatcagacaccacctgatggacaagcagggcgtgtacgtgaccagccccctggtgaacaacttcaccatgcacagcgacctgggcaagatcatccagagcctgctggacgagttctggaagaacccccccgtgctggcccccaccagcaccgccttcccctacctgtacagcaaccccagcggcatgagcccctacgccagccagggcttccccttcctgcccccctaccccccccaggaggccaacagaagcatcaccagcctgagcgtggccgacaccgtgagcagcagcaccaccagccacaccaccgccaagcccgccgcccccagcttcggcgtgctgagcaacctgcccctgcccatccccaccgtggacgccagcatccccaccagccagaacggcttcggctacaagatgcccgacgtgcccgacgccttccccgagctgagcgagctgagcgtgagccagctgaccgacatgaacgagcaggaggaggtgctgctggagcagttcctgaccctgccccagctgaagcagatcatcaccgacaaggacgacctggtgaagagcatcgaggagctggccagaaagaacctgctgctggagcccagcctggaggccaagagacagaccgtgctggacaagtacgagctgctgacccagatgaagagcaccttcgagaagaagatgcagagacagcacgagctgagcgagagctgcagcgccagcgccctgcaggccagactgaaggtggccgcccacgaggccgaggaggagagcgacaacatcgccgaggacttcctggagggcaagatggagatcgacgacttcctgagcagcttcatggagaagagaaccatctgccactgcagaagagccaaggaggagaagctgcagcaggccatcgccatgcacagccagttccacgcccccctgtag

SEQ ID NO: 243341 - DNA, 1194 bp, Artificial Sequence
  derived and/or modified sequence
atgtcctggctgtttccattgacaaagtccgcctcgtctagcgccgccgggagccccggagggttgacgtcgcttcagcagcagaagcaacggttgatagagagtctgcgcaatagccactcctccatcgccgaaattcagaaagatgtggaatacagactgccttttacaattaataatcttacaatcaacatcaacatcttgctccctcctcagtttcctcaagagaaacccgtaattagcgtctatcccccgatcaggcatcacctgatggacaagcagggcgtgtacgtcaccagcccgctggttaacaattttactatgcattccgatttgggaaaaattattcagagcttactggatgaattttggaagaatccccctgtgttggccccgacctcgaccgcgtttccctacttgtattccaatccgagtggcatgtcaccttacgcttcacagggatttccgtttttgccgccataccccccacaagaagctaatcgctccattactagtttaagcgtggctgacacggtgagtagcagtaccacatcacacactacagctaagccagctgcgccttcctttggcgtattaagcaatctccccctgcctatacccactgtggacgcaagtattccaactagccaaaatggattcggatacaagatgcccgacgtgcccgatgccttccccgaattaagtgagctgagcgtgagtcagcttactgatatgaatgaacaagaagaggtgttattagaacaatttctgactctgccacagctgaaacaaattatcacagacaaagatgacttggttaagtcaatagaggagctcgcgagaaaaaatcttctcctcgagccctcgctggaggccaagaggcagaccgtcctcgataaatatgaattgctcacacagatgaagtcgacctttgagaagaaaatgcaacggcaacacgaattaagcgaatcatgtagtgcttccgccttgcaggcccggctcaaagtggctgctcatgaggcggaggaggagtcggataatatcgcagaagatttcctcgagggaaagatggagattgacgactttctgagtagcttcatggagaaaaggaccatttgccactgtcggagggctaaggaagagaaacttcagcaggccattgctatgcacagccagtttcatgcacctctttag

SEQ ID NO: 243342 - DNA, 1194 bp, Artificial Sequence
  derived and/or modified sequence
atgtcctggctgttccccctgaccaagagcgccagcagcagcgctgctggcagccctgggggcctgaccagcctgcagcagcagaagcagaggctgattgagagcctgaggaacagccacagcagcattgctgagatccagaaggatgtggagtaccgcctgcccttcaccatcaacaacctgaccatcaacatcaacatcctgctgcccccccagttcccccaggagaagcctgtgatctctgtgtacccacccatccgccaccacctgatggacaagcagggcgtgtatgtgaccagccccctggtgaacaacttcaccatgcacagcgacctgggcaagatcatccagagcctgctggatgagttctggaagaacccccctgtgctggcccccaccagcacagccttcccctacctgtacagcaaccccagcggcatgagcccctatgccagccagggcttccccttcctgcccccctacccaccccaggaggccaacagaagcatcaccagcctgtctgtggccgacacagtgagcagcagcaccaccagccacaccacagccaagccagctgcccccagctttggagtgctgagcaacctgcccctgcccatccccaccgtggatgccagcatccccaccagccagaatggcttcggctacaagatgccagatgtgcctgatgccttccctgagctgtctgagctgtctgtgtcccagctgacagacatgaatgagcaggaggaggtgctgctggagcagttcctgaccctgccccagctgaagcagatcatcacagacaaggatgacctggtgaagagcattgaggagctggccaggaagaacctgctgctggagcccagcctggaggccaagaggcagacagtgctggacaagtatgagctgctgacccagatgaagagcacctttgagaagaagatgcagaggcagcacgagctgtctgagagctgcagcgccagcgccctgcaggcccggctgaaggtggccgcccatgaagctgaggaggagagtgacaacattgctgaggacttcctggagggcaagatggagattgatgacttcctgagcagcttcatggagaagaggaccatctgccactgccggcgggccaaggaggagaagctgcagcaggccatcgccatgcacagccagttccacgcccccctgtag

SEQ ID NO: 243343 - DNA, 1194 bp, Artificial Sequence
  derived and/or modified sequence
atgagctggctgttccccctgaccaagagcgccagcagcagcgccgctgggtctcctggaggacttacctcactgcagcaacaaaagcagaggctcatagagagcctcaggaacagccactcaagcatcgcagagatccagaaggacgtggaatacagactgccttttactattaacaatctgaccataaatatcaatatcctcctgcccccacagttcccgcaagagaagcctgtgataagcgtctacccgccaatccgccaccacctcatggataagcagggcgtttacgtgaccagcccacttgtcaacaacttcacaatgcactcggacctcggcaaaattattcagtctctgttggacgagttttggaaaaatccccccgtgctcgcacctacatccaccgccttcccatacctctacagtaatcctagtggaatgtctccctacgcctcacaaggcttcccttttttgcccccttatcctcctcaggaggctaatcgaagcattacgagtctgagcgtagcagacaccgtcagctccagcacaaccagccacaccaccgcgaaacctgctgctccctctttcggcgtattgtcaaacttaccgctcccaatacccacggtggatgcgagcataccaaccagccagaacggtttcggctataagatgcctgatgtccccgatgcttttccagaactctcagaactatctgtgtcccaactgacggatatgaacgaacaggaggaagtcctactggagcaatttttaacgctgcctcagttgaagcagatcataacggacaaagacgatctcgtcaaatcgattgaagaactcgccaggaagaacctcctgctcgagcccagtctggaagcaaagcgccagacggttctggacaaatatgagctgttgacacagatgaaaagtaccttcgagaagaaaatgcagcgacagcacgagctgtctgaatcctgtagtgccagcgccctgcaggcacgtttaaaggtcgccgcacatgaggccgaagaggaatccgataatatagcagaagactttctggagggcaaaatggagatcgatgacttcttaagctctttcatggaaaaacgcaccatctgtcattgtcgccgggcaaaagaggaaaagctgcagcaggctatcgccatgcattctcaatttcatgcaccgctctag

SEQ ID NO: 243344 - DNA, 1194 bp, Artificial Sequence
  derived and/or modified sequence
atgagttggctgttccccctaacaaaatccgcctcctccagcgccgcaggctcaccaggcggtctcacctctctccagcagcaaaagcagcgactgatcgagtctctccggaacagccactctagcatcgccgagatccagaaagatgttgaatatcggcttcccttcactattaataacttgacgatcaatatcaatattctactccccccacagttcccccaggagaaaccagtcatttctgtctatccaccgatccggcaccatctgatggataagcaaggagtgtatgttacaagcccacttgttaataatttcacaatgcactcagatctcgggaagatcatacagtctctgctggacgagttctggaagaacccccctgtgcttgccccaacaagcactgctttcccttacttgtattctaacccatcaggaatgtctccctacgccagccagggctttccctttcttcccccatatccgccacaggaagcaaaccggtccattacttctctcagcgtcgccgataccgtgtcaagctcaaccactagtcacactacagctaaaccagccgcaccatcctttggcgtgctcagtaatctgccgctgcctatccctacagtggacgcctctattcccacctcacagaacgggttcggttacaaaatgcccgatgtgccagacgcatttcctgagctctcagagctcagcgtgtcccagctgaccgacatgaatgagcaggaggaggtgcttctcgaacagtttctgaccctcccccagctgaagcagattataactgataaagatgacttagttaaaagtatcgaggaactagctcggaaaaatctcctgctggaaccatcattagaggccaaaagacagacggtgcttgataagtatgaactactaacccagatgaaaagtacctttgagaagaaaatgcaacggcaacacgagctaagtgaatcatgcagtgcaagcgctctgcaggcgagacttaaggtcgctgctcacgaggccgaagaggagtcggataacatcgcagaagactttctggaaggtaagatggaaatcgacgattttctttcatcattcatggagaagagaaccatatgccattgtcggagagcaaaggaggaaaagctgcagcaggcgatagccatgcactcccaattccacgcccctctgtag

SEQ ID NO: 243345 - DNA, 4906 bp, Artificial Sequence
  derived and/or modified sequence
agctggcgccatcgcgcaccctctcaggttcatcgtccccgccccctttctacttccctaacccgcccctccccccgtaaggctgcagcggatgcaagatctacttgtgtcgctgagctcgcgctcctcctcctcctcctcgccatagagacagcactcggcggcggtggcggtggcggtggcggtagcggcggcggcagcgggtgccccatagacacctctcgcccagcgaagggaaaggcgagcaggagctgcgccgcaccgtgctgcgccgtcgcttttcgcacgtcctgacgggggcgctagatgatgacgcgacacgcagagggggcggagagcgcccccgggggcggggcacgcaagtgacggcggcgcgggtggtggagcgctgggcggccaggctccctggctggccggtttgggcgtctgggccgtgaaggtgggacctcctgttccgggccgcaagtttccctctccagccgcccgccgttcgtagcatgtcccccagaactcggggagcgcaggcaggacaggcttagagaagacgcggtccccagcgcttgggccacggacgtcccaccccgctcctctgtcgctggagaaccgccgggccgagccactgggagaagcaggccagagccttccagggcctccggcccgtggacccgaggaggatgagctggctttttcccctgaccaagagcgcctcctcctccgcggctgggtcccccggtggcctcaccagcctccagcagcagaagcagcgcctgatcgagtccctccggaactcacactccagtatagccgaaatacagaaagatgtggaatacagattgccattcaccataaacaacctgacaattaacattaatatattgcttcctccacagtttcctcaggaaaaaccagtgatcagtgtttatccaccaatacgacatcacttaatggataaacaaggagtgtatgttacctctccattagtaaacaattttacaatgcactcagatcttggaaaaattattcagagtctgttggatgagttttggaagaatcctccagttttagctcctacttcaacagcatttccttatctatacagtaacccaagtgggatgtctccttatgcttctcagggttttccatttcttcctccatatcctccacaagaagcaaacaggagtatcacttctttatctgttgctgacactgtttcttcttcaacaacaagtcataccacagccaagcctgccgctccttcatttggtgtcctttcaaatctgccattacccattcccacagtggatgcttcaataccgacaagccaaaatggttttgggtacaagatgccagatgtccctgatgcatttccagaactctcagaactaagtgtgtcacaactcacagatatgaatgaacaagaggaggtattactagaacagtttctgactttgcctcaactaaaacaaattattaccgacaaagatgacttagtaaaaagtattgaggaactagcaagaaaaaatctccttttggagcccagcttggaagccaaaagacaaactgttttagataagtatgaattacttacacagatgaagtccactttcgaaaagaagatgcaaaggcagcatgaacttagtgagagctgtagtgcaagtgcccttcaggcaagattgaaagtagctgcacatgaagctgaggaagaatctgataatattgcagaagacttcttggagggaaagatggaaatagatgattttctcagtagcttcatggaaaagagaacaatttgccactgtagaagagccaaggaagagaaacttcagcaggcgatagcaatgcacagccaatttcatgctccactatagattttcctggaaacatgaactgccaagagaggaatgggacacaaaaccaaacactgttttatatttatggtttgcaaactggcatttcatcagtggctaaattcacagatatcctatatagattgtatacagaactgagactgattttgtaccgattagaatgattgctatgatctttgagaaatttttctgcactatttgcactgaaatgtttatttattgttgataaattgtatcatatttaagttccactgctgttcctcttaccttgattaaatgcctatgcatgtacttttagctagtttttaatattttataaaacttcatttaaatttgtatttttaacttgaagttccatttctttatcaaggatggtatttagatttttttcctcttaaccttttttcaaaaactattttcaactgtgaggaaacccttatttttctttctttgtggataaaactttcaaaagcaatttaagatattcatagtgttaggaaacaccaaacctgcctatgtgccatctcacaaaagaaacttttaatacctacaataaatcaaaagaataaaccagctgttcttatatattgtttcatttttaaaactaaagatgcatttaagaagcaatacaagtaaatattttacctaataggaaaaaaaaaagttgcctttcatttaaaccattccaacagaaattcttatgctaatttaaaacatatatatatctggtaggtttgtggttggataggttttctaaattcctaatgttaaaaacaatctttatgttaatatacactaaatctatacacaaaaaaagtcagtgaacttttctgacctttactgtgagttaccttttcctaagaggaaagctatagtaataagtaaaatttaatttttaggcaatcctgatttttaatgaatttaattgagtgttcttgtatactacattgagcagtttgcttctataccgtgtcacaaaattcatgtatttcttgagaagccctaaaagctcataaaggaaaatgccgtgaactatgtagctcaggcttggtaaggtgccatctaaattacaaaacaaactaatgcataattttgcttaaatttcatcccagtatgattgtcttcccaacaccagcatatagtatagattgtctgtcttttttatattttttagttcttcctgtacatgtttttggcaataaagttataggaagaacaaaattattttgttagaattaaaacatgcttaatatttagtctgtttgtggagggcaggtattcacgtggactgagatacaatgttggatacagaaaataactttcattgtcttcctgacactgtgctaaggacatgctgttaaagcttcaaagtgaccagatgaggaaggaataattaattattactcctgatttgtagataactgaggtaagagtgtttcaaatttatgatagtcttttgggtattcagaaacctttccttatactgcactggccaccagagcttaattttcccagcagttacagcaatgggagatagaacagtctcaatcttttgccaaccatcaggttcctagaaaccaggtaggtgtatcccataacaagggaggagcataccacagcccctcatttgattaattcatttgatctatctatgttattaagtacctactaggaataaggcattgtggaaatactatacaaagataaacattgtttagatgcttatctactttccttttcaccagaaaaacagaaaaaaaagaaacattttcttacagagtaaaaatgttctacataatcacatgagtagttcatctcagtgttttttattctttaaagttgaactatcccagtttcattctataccattcattggataaccttgttacaacccagtcatgaaacagagcagtgtgatcagttatctgcatttaacaaatagacaaatcagtttacataaaggttatgtatgtcacccacgatgaaaagaatctgcatttgaatatgcccgtatgaatgtgggttctgtttttgcaacagagattaagtgaccattttttctaattttatggctatatattttcttcataaaaattggtcacatcggagaagcagtgccacaggaaaaatgaaatgcatgtgaaagtttgtattctgattttacaagatgagatagaaatcagaattaaagaggaatacttaggagttactaggctaatcagtgtacgaatttgtcataggtagagatttaaaggttaatatcttaaaatagaagaaaattctaaatcaatcaatcagtgagatataaactaaacagacccacttcaaagttgaaagaaatttctaggcataaattgagactaggaaatttatatcagaatagagggtgcttgacacatatatatgcttaaattgaaggacagctcagattcatttttaggagaagaaagtaaactaatgtgctcttaaagaataaaaatttattctatggtttctgtctctgatcatcaccttccattctataaaaagctcagttactgatttgctgggtcatggtcaaaattcttacctatttatttcatatcaactttaaaaaataaattacttgcattctatatattactaattgggaagtaatatgcctcaaatcagttttatactggattattccctatgctttaaaccactgctctcaataaaacacttcctgattaatgtttgattattagatattttagtcttgttggggatattttagtcttgttgggttagccatgctctgaagaatctgtgaaagtacagtaaagttttaataagcaataaatgtaaccttttatataaatctcagtgctaggttaacttctaataagcagacgaacatgttacataaattataatgtctgtcttgtaaaaaagttgaggggactaaaagtttatgactctgatatggaagttgtcatattaaaaaactacattttaaaacatcaaatatttatactatttgcttttcaaataaaagcatagtgctgtttggcata

SEQ ID NO: 243346 - protein, 333 aa, Artificial Sequence
  derived and/or modified sequence
MAASAHGSVWGPLRLGIPGLCCRRPPLGLYARMRRLPGPEVSGRSVAAASGPGAWGTDHYCLELLRKRDYEGYLCSLLLPAESRSSVFALRAFNVELAQVKDSVSEKTIGLMRMQFWKKTVEDIYCDNPPHQPVAIELWKAVKRHNLTKRWLMKIVDEREKNLDDKAYRNIKELENYAENTQSSLLYLTLEILGIKDLHADHAASHIGKAQGIVTCLRATPYHGSRRKVFLPMDICMLHGVSQEDFLRRNQDKNVRDVIYDIASQAHLHLKHARSFHKTVPVKAFPAFLQTVSLEDFLKKIQRVDFDIFHPSLQQKNTLLPLYLYIQSWRKTY

SEQ ID NO: 243347 - DNA, 81 bp, Artificial Sequence
  derived and/or modified sequence
ttcctgatggataaaagctcgttaacgggggcattgtgcagcattaccctggcaagcccctgcggtacacccggaatttag

SEQ ID NO: 243348 - DNA, 1002 bp, Artificial Sequence
  derived and/or modified sequence
atggccgccagtgctcacggatccgtttggggcccactcaggctcgggattcctgggctgtgctgccggcgtcctcctctggggctctatgcccggatgagacggctgccaggtccggaggtctccggaagatccgtggctgccgccagcggacctggcgcgtggggcaccgaccactattgtctagaattattacgcaagcgagactatgaggggtacctgtgcagcctcctcttgcctgctgagtctcgctcttctgtattcgctctgagagccttcaatgtggagttggcacaagttaaagatagtgtgtccgagaagaccattggcctgatgcggatgcagttttggaagaagacagtcgaggatatttactgcgacaatcctccccaccagccggtcgcgatcgagctctggaaagctgtcaaaagacacaatctcaccaaacgttggctgatgaaaatagtggatgaacgagaaaagaatttagacgataaggcttaccgcaatatcaaggagctagaaaattatgccgaaaacacccaaagttccctgctctatctgaccctggaaattctgggtattaaagacttacacgctgaccatgctgcctcccacatcggcaaggcacagggaatcgtaacctgcctgcgggcgaccccttaccatggctctagaaggaaagtctttctgccaatggacatttgcatgctccacggcgtctctcaggaagactttctgcgtagaaaccaagataaaaatgtgagggacgtgatttatgacatcgctagccaggcgcatttacacctgaagcacgcccggtcattccacaaaaccgttcccgtcaaggccttccctgcgttccttcagactgtttcactggaagacttccttaaaaaaatccagagagtggatttcgacatatttcacccaagtttgcagcagaagaacacactgttgccactatacctgtacatccagtcctggcggaagacctattag

SEQ ID NO: 243349 - DNA, 1002 bp, Artificial Sequence
  derived and/or modified sequence
atggccgccagcgcccacggctctgtgtggggccccctgcggctgggcatccctggcctgtgctgcagaagaccacccctgggcctgtatgccaggatgaggcggctgcccggccctgaggtgtctggccgctctgtggccgccgccagcggccctggggcctggggcacagaccactactgcctggagctgctgaggaagagggactatgagggctacctgtgcagcctgctgctgcctgctgagagccgcagctctgtgtttgccctgcgggccttcaacgtggagctggcccaggtgaaggacagcgtgtctgagaagaccatcggcctgatgaggatgcagttctggaagaagacagtggaggacatctactgtgacaaccccccccaccagcctgtggccatcgagctgtggaaggctgtgaagaggcacaacctgaccaagcgctggctgatgaagatcgtggatgagcgggagaagaacctggatgacaaggcctacagaaacatcaaggagctggagaactatgcagagaacacccagagcagcctgctgtacctgaccctggagatcctgggcatcaaggacctgcacgccgaccatgctgccagccacatcggcaaggcccagggcatcgtgacctgcctgcgggccaccccctaccacggcagcaggaggaaggtgttcctgcccatggacatctgcatgctgcatggagtgtcccaggaggacttcctgcggaggaaccaggacaagaatgtgagagatgtgatctatgacatcgccagccaggcccacctgcacctgaagcacgcccgctccttccacaagacagtgcctgtgaaggccttccctgccttcctgcagacagtgtccctggaggacttcctgaagaagatccagagggtggactttgacatcttccaccccagcctgcagcagaagaacaccctgctgcccctgtacctgtacatccagagctggaggaagacctactag

SEQ ID NO: 243350 - DNA, 1002 bp, Artificial Sequence
  derived and/or modified sequence
atggccgccagcgcccacggcagcgtgtggggccccctgcggctgggcatacccggactgtgttgccgccgaccccccctcggactctacgctcgcatgcgaaggttgcctggacccgaggttagcgggcggtccgtggccgcagctagtgggcccggagcctggggtacggatcactactgcctcgaactgctgcggaaaagggactacgaagggtacctgtgttctcttctgttgcctgctgagtcccgttcctctgtttttgccttgcgcgcattcaacgtcgagctggcccaggtgaaagactctgtgtcagaaaagactattggcctgatgagaatgcaattttggaagaaaaccgtggaggacatttattgcgacaaccctccacaccagccggtggctatcgaactgtggaaggccgtgaagcgacacaacttgacgaaacggtggctgatgaaaattgtggacgaaagagagaagaacttagatgacaaggcctaccgaaatatcaaagagctggaaaattacgccgagaatacacagtcttccctcctgtacctgaccttagaaattttagggattaaagatctccacgctgatcacgccgcatctcatatcggaaaggctcaggggattgtcacttgtctacgagcaaccccttatcacggctccagaaggaaggtttttctgccaatggacatctgtatgttgcacggagtgtcccaggaggacttcctgcgcagaaatcaggataaaaatgtgcgcgatgtaatatacgacatcgccagtcaggctcacctgcacttgaagcatgccaggtcttttcacaagaccgtacctgtgaaggcttttcctgccttccttcagacagtgtcactcgaggacttcttgaagaagattcagcgagtggactttgacattttccatccatccttacaacagaaaaacactctgctgccactctacctctatattcagtcatggaggaagacctattag

SEQ ID NO: 243351 - DNA, 1002 bp, Artificial Sequence
  derived and/or modified sequence
atggcggcaagcgcgcacggaagtgtctgggggcctttgcggttgggcatacctggtctctgttgcaggcggcctccgctgggactgtacgcacgcatgaggaggcttcctggcccagaggtgtctggccgatcagtggccgcagcctccggacccggagcatggggcacggatcactactgccttgaacttctgcggaaaagagactatgaagggtacttgtgttcactgctactgcccgctgagagtagaagttccgtctttgctctgcgcgctttcaatgtggaactcgcccaggtaaaggactctgtatcagagaaaacgataggattaatgcgaatgcagttttggaaaaaaacagtggaggacatctactgcgataaccctccccaccaacctgtggccatagaactgtggaaagctgtcaaacgtcataatctcactaagcgctggctgatgaaaattgtagacgagagagagaagaatctcgacgataaggcttaccgcaatataaaggaactagaaaactatgctgaaaacacccagagcagtctgctgtatttgaccctcgaaatcctcgggattaaagacctccatgcggatcatgcagcatctcatatcggcaaagcacaaggcattgtgacatgtctcagggctacaccgtatcatggaagtaggcggaaagtctttttaccgatggatatctgtatgttacacggcgtgtcccaggaagacttcctgagaagaaatcaagataaaaatgtgagggatgtaatatatgatattgcgagccaggcgcatcttcacttaaaacacgccagaagcttccataaaaccgtgcccgtaaaagcctttccggcttttcttcagacagtgtcgctggaggacttcctgaaaaaaatacagagagtcgatttcgacatcttccacccctctctgcaacagaagaacaccctgctccccctgtacctgtacattcagagctggaggaagacgtactag

SEQ ID NO: 243352 - DNA, 1798 bp, Artificial Sequence
  derived and/or modified sequence
gaagggcacgcagtgccggcgtcatggcggcctccgcgcacggctctgtctgggggccgttgcggcttggcatccccggcctgtgctgccgccggccgcctctgggtctgtacgcgcgcatgcggcggctgcccgggccggaggtgtctgggcggagcgtggctgcggccagcggaccgggcgcctggggcactgaccactactgcctggagctgctgcggaaacgggattatgaaggttatttatgctccctgctgctccctgcagaatcccgaagctctgtttttgcactgagggcctttaatgtggaactggctcaggttaaagactcagtctctgagaaaacaattggactgatgcgaatgcagttttggaaaaaaactgtggaagatatatactgtgacaatccaccacatcagcctgtggccattgaactatggaaggctgttaaaagacataatctgactaaaagatggcttatgaaaatcgtcgatgaaagagaaaaaaatctggatgacaaagcatatcgtaatatcaaggaactggaaaattatgctgaaaacacacagagctctcttctttacttaacactagaaatattgggtataaaggatcttcatgcagatcatgctgcaagtcatattggaaaagcacaaggcattgtcacttgcttgagagcaacaccatatcatgggagcagaagaaaggtgttccttcccatggatatttgtatgctgcatggtgtttcacaagaggactttctacggaggaaccaagataaaaatgtgagagatgtaatatatgacattgccagtcaagcacacttgcacctaaagcatgctaggtcctttcacaaaactgttcctgtgaaagcatttcctgcttttcttcagacggtttctctagaggactttctaaagaaaattcagcgagtggattttgatatattccacccatctttacagcagaagaatacattacttccattatatttgtatattcagtcatggagaaaaacatattaaaataatttcatggcattgatgttaattctagtctattagttttataaaagttaggattcttatttaggaacaacaggaaatgactgttaaggagaaaatgaatttattgaatgggatgtcaagtagctcacaaaattgagaagttgccgtgggactagggtgccaagactgctgagattctggcagaggcactgccattggcacccctggcccagacagtgtctgctgtgctgtccctggaagctggagctccaacagggaatattggtgtagctgtgcataggccataagccacacttgagccagtgggcagggagaaggaatgtcattctcccttcaccactggggaaggaaaggggaaagggctcaagttatcataggggcttacatgctgagcagctataacctaggtgttcagaacacctggaagatgcatttatttaggggtcacaaatagtgaaattaatatttgaggaatatcagtcacgtgttgtgggcttttatccttaacgtttaatttttacaatcttgtgtaaaaatttatccatgataataacataacttctttaaggttggagtggctggcaagagcagagccttaatttgactttagctctggctggtctggaagcttttacttttttgttaatcccacttcctcactctgtcattcagcattatcatgatcgtgaacaaaattgtactgagaaagtttgtataagtgatatgaacggtattgtattgaacatccattaaagggttgctacacttta

SEQ ID NO: 243353 - DNA, 1002 bp, Artificial Sequence
  derived and/or modified sequence
atggccgccagcgcccacggcagcgtgtggggccccctgagactgggcatccccggcctgtgctgcagaagaccccccctgggcctgtacgccagaatgagaagactgcccggccccgaggtgagcggcagaagcgtggccgccgccagcggccccggcgcctggggcaccgaccactactgcctggagctgctgagaaagagagactacgagggctacctgtgcagcctgctgctgcccgccgagagcagaagcagcgtgttcgccctgagagccttcaacgtggagctggcccaggtgaaggacagcgtgagcgagaagaccatcggcctgatgagaatgcagttctggaagaagaccgtggaggacatctactgcgacaaccccccccaccagcccgtggccatcgagctgtggaaggccgtgaagagacacaacctgaccaagagatggctgatgaagatcgtggacgagagagagaagaacctggacgacaaggcctacagaaacatcaaggagctggagaactacgccgagaacacccagagcagcctgctgtacctgaccctggagatcctgggcatcaaggacctgcacgccgaccacgccgccagccacatcggcaaggcccagggcatcgtgacctgcctgagagccaccccctaccacggcagcagaagaaaggtgttcctgcccatggacatctgcatgctgcacggcgtgagccaggaggacttcctgagaagaaaccaggacaagaacgtgagagacgtgatctacgacatcgccagccaggcccacctgcacctgaagcacgccagaagcttccacaagaccgtgcccgtgaaggccttccccgccttcctgcagaccgtgagcctggaggacttcctgaagaagatccagagagtggacttcgacatcttccaccccagcctgcagcagaagaacaccctgctgcccctgtacctgtacatccagagctggagaaagacctactag

SEQ ID NO: 243354 - protein, 367 aa, Artificial Sequence
  derived and/or modified sequence
MGWRRGRGAPRFPDGMAAGQRRSSLSRLGSQAEGLLTSQTMGGQAETLLTSQTGWLLGRGCNLGSPGGQVSWDKVRIPGVLQRLGVTYFVVAVLELLFAKPVPEHCASERSCLSLRDITSSWPQWLLILVLEGLWLGLTFLLPVPGCPTGYLGPGGIGDFGKYPNCTGGAAGYIDRLLLGDDHLYQHPSSAVLYHTEVAYDPEGILGTINSIVMAFLGVQAGKILLYYKARTKDILIRFTAWCCILGLISVALTKVSENEGFIPVNKNLWSLSYVTTLSSFAFFILLVLYPVVDVKGLWTGTPFFYPGMNSILVYVGHEVFENYFPFQWKLKDNQSHKEHLTQNIVATALWVLIAYILYRKKIFWKI

SEQ ID NO: 243355 - protein, 222 aa, Artificial Sequence
  derived and/or modified sequence
MSGAGRALAALLLAASVLSAALLAPGGSSGRDAQAAPPRDLDKKRHAELKMDQALLLIHNELLWTNLTVYWKSECCYHCLFQVLVNVPQSPKAGKPSAAAASVSTQHGSILQLNDTLEEKEVCRLEYRFGEFGNYSLLVKNIHNGVSEIACDLAVNEDPVDSNLPVSIAFLIGLAVIIVISFLRLLLRVLLCHPGWSAVAPSRLTPSSASRVHTILLPQPPE

SEQ ID NO: 243356 - protein, 635 aa, Artificial Sequence
  derived and/or modified sequence
MSGAGRALAALLLAASVLSAALLAPGGSSGRDAQAAPPRDLDKKRHAELKMDQALLLIHNELLWTNLTVYWKSECCYHCLFQVLVNVPQSPKAGKPSAAAASVSTQHGSILQLNDTLEEKEVCRLEYRFGEFGNYSLLVKNIHNGVSEIACDLAVNEDPVDSNLPVSIAFLIGLAVIIVISFLRLLLSLDDFNNWISKAISSRETDRLINSELGSPSRTDPLDGDVQPATWRLSALPPRLRSVDTFRGIALILMVFVNYGGGKYWYFKHASWNGLTVADLVFPWFVFIMGSSIFLSMTSILQRGCSKFRLLGKIAWRSFLLICIGIIIVNPNYCLGPLSWDKVRIPGVLQRLGVTYFVVAVLELLFAKPVPEHCASERSCLSLRDITSSWPQWLLILVLEGLWLGLTFLLPVPGCPTGYLGPGGIGDFGKYPNCTGGAAGYIDRLLLGDDHLYQHPSSAVLYHTEVAYDPEGILGTINSIVMAFLGVQAGKILLYYKARTKDILIRFTAWCCILGLISVALTKVSENEGFIPVNKNLWSLSYVTTLSSFAFFILLVLYPVVDVKGLWTGTPFFYPGMNSILVYVGHEVFENYFPFQWKLKDNQSHKEHLTQNIVATALWVLIAYILYRKKIFWKI

SEQ ID NO: 243357 - protein, 663 aa, Artificial Sequence
  derived and/or modified sequence
MTGARASAAEQRRAGRSGQARAAERAAGMSGAGRALAALLLAASVLSAALLAPGGSSGRDAQAAPPRDLDKKRHAELKMDQALLLIHNELLWTNLTVYWKSECCYHCLFQVLVNVPQSPKAGKPSAAAASVSTQHGSILQLNDTLEEKEVCRLEYRFGEFGNYSLLVKNIHNGVSEIACDLAVNEDPVDSNLPVSIAFLIGLAVIIVISFLRLLLSLDDFNNWISKAISSRETDRLINSELGSPSRTDPLDGDVQPATWRLSALPPRLRSVDTFRGIALILMVFVNYGGGKYWYFKHASWNGLTVADLVFPWFVFIMGSSIFLSMTSILQRGCSKFRLLGKIAWRSFLLICIGIIIVNPNYCLGPLSWDKVRIPGVLQRLGVTYFVVAVLELLFAKPVPEHCASERSCLSLRDITSSWPQWLLILVLEGLWLGLTFLLPVPGCPTGYLGPGGIGDFGKYPNCTGGAAGYIDRLLLGDDHLYQHPSSAVLYHTEVAYDPEGILGTINSIVMAFLGVQAGKILLYYKARTKDILIRFTAWCCILGLISVALTKVSENEGFIPVNKNLWSLSYVTTLSSFAFFILLVLYPVVDVKGLWTGTPFFYPGMNSILVYVGHEVFENYFPFQWKLKDNQSHKEHLTQNIVATALWVLIAYILYRKKIFWKI

SEQ ID NO: 243358 - DNA, 1104 bp, Artificial Sequence
  derived and/or modified sequence
atgggctggcgacgcggcaggggcgctccccgtttcccagatggcatggcagcgggccaaaggcggtcttccctctcccgtcttgggtcacaggcagagggcctcctgactagccagacaatgggcgggcaggccgagacactactgacttcacaaaccgggtggcttcttggaagggggtgcaatctgggcagcccgggaggccaggtctcttgggacaaggtccgaattccaggcgtcttacagcgcctcggagtcacctacttcgtggtggccgtactggaacttctttttgccaaaccagtgccagagcattgtgctagcgaacggtcttgtctgtcactcagggacattaccagcagttggccccagtggctattgatcctcgtcttggagggcttgtggctcgggctaacctttcttctgcccgtgccaggctgtcctacgggatatctgggacccggtggcataggggatttcggtaaataccccaattgcacaggcggtgccgcggggtatattgatagattgctattgggggatgatcacctgtaccaacacccctcatccgctgtgctctatcacacagaagtggcttacgatcctgagggtatccttggaacaataaattccattgtgatggcatttttgggagtgcaggcgggcaagatcctgttatactacaaggccagaactaaggacattctgatccgtttcaccgcatggtgctgtatccttggcctgattagcgttgccttaacaaaggtaagcgagaatgagggcttcatacctgtgaataagaacctgtggtcactgtcgtacgttactacgctaagcagctttgctttcttcatcctgctagtgttatatccagtcgtagatgttaaaggactctggaccggcactcctttcttttatcccgggatgaacagcatcttggtctacgtgggacatgaagtcttcgagaactactttccattccagtggaagcttaaagacaaccagtcccataaggaacacctgacgcagaatatcgttgccaccgcactttgggttctcatcgcctacattctatatcgcaaaaagatcttttggaagatttag

SEQ ID NO: 243359 - DNA, 1908 bp, Artificial Sequence
  derived and/or modified sequence
atgtccggagcaggacgggcacttgctgccctactgcttgcagccagcgtcctgtcagctgccctactcgcaccgggcggatccagcggtcgggatgcgcaggcagcaccaccaagagatctggataagaagcggcacgctgagctaaagatggatcaggcactgttgcttatccataacgagctgctttggactaatctgactgtgtattggaagtccgagtgctgttatcactgtctgtttcaagttctagtgaacgttccccagagcccaaaggccggaaagcctagtgctgcagctgccagcgtatctactcagcatgggtccattctccaacttaatgacaccctcgaggagaaagaggtgtgtaggctcgaataccgctttggggaatttggcaactactctctgctcgtgaagaatatccataacggcgtgagcgagatcgcctgcgatcttgccgtcaacgaagatcctgtagatagcaatctgccagtgtctatagcgtttctcattggcctggccgttattatcgtgatctcgttcttacgattgttattgagccttgacgactttaacaattggatcagtaaggcgattagctcccgagagacagatagactaatcaattctgagctcggcagcccgtcccggactgacccactagacggagatgtccaacccgccacttggaggctgtccgccctgcccccaagactgcgcagtgttgataccttcaggggcatagccctcatactgatggttttcgtgaattatggaggcggcaaatactggtacttcaaacatgcgtcgtggaatggcttgactgttgcagaccttgtgtttccctggttcgtgttcatcatgggtagttcgatatttctctcaatgacatctatcttgcagagaggctgctcaaagttccggctcctgggcaaaatcgcatggcggtcttttctgctcatttgtatcgggatcattatcgtaaatcctaactactgtctcgggcctctgagctgggataaggtacggatcccgggtgttctgcagcggttgggggtgacttacttcgtggtcgcagtccttgagcttcttttcgcgaaacctgtgccagagcattgcgccagcgaaagatcctgcctctctttgagagatattacatccagctggccccagtggctgctaatactggtgctggagggcctgtggctaggcctgacctttcttctgccagtgcctgggtgtcctaccgggtacttgggcccaggaggaattggcgatttcggcaagtacccaaattgcacgggcggagccgctgggtatattgatagactgttgttgggcgacgaccacctgtatcagcacccttcctctgcggtgctgtaccatactgaggtggcttatgacccagagggcatattgggaaccattaatagcatagtcatggctttccttggagttcaggcgggcaaaatcctgctctactacaaggccaggactaaggatattctgatacgctttaccgcttggtgctgcattctgggcttgattagtgtggccctgactaaagtgagtgagaacgagggattcatccccgttaacaagaacctgtggagcctctcctatgttactacactatcttcctttgcattcttcatactattggtgttgtaccctgttgttgacgtgaaaggcctgtggactggcactccgtttttttatcctggaatgaattctatcctggtttatgtgggtcacgaggtgtttgagaactattttccctttcagtggaagttgaaggataatcagtctcataaagagcacctgacacagaacatcgtggcgaccgcactgtgggtgctcattgcctacatcttatatcggaaaaagattttctggaagatctag

SEQ ID NO: 243360 - DNA, 1992 bp, Artificial Sequence
  derived and/or modified sequence
atgaccggtgctcgagcaagcgccgctgagcagagacgagccggccgatcagggcaggcacgggccgccgagcgcgcagcgggcatgtctggggctgggcgggcgctggctgcgttactgttggccgcatccgttttgtcagcagctttgctagcacctggtgggagcagcggtcgggatgcgcaagcggcccctccccgcgatctggacaaaaagagacatgcagagctgaagatggaccaagctttactactgatccataatgagctgctctggacaaacctaacagtttactggaaaagcgagtgctgctatcactgcctttttcaggttctcgtgaatgttcctcagagccctaaggccggcaagccctccgcggctgccgcctcagtgagcacgcagcatggctctattctgcaattaaatgacactttggaagaaaaggaagtgtgtcggcttgagtatcgattcggagaatttggcaactatagcttgctggtgaagaacattcacaatggggtgtccgaaatcgcttgtgacctcgccgtgaacgaagaccccgtggactctaacttgcccgtctccattgctttcctgataggcctggccgttatcatcgtgatcagcttcctccgtctgctcttatctctagacgatttcaataactggatcagcaaagcaatatcttcaagagaaaccgataggttgataaacagtgagctcgggtctccaagtagaaccgacccactggatggcgatgtccagcccgctacttggaggctgtccgctctacccccgcgactgaggtctgttgacacctttcgtggtattgccttaattctgatggtcttcgtgaattacggcgggggtaaatactggtacttcaagcatgcatcctggaatggcctcaccgtggcagacttggtgtttccatggtttgtgtttataatgggatcgagtatctttctctcaatgacctcaatacttcagcgcggctgtagtaaattcaggctccttgggaaaatcgcatggcgatcattccttctcatctgcattgggatcattattgtgaaccccaactactgtcttgggccacttagctgggataaagttcggattcccggcgtgctgcaacgcttgggcgtcacctactttgttgtcgcagtgctcgaactattgtttgctaagcccgtgccagagcattgcgcatctgaaagaagctgcctgtccttgcgagacattacttccagttggccacagtggcttctcattctagtgcttgaggggctctggctcggtttaacattcctgctgcccgtgccggggtgtcctaccgggtacctcggacctggagggattggagattttggaaaatacccaaattgcacgggaggcgcagcagggtacattgataggttgcttctgggggacgatcacctgtatcagcatccgtccagtgcagttctgtaccatacagaagtggcctacgaccctgaaggaatccttggcaccattaacagcatcgtgatggcttttctaggggtacaagctggcaagattctcttatattacaaagctagaaccaaagatatactgattcgcttcacggcttggtgctgcatcttgggcctgattagtgtagcactcaccaaggtgagcgaaaatgaaggctttatcccagttaataaaaatctgtggtcactgagctacgttaccacccttagcagcttcgccttcttcatactgctggtgctctatcccgtggtcgatgtgaaggggttgtggaccggtacaccattcttctacccaggaatgaacagtattctggtatacgtgggccacgaggtgttcgagaactattttcctttccagtggaagctgaaggataaccagagccataaagagcacttgacgcagaatatcgtagctaccgcactatgggttctgatcgcgtacattctgtatcgtaagaaaattttttggaagatttag

SEQ ID NO: 243361 - DNA, 2324 bp, Artificial Sequence
  derived and/or modified sequence
atttcccagacggggtggttgccggacggaggggctcctcacttctcagacggggcggttgccaggcagagggtttcctcacttctcagacggagcggccgggcagagacgctccccacctcccagacagggctgcggcccagcagaggcactcctcacatcccagacagggcggcggggcagaggtgctccccacatctcagacgatgggcggccgggcagagacgctcctcacttcctagatgggatggcggcggggaagaggcgctcctcgcttcccagatgggatggcggccgggcagagacgctcctcactttccagactgggcagccaggcagaggggctcctcacatcccagacgatgggtggccaagcagagacgctcctcacttcccagacggggtggctgctgggcagaggctgcaatctcggctctccgggaggccaagtgtcttgggacaaggtgcgcattcctggtgtgctgcagcgattgggagtgacatactttgtggttgctgtgttggagctcctctttgctaaacctgtgcctgaacattgtgcctcggagaggagctgcctttctcttcgagacatcacgtccagctggccccagtggctgctcatcctggtgctggaaggcctgtggctgggcttgacattcctcctgccagtccctgggtgccctactggttatcttggtcctgggggcattggagattttggcaagtatccaaattgcactggaggagctgcaggctacatcgaccgcctgctgctgggagacgatcacctttaccagcacccatcttctgctgtactttaccacaccgaggtggcctatgaccccgagggcatcctgggcaccatcaactccatcgtgatggcctttttaggagttcaggcaggaaaaatactattgtattacaaggctcggaccaaagacatcctgattcgattcactgcttggtgttgtattcttgggctcatttctgttgctctgacgaaggtttctgaaaatgaaggctttattccagtaaacaaaaatctctggtccctttcgtatgtcactacgctcagttcttttgccttcttcatcctgctggtcctgtacccagttgtggatgtgaaggggctgtggacaggaaccccattcttttatccaggaatgaattccattctggtatatgtcggccacgaggtgtttgagaactacttcccctttcagtggaagctgaaggacaaccagtcccacaaggagcacctgactcagaacatcgtcgccactgccctctgggtgctcattgcctacatcctctatagaaagaagattttttggaaaatctgatggctcccactgagatgtgctgctggaagactctagtaggcctgcagggaggactgaagcagcctttgttaaagggaagcattcattaggaaattgactggctgcgtgtttacagactctgggggaagacactgatgtcctcaaactggttaactgtgacacggctcgccagaactctgcctgtctatttgtgacttacagatttgaaatgtaattgtcttttttcctccatcttctgtggaaatggatgtctttggaacttcattccgaggagataagctttaactttccaaaagggaattgccatgggtgtttttcttctgtggtgagtgaaacaatctgaggtctggttcttgctgaccttgttgccctgcaaacttcctttccacgtgtacgcgcacaccaacacgaaatgccatcactcctactgcggctgctatgaagcttactggttgtgatgtgttataatttagtctgtttttttgattgaatgcagtttaatgtttccagaaagccaaagtaattttcttttcagatatgcaaggctttggtgggtccaaaaaatgtctatcacaagccattttttccttttcctctctcgaaaagttaaaatatctatgtgttattcccaaaccctcttacctatgtatctgcctgtctgtccatcatcttccttcctccctatctctgtgtatctggatggcagccgctgcccaggggagtggctgtggggagggcaggtactgtctttgcctgtgggtccagctgagccatccctgctgggtgatgctgggcaagacccttggcccgtctgggccttggcttcctcacttgtgaaatgagcgggaagatgactctcagttccttccacctcttagacatggtgaggtaacagacatcaaaagcttttctgaaatcttcagaagaaatagttccattacagaaaactcttcaaaataaatagtagtgaaaactttt

SEQ ID NO: 243362 - DNA, 5236 bp, Artificial Sequence
  derived and/or modified sequence
gggcgcagcgggcaggcaagggcggccgagcgggcggcgggcatgagcggggcgggcagggcgctggccgcgctgctgctggccgcgtccgtgctgagcgccgcgctgctggcccccggcggctcttcggggcgcgatgcccaggccgcgccgccacgagacttagacaaaaaaagacatgcagagctgaagatggatcaggctttgctactcatccataatgaacttctctggaccaacttgaccgtctactggaaatctgaatgctgttatcactgcttgtttcaggttctggtaaacgttcctcagagtccaaaagcagggaagcctagtgctgcagctgcctctgtcagcacccagcacggatctatcctgcagctgaacgacaccttggaagagaaagaagtttgtaggttggaatacagatttggagaatttggaaactattctctcttggtaaagaacatccataatggagttagtgaaattgcctgtgacctggctgtgaacgaggatccagttgatagtaaccttcctgtgagcattgcattccttattggtcttgctgtcatcattgtgatatcctttctgaggctcttgttgagtttggatgactttaacaattggatttctaaagccataagttctcgagaaactgatcgcctcatcaattctgagctgggatctcccagcaggacagaccctctcgatggtgatgttcagccagcaacgtggcgtctatctgccctgccgccccgcctccgcagcgtggacaccttcagggggattgctcttatactcatggtctttgtcaattatggaggaggaaaatattggtacttcaaacatgcaagttggaatgggctgacagtggctgacctcgtgttcccgtggtttgtatttattatgggatcttccatttttctatcgatgacttctatactgcaacgggggtgttcaaaattcagattgctggggaagattgcatggaggagtttcctgttaatctgcataggaattatcattgtgaatcccaattattgccttggtccattgtcttgggacaaggtgcgcattcctggtgtgctgcagcgattgggagtgacatactttgtggttgctgtgttggagctcctctttgctaaacctgtgcctgaacattgtgcctcggagaggagctgcctttctcttcgagacatcacgtccagctggccccagtggctgctcatcctggtgctggaaggcctgtggctgggcttgacattcctcctgccagtccctgggtgccctactggttatcttggtcctgggggcattggagattttggcaagtatccaaattgcactggaggagctgcaggctacatcgaccgcctgctgctgggagacgatcacctttaccagcacccatcttctgctgtactttaccacaccgaggtggcctatgaccccgagggcatcctgggcaccatcaactccatcgtgatggcctttttaggagttcaggcaggaaaaatactattgtattacaaggctcggaccaaagacatcctgattcgattcactgcttggtgttgtattcttgggctcatttctgttgctctgacgaaggtttctgaaaatgaaggctttattccagtaaacaaaaatctctggtccctttcgtatgtcactacgctcagttcttttgccttcttcatcctgctggtcctgtacccagttgtggatgtgaaggggctgtggacaggaaccccattcttttatccaggaatgaattccattctggtatatgtcggccacgaggtgtttgagaactacttcccctttcagtggaagctgaaggacaaccagtcccacaaggagcacctgactcagaacatcgtcgccactgccctctgggtgctcattgcctacatcctctatagaaagaagattttttggaaaatctgatggctcccactgagatgtgctgctggaagactctagtaggcctgcagggaggactgaagcagcctttgttaaagggaagcattcattaggaaattgactggctgcgtgtttacagactctgggggaagacactgatgtcctcaaactggttaactgtgacacggctcgccagaactctgcctgtctatttgtgacttacagatttgaaatgtaattgtcttttttcctccatcttctgtggaaatggatgtctttggaacttcattccgaggagataagctttaactttccaaaagggaattgccatgggtgtttttcttctgtggtgagtgaaacaatctgaggtctggttcttgctgaccttgttgccctgcaaacttcctttccacgtgtacgcgcacaccaacacgaaatgccatcactcctactgcggctgctatgaagcttactggttgtgatgtgttataatttagtctgtttttttgattgaatgcagtttaatgtttccagaaagccaaagtaattttcttttcagatatgcaaggctttggtgggtccaaaaaatgtctatcacaagccattttttccttttcctctctcgaaaagttaaaatatctatgtgttattcccaaaccctcttacctatgtatctgcctgtctgtccatcatcttccttcctccctatctctgtgtatctggatggcagccgctgcccaggggagtggctgtggggagggcaggtactgtctttgcctgtgggtccagctgagccatccctgctgggtgatgctgggcaagacccttggcccgtctgggccttggcttcctcacttgtgaaatgagcgggaagatgactctcagttccttccacctcttagacatggtgaggtaacagacatcaaaagcttttctgaaatcttcagaagaaatagttccattacagaaaactcttcaaaataaatagtagtgaaaacttttaaaaactctcattggagtaagtcttttcaagatgatcctccacaatggaggcagcgttcctacttgtcatcacacagctgaagacattgtttcttaggtgtgaaatcggggacaaaggacaaacagagacacacggcattgttcatgggaggcatcgtcaccctcctgggtgttctgtgggaatttcctgtgtgaggaaaacgtggccacagggttgtgctgtacccacccttccccggcgagatggccctcggcctgtgccgctgcttccaccctcgccactccatggcagcttttggtctgtttccggctctgccctctgccctgaactctcatccggcttgtacctgcctgctggacccctccacctggaggccagcccatgtctcaggcccagccctagcctcttctcctcaaattctaagtgttttctctttaggtttccctggctttgtgaatggatcatgtgtctctaggtataaacctgacatcatctttccacccggcttacctccaccagatctccccagttctgtctccatcttctacctgcagctgctctgttctcatggtcactgctgcatcactgagtctggacccttgttatcattttcaaactggcctccttccctcgttccccacttcttaaagtcacctgtccattgccaccagattaagctttctccagccagatcacctctctctgagaaacctccattgacatggaaacaccattgtctggcacacatactcacatactcaccttcccgtcttgatccccacacatctttccagcctcccctcccactccactccctgctctctcctccacctccccatcctcttgtctcccctcccctctgaatccagcccagcggggcttctcctgcctccatcacatcacagaagtacctcctgcttctggttttaattagagccttccccgattacattttcctctgaattttttcctatctacatttgatctgtcatgtttaaaccccctacttctaagggaacttctctaatctcttatcctcatccccaaatagtgttttcttcctctgggttcttataatgttggtatcaatctcacagcatttagtgcttcctgcctggtgtgacagttacctgtgtgcatgtgcaatttctaatttcccacgctagactgtgagcttcctaaggcaagaatcatgccttgttggtttctgtattcctcatggtgccaaacacagtgccttctacattgcaggcgctgaataaacatttttaaagcaaaatgatgtggatttttaaaataaatatttaagtgctggtaagatgagcatgtatccggggtgcccatgaaatgttcttggggccgtgtggggacagtcgtcattcctcctcctgccacccttttctttcagtgagtcactgtggatggtcccagctgtgtcatcccaaagttcagcagggaaagctgagctgggcctctccaggtgagttttctagaagcatttctcaaactgtgggttacatcaacttgggtgtcttgagctgtaaggaaggaactccggagtcagctgggctacaggggagcttctctaagtcctgcgggaggccagacccagcctgagcttgctgttagctagcggaggcagctgctggtggcccaggtgctcgacaccaggcatcccctctcctcccacgaagggtgtgccataatccccttcaacaggaaatgcttcccagaagcctctcagcagcctcccctcctgtcctatcagctagaagcgcctcgcttgtcccaagaccagcagggacagggaactgtccgagcccgtggctgtgtggaggaaggcgacccccagcacaagattggtttcctttgggaagggaagagggagtgtgttggggtaaggggtagagcagaggaatggtcagggggcaacaaccgctgacagctgcaacaggtgcatggcatctcacagggaggcagggaggtgcgagctcctaagtaatggagcaaaaaaattctattctgtagaatggggagagaaaatgtgacattttaatttttttttgcatttatattcctaattcctacttaaagtgaatatactgccgctgtagatcataaaatgtatcttttccatggccaacaaggggcatcttttataaatgcataataacccagtttgtatcaaagggtatcgacttaagtgaaatttcaacatgctgttactttttccttttaatgtaattctgttttccaaataaatgggggagacaaatggactttgagtaaatttcttagcatatcaaa

SEQ ID NO: 243363 - DNA, 5249 bp, Artificial Sequence
  derived and/or modified sequence
atgacgggcgcgcgggcgtccgcggcggagcagcgcagggcggggcgcagcgggcaggcaagggcggccgagcgggcggcgggcatgagcggggcgggcagggcgctggccgcgctgctgctggccgcgtccgtgctgagcgccgcgctgctggcccccggcggctcttcggggcgcgatgcccaggccgcgccgccacgagacttagacaaaaaaagacatgcagagctgaagatggatcaggctttgctactcatccataatgaacttctctggaccaacttgaccgtctactggaaatctgaatgctgttatcactgcttgtttcaggttctggtaaacgttcctcagagtccaaaagcagggaagcctagtgctgcagctgcctctgtcagcacccagcacggatctatcctgcagctgaacgacaccttggaagagaaagaagtttgtaggttggaatacagatttggagaatttggaaactattctctcttggtaaagaacatccataatggagttagtgaaattgcctgtgacctggctgtgaacgaggatccagttgatagtaaccttcctgtgagcattgcattccttattggtcttgctgtcatcattgtgatatcctttctgaggctcttgttgagtttggatgactttaacaattggatttctaaagccataagttctcgagaaactgatcgcctcatcaattctgagctgggatctcccagcaggacagaccctctcgatggtgatgttcagccagcaacgtggcgtctatctgccctgccgccccgcctccgcagcgtggacaccttcagggggattgctcttatactcatggtctttgtcaattatggaggaggaaaatattggtacttcaaacatgcaagttggaatgggctgacagtggctgacctcgtgttcccgtggtttgtatttattatgggatcttccatttttctatcgatgacttctatactgcaacgggggtgttcaaaattcagattgctggggaagattgcatggaggagtttcctgttaatctgcataggaattatcattgtgaatcccaattattgccttggtccattgtcttgggacaaggtgcgcattcctggtgtgctgcagcgattgggagtgacatactttgtggttgctgtgttggagctcctctttgctaaacctgtgcctgaacattgtgcctcggagaggagctgcctttctcttcgagacatcacgtccagctggccccagtggctgctcatcctggtgctggaaggcctgtggctgggcttgacattcctcctgccagtccctgggtgccctactggttatcttggtcctgggggcattggagattttggcaagtatccaaattgcactggaggagctgcaggctacatcgaccgcctgctgctgggagacgatcacctttaccagcacccatcttctgctgtactttaccacaccgaggtggcctatgaccccgagggcatcctgggcaccatcaactccatcgtgatggcctttttaggagttcaggcaggaaaaatactattgtattacaaggctcggaccaaagacatcctgattcgattcactgcttggtgttgtattcttgggctcatttctgttgctctgacgaaggtttctgaaaatgaaggctttattccagtaaacaaaaatctctggtccctttcgtatgtcactacgctcagttcttttgccttcttcatcctgctggtcctgtacccagttgtggatgtgaaggggctgtggacaggaaccccattcttttatccaggaatgaattccattctggtatatgtcggccacgaggtgtttgagaactacttcccctttcagtggaagctgaaggacaaccagtcccacaaggagcacctgactcagaacatcgtcgccactgccctctgggtgctcattgcctacatcctctatagaaagaagattttttggaaaatctgatggctcccactgagatgtgctgctggaagactctagtaggcctgcagggaggactgaagcagcctttgttaaagggaagcattcattaggaaattgactggctgcgtgtttacagactctgggggaagacactgatgtcctcaaactggttaactgtgacacggctcgccagaactctgcctgtctatttgtgacttacagatttgaaatgtaattgtcttttttcctccatcttctgtggaaatggatgtctttggaacttcattccgaggagataagctttaactttccaaaagggaattgccatgggtgtttttcttctgtggtgagtgaaacaatctgaggtctggttcttgctgaccttgttgccctgcaaacttcctttccacgtgtacgcgcacaccaacacgaaatgccatcactcctactgcggctgctatgaagcttactggttgtgatgtgttataatttagtctgtttttttgattgaatgcagtttaatgtttccagaaagccaaagtaattttcttttcagatatgcaaggctttggtgggtccaaaaaatgtctatcacaagccattttttccttttcctctctcgaaaagttaaaatatctatgtgttattcccaaaccctcttacctatgtatctgcctgtctgtccatcatcttccttcctccctatctctgtgtatctggatggcagccgctgcccaggggagtggctgtggggagggcaggtactgtctttgcctgtgggtccagctgagccatccctgctgggtgatgctgggcaagacccttggcccgtctgggccttggcttcctcacttgtgaaatgagcgggaagatgactctcagttccttccacctcttagacatggtgaggtaacagacatcaaaagcttttctgaaatcttcagaagaaatagttccattacagaaaactcttcaaaataaatagtagtgaaaacttttaaaaactctcattggagtaagtcttttcaagatgatcctccacaatggaggcagcgttcctacttgtcatcacacagctgaagacattgtttcttaggtgtgaaatcggggacaaaggacaaacagagacacacggcattgttcatgggaggcatcgtcaccctcctgggtgttctgtgggaatttcctgtgtgaggaaaacgtggccacagggttgtgctgtacccacccttccccggcgagatggccctcggcctgtgccgctgcttccaccctcgccactccatggcagcttttggtctgtttccggctctgccctctgccctgaactctcatccggcttgtacctgcctgctggacccctccacctggaggccagcccatgtctcaggcccagccctagcctcttctcctcaaattctaagtgttttctctttaggtttccctggctttgtgaatggatcatgtgtctctaggtataaacctgacatcatctttccacccggcttacctccaccagatctccccagttctgtctccatcttctacctgcagctgctctgttctcatggtcactgctgcatcactgagtctggacccttgttatcattttcaaactggcctccttccctcgttccccacttcttaaagtcacctgtccattgccaccagattaagctttctccagccagatcacctctctctgagaaacctccattgacatggaaacaccattgtctggcacacatactcacatactcaccttcccgtcttgatccccacacatctttccagcctcccctcccactccactccctgctctctcctccacctccccatcctcttgtctcccctcccctctgaatccagcccagcggggcttctcctgcctccatcacatcacagaagtacctcctgcttctggttttaattagagccttccccgattacattttcctctgaattttttcctatctacatttgatctgtcatgtttaaaccccctacttctaagggaacttctctaatctcttatcctcatccccaaatagtgttttcttcctctgggttcttataatgttggtatcaatctcacagcatttagtgcttcctgcctggtgtgacagttacctgtgtgcatgtgcaatttctaatttcccacgctagactgtgagcttcctaaggcaagaatcatgccttgttggtttctgtattcctcatggtgccaaacacagtgccttctacattgcaggcgctgaataaacatttttaaagcaaaatgatgtggatttttaaaataaatatttaagtgctggtaagatgagcatgtatccggggtgcccatgaaatgttcttggggccgtgtggggacagtcgtcattcctcctcctgccacccttttctttcagtgagtcactgtggatggtcccagctgtgtcatcccaaagttcagcagggaaagctgagctgggcctctccaggtgagttttctagaagcatttctcaaactgtgggttacatcaacttgggtgtcttgagctgtaaggaaggaactccggagtcagctgggctacaggggagcttctctaagtcctgcgggaggccagacccagcctgagcttgctgttagctagcggaggcagctgctggtggcccaggtgctcgacaccaggcatcccctctcctcccacgaagggtgtgccataatccccttcaacaggaaatgcttcccagaagcctctcagcagcctcccctcctgtcctatcagctagaagcgcctcgcttgtcccaagaccagcagggacagggaactgtccgagcccgtggctgtgtggaggaaggcgacccccagcacaagattggtttcctttgggaagggaagagggagtgtgttggggtaaggggtagagcagaggaatggtcagggggcaacaaccgctgacagctgcaacaggtgcatggcatctcacagggaggcagggaggtgcgagctcctaagtaatggagcaaaaaaattctattctgtagaatggggagagaaaatgtgacattttaatttttttttgcatttatattcctaattcctacttaaagtgaatatactgccgctgtagatcataaaatgtatcttttccatggccaacaaggggcatcttttataaatgcataataacccagtttgtatcaaagggtatcgacttaagtgaaatttcaacatgctgttactttttccttttaatgtaattctgttttccaaataaatgggggagacaaatgg

SEQ ID NO: 243364 - DNA, 1104 bp, Artificial Sequence
  derived and/or modified sequence
atgggctggaggcggggccgcggggccccccgcttcccagatggcatggccgccggccagaggaggagcagcctgagccggctgggcagccaggccgagggcctgctgaccagccagaccatgggcggccaggccgagaccctgctgaccagccagacaggctggctgctgggccggggctgcaacctgggcagccctgggggccaggtgtcctgggacaaggtgcgcatccctggggtgctgcagaggctgggcgtgacctactttgtggtggccgtgctggagctgctgtttgccaagcctgtgcctgagcactgtgccagcgagaggagctgcctgagcctgcgggacatcaccagctcctggccccagtggctgctgatcctggtgctggagggcctgtggctgggcctgaccttcctgctgcctgtgcccggctgccccaccggctacctgggccctgggggcattggagactttgggaagtaccccaactgcacaggaggagctgctggctacatcgaccggctgctgctgggagatgaccacctgtaccagcaccccagcagcgctgtgctgtaccacacagaggtggcctatgaccctgagggcatcctgggcaccatcaacagcatcgtgatggccttcctgggcgtgcaggccggcaagatcctgctgtactacaaggcccggaccaaggacatcctgatccgcttcaccgcctggtgctgcatcctgggcctcatctctgtggccctgaccaaggtgtctgaaaatgaaggcttcatccctgtgaacaagaacctgtggagcctgtcctatgtgaccaccctgagcagctttgccttcttcatcctgctggtgctgtaccctgtggtggatgtgaagggcctgtggacaggcacccccttcttctacccaggcatgaacagcatcctggtgtatgtgggccacgaggtgtttgagaactacttccccttccagtggaagctgaaggacaaccagagccacaaggagcacctgacccagaacatcgtggccacagccctgtgggtgctgattgcctacatcctgtacaggaagaagatcttctggaagatctag

SEQ ID NO: 243365 - DNA, 1908 bp, Artificial Sequence
  derived and/or modified sequence
atgtctggggccggccgggccctggccgccctgctgctggccgcctctgtgctgtctgctgccctgctggcccctgggggcagcagcggcagagatgcccaggccgccccaccccgggacctggacaagaagagacatgctgagctgaagatggaccaggccctgctgctgatccacaatgagctgctgtggaccaacctgactgtgtactggaagtctgagtgctgctaccactgcctcttccaggtgctggtgaatgtgccccagagccccaaggccggcaagcccagcgctgctgctgcctctgtgtccacccagcacggcagcatcctgcagctgaatgacaccctggaggagaaggaggtgtgccgcctggagtacagatttggagaatttggaaactacagcctgctggtgaagaacatccacaacggggtgtctgaaattgcctgtgacctggccgtgaatgaagatcctgtggacagcaacctgcctgtgtccatcgccttcctgattggcctggccgtcatcatcgtcatctccttcctgcggctgctgctgagcctggatgacttcaacaactggatcagcaaggccatcagcagccgggagacagacaggctcatcaacagcgagctgggcagccccagcaggacagaccccctggatggagatgtgcagcctgccacctggaggctgagcgccctgcccccccggctgcggtctgtggacaccttccggggcatcgccctgatcctgatggtgtttgtgaactatggaggcggcaagtactggtacttcaagcacgcctcctggaatggcctgactgtggccgacctggtgttcccctggtttgtgttcatcatgggcagcagcatcttcctgtccatgaccagcatcctgcagaggggctgcagcaagttccggctgctgggcaagatcgcctggaggagcttcctgctgatctgcatcggcatcatcatcgtgaaccccaactactgcctgggccccctgtcctgggacaaggtgcgcatccctggggtgctgcagaggctgggcgtgacctactttgtggtggccgtgctggagctgctgtttgccaagcctgtgcctgagcactgtgccagcgagaggagctgcctgagcctgcgggacatcaccagctcctggccccagtggctgctgatcctggtgctggagggcctgtggctgggcctgaccttcctgctgcctgtgcccggctgccccaccggctacctgggccctgggggcattggagactttgggaagtaccccaactgcacaggaggagctgctggctacatcgaccggctgctgctgggagatgaccacctgtaccagcaccccagcagcgctgtgctgtaccacacagaggtggcctatgaccctgagggcatcctgggcaccatcaacagcatcgtgatggccttcctgggcgtgcaggccggcaagatcctgctgtactacaaggcccggaccaaggacatcctgatccgcttcaccgcctggtgctgcatcctgggcctcatctctgtggccctgaccaaggtgtctgaaaatgaaggcttcatccctgtgaacaagaacctgtggagcctgtcctatgtgaccaccctgagcagctttgccttcttcatcctgctggtgctgtaccctgtggtggatgtgaagggcctgtggacaggcacccccttcttctacccaggcatgaacagcatcctggtgtatgtgggccacgaggtgtttgagaactacttccccttccagtggaagctgaaggacaaccagagccacaaggagcacctgacccagaacatcgtggccacagccctgtgggtgctgattgcctacatcctgtacaggaagaagatcttctggaagatctag

SEQ ID NO: 243366 - DNA, 1992 bp, Artificial Sequence
  derived and/or modified sequence
atgaccggggcccgggccagcgctgctgagcagaggcgggccggccgcagcggccaggcccgggctgctgagagagctgctggcatgtctggggccggccgggccctggccgccctgctgctggccgcctctgtgctgtctgctgccctgctggcccctgggggcagcagcggcagagatgcccaggccgccccaccccgggacctggacaagaagagacatgctgagctgaagatggaccaggccctgctgctgatccacaatgagctgctgtggaccaacctgactgtgtactggaagtctgagtgctgctaccactgcctcttccaggtgctggtgaatgtgccccagagccccaaggccggcaagcccagcgctgctgctgcctctgtgtccacccagcacggcagcatcctgcagctgaatgacaccctggaggagaaggaggtgtgccgcctggagtacagatttggagaatttggaaactacagcctgctggtgaagaacatccacaacggggtgtctgaaattgcctgtgacctggccgtgaatgaagatcctgtggacagcaacctgcctgtgtccatcgccttcctgattggcctggccgtcatcatcgtcatctccttcctgcggctgctgctgagcctggatgacttcaacaactggatcagcaaggccatcagcagccgggagacagacaggctcatcaacagcgagctgggcagccccagcaggacagaccccctggatggagatgtgcagcctgccacctggaggctgagcgccctgcccccccggctgcggtctgtggacaccttccggggcatcgccctgatcctgatggtgtttgtgaactatggaggcggcaagtactggtacttcaagcacgcctcctggaatggcctgactgtggccgacctggtgttcccctggtttgtgttcatcatgggcagcagcatcttcctgtccatgaccagcatcctgcagaggggctgcagcaagttccggctgctgggcaagatcgcctggaggagcttcctgctgatctgcatcggcatcatcatcgtgaaccccaactactgcctgggccccctgtcctgggacaaggtgcgcatccctggggtgctgcagaggctgggcgtgacctactttgtggtggccgtgctggagctgctgtttgccaagcctgtgcctgagcactgtgccagcgagaggagctgcctgagcctgcgggacatcaccagctcctggccccagtggctgctgatcctggtgctggagggcctgtggctgggcctgaccttcctgctgcctgtgcccggctgccccaccggctacctgggccctgggggcattggagactttgggaagtaccccaactgcacaggaggagctgctggctacatcgaccggctgctgctgggagatgaccacctgtaccagcaccccagcagcgctgtgctgtaccacacagaggtggcctatgaccctgagggcatcctgggcaccatcaacagcatcgtgatggccttcctgggcgtgcaggccggcaagatcctgctgtactacaaggcccggaccaaggacatcctgatccgcttcaccgcctggtgctgcatcctgggcctcatctctgtggccctgaccaaggtgtctgaaaatgaaggcttcatccctgtgaacaagaacctgtggagcctgtcctatgtgaccaccctgagcagctttgccttcttcatcctgctggtgctgtaccctgtggtggatgtgaagggcctgtggacaggcacccccttcttctacccaggcatgaacagcatcctggtgtatgtgggccacgaggtgtttgagaactacttccccttccagtggaagctgaaggacaaccagagccacaaggagcacctgacccagaacatcgtggccacagccctgtgggtgctgattgcctacatcctgtacaggaagaagatcttctggaagatctag

SEQ ID NO: 243367 - DNA, 1104 bp, Artificial Sequence
  derived and/or modified sequence
atgggctggcggcggggccggggcgccccccggttccccgacggcatggctgctggccagaggcgttcctctctgagcaggttgggctctcaggccgagggtctgctcaccagccagaccatggggggccaggcagagacgttactgacgtcgcaaaccggctggctccttggcaggggatgcaacttagggtccccaggcggacaggtctcttgggacaaggtaagaatccctggtgtccttcagagactgggggtaacctatttcgttgtcgccgtgctggagctgcttttcgccaagcctgtgcctgagcactgtgcctcagagcgctcatgtctttccctgagggacatcacctccagctggcctcaatggctactgatcctagtcctggagggattatggctgggactgacttttttgctacctgtcccgggatgtcccactggctatttaggtccagggggcatcggagattttggtaagtatccaaactgcacaggcggcgccgcaggatatatagatcggctgctcctcggcgacgatcacctttatcagcacccaagttctgcagtgttgtatcacacggaagtggcatacgaccccgaggggatcctgggtacaatcaattcgattgttatggcctttctcggagtccaagctggcaagatcctgctttactacaaggcccgcactaaggacattctcattcgcttcactgcttggtgctgcatcctgggactcatatctgttgccttaactaaagtgagcgagaatgagggattcattcctgttaataaaaacctgtggagtctttcttacgtgactactctttcatcttttgcattcttcatccttttggttctttatccggtagtcgacgtgaagggtctgtggactggaacccctttcttctaccccggaatgaacagcatcctggtgtacgttgggcacgaggtatttgagaactacttccccttccaatggaaactcaaagacaaccaatcgcacaaggaacacctgacacagaatattgtggcgactgccttatgggtacttatagcctacatcctgtaccgcaaaaaaatcttctggaaaatttag

SEQ ID NO: 243368 - DNA, 1908 bp, Artificial Sequence
  derived and/or modified sequence
atgagcggcgccggccgggccctggccgccctgctgctggccgccagcgtcctctctgcagcactgctggctcccggcggtagctcgggccgggacgctcaagcagcccccccgagagacctagataagaagcgccatgccgagctgaagatggaccaggcccttctgctcatccataacgagttgctatggacaaacctcaccgtgtactggaagagtgagtgttgctaccactgtctattccaggtgctagttaacgtgccacagtctcccaaggccggaaaaccaagtgccgctgcagccagcgtgagcacacagcacggctccatcctccagctgaacgataccctggaggagaaggaggtctgccgactagaatataggtttggggaattcggaaattactccctgttagtgaagaatatccataacggtgtgagcgagattgcctgcgacctggccgtcaatgaggacccggtggattccaacctgcctgtgtcgattgcttttctgatcggcctggcggtgataattgtgattagctttctgaggctgctgttgtctttagacgattttaacaattggatttccaaagctatctcctccagagagactgaccgccttatcaatagcgaactcggatcaccgagtcgcaccgaccctcttgatggggacgtccagccagccacatggcggctgtcggccctgcctccccgcctgcgctcagttgatacctttagaggcatcgcgcttatcctgatggttttcgtgaactatggcggtgggaagtattggtacttcaagcacgctagctggaatggcctgacagtcgccgatctggtgttcccctggtttgtctttatcatgggctcttctatcttcctgagcatgacttccatacttcaacggggctgctcaaagtttcggctgctcgggaaaatcgcttggcgtagttttctcttgatttgcataggtatcatcatcgtcaacccaaattactgtcttgggcctctcagttgggacaaggtgcggatccccggcgtgttacagcgcttaggcgtgacctactttgtggtcgctgtgctggaactcctgtttgccaaaccagttccagagcactgtgcaagtgagcgttcctgtctgagccttcgtgatattacttctagttggccccagtggttactcatactggtgcttgaggggctgtggctgggcctgacctttttactgcccgtaccagggtgtccaacagggtatctggggcctggaggaatcggcgatttcggcaagtaccctaattgcaccgggggggccgccggctatatcgacagactgctcctcggggatgaccacctatatcaacacccatctagcgctgtgctttatcatactgaggttgcatacgatcctgaggggatcctcggcactattaacagtatcgtaatggcgtttttgggcgtgcaggcaggcaaaatccttctgtactataaagcacgaacgaaggacatattgatccggttcacagcttggtgttgtatcttaggactgatatccgttgcattaacgaaggttagcgagaacgagggttttatccctgtgaataagaatttatggtccctatcttacgtcaccaccctttcttcctttgcattttttattctgttagtattgtaccccgttgtggacgtgaaggggttgtggaccgggacccctttcttttatcctggaatgaacagtattctggtgtacgtgggacacgaggtcttcgagaattacttccctttccaatggaagctaaaagacaaccagtctcacaaagaacacttgactcagaatattgttgcaacagccctctgggtcctaatagcctacatcctttaccggaagaaaatattttggaagatttag

SEQ ID NO: 243369 - DNA, 1992 bp, Artificial Sequence
  derived and/or modified sequence
atgaccggcgcccgggccagcgccgccgagcagcggcgggccggcagatctggccaagctcgggccgcagagcgcgccgccggcatgtccggcgccggcagggccttagcagcgttactgctggctgccagtgtcctgagtgctgccctcctggctccaggaggctcctccggtcgcgatgcgcaggctgcacctcctagagacctcgataaaaaaagacatgccgaacttaaaatggatcaagcactgctcctgattcataacgaactgctgtggaccaacctgaccgtgtactggaagagtgagtgttgttatcattgtctcttccaggtgctggtgaacgtgccccagtctcccaaggctggaaagccgtccgctgccgctgctagcgtaagcacacaacacggaagcattctacagttaaacgacaccctcgaagagaaggaggtttgccggctcgaatacagatttggagaattcgggaattactctttactggtgaaaaacatccacaacggggtgtccgagatcgcctgcgacctcgccgttaatgaggatccagtggatagcaacctgcccgtgtcgatcgcattcctgattggtctcgccgtaatcattgtgattagcttcttacggctgctgctaagcttggacgacttcaataactggatatctaaagctatttcttcaagggaaaccgaccgtctgattaatagcgagttagggagtccctctcgcactgaccccctagacggtgacgtacagccagccacatggaggctgtctgcactgccgccacggctgagatcagtcgacactttcagaggcatcgcccttatcttgatggtcttcgtcaattatggtggtggcaaatattggtacttcaagcacgcttcttggaatgggcttaccgtcgctgatctggtatttccttggttcgtctttatcatgggaagctcaatcttcctctcaatgacaagcattttacagaggggatgtagcaaattccgccttctgggaaagatagcttggaggtcatttctgcttatatgcatcggcataatcattgtcaatcccaattattgtctgggaccgctgtcatgggataaggttaggatacctggggtgttgcagcgcctgggagtgacctacttcgtggtggccgttctggaactgctgtttgctaagccagtaccggagcactgtgcttcagagagaagttgcctgtctttgagagacataactagctcatggccacaatggctcttgattcttgtattagaagggctctggctgggactaacattcctcttacccgtgcctgggtgtcctacgggttaccttggtcccggcggaatcggagattttggcaaatatccaaactgtactggaggagccgcaggctatattgatcgccttcttcttggcgacgatcacctgtatcagcatcccagcagcgcagtgctctaccatacggaggtggcgtatgatcccgaaggcatcctagggaccattaacagtatcgtgatggcttttttaggggttcaagctggaaagatccttctatattacaaggccagaaccaaagacatcttgatcaggttcaccgcttggtgttgcatactcgggctgatttccgtggccctcacgaaggtctctgaaaacgaaggattcattcctgtgaacaaaaatctctggtcactgagctatgtaactacgctatcttctttcgcttttttcatcttgttggtcctgtaccccgtagtcgatgtgaagggcttatggacaggaactccttttttttaccctggcatgaactctatcctggtgtatgtggggcacgaggtctttgagaactactttccatttcagtggaagcttaaggacaaccagtcgcacaaggagcacttaacccagaatatcgtggctaccgcgctgtgggtgctgatagcatatattctataccgcaagaagatcttctggaagatatag

SEQ ID NO: 243370 - DNA, 1104 bp, Artificial Sequence
  derived and/or modified sequence
atggggtggcggcgtggcagaggcgcaccacgttttcctgatgggatggctgccggtcagaggcgaagttctctatcaaggctggggtctcaggccgaaggtttattgacaagtcagaccatggggggacaggccgaaacactgctcacttcccagactggttggctcctcggccgtggatgtaacctgggatctcctggcggtcaggtatcttgggataaggtcaggatacctggcgtcctccagaggttgggggtaacttactttgtggtggccgtattagagttactctttgcgaaacccgtccccgagcattgtgcttccgagagaagctgcctgagtcttagggacattacaagctcttggcctcagtggctgctgatcttggtcctagagggcctctggctgggcctgacttttctgctgccagtgccaggttgtcccacaggttacctcggccctgggggaataggagacttcggaaagtatccaaactgtactggcggtgcagctgggtacattgatcgtttattgcttggagacgaccatctgtatcagcacccatctagcgcagtcctctaccacacagaagtggcgtacgaccccgaaggcatacttggaacaatcaattctattgtgatggcctttctgggtgtccaggcagggaagatcctcctgtactacaaagctcggacaaaagacatactgattcggtttactgcttggtgctgtatcctcggcctgattagcgtcgcgctgacgaaagtgtccgagaatgaagggtttatccccgtgaataaaaatctctggtccctgagttatgtgactactctttccagcttcgctttcttcattctcctcgtgctctacccagtggtggatgtcaaaggtttatggacgggaactccctttttctatcctggtatgaactccattctcgtgtatgtcggacatgaggttttcgagaattattttccctttcaatggaagctgaaggataaccagtcacataaggagcacttgacgcaaaacatcgtggccacagccctgtgggttcttatcgcgtacatcctgtacagaaagaagatcttttggaagatttag

SEQ ID NO: 243371 - DNA, 1908 bp, Artificial Sequence
  derived and/or modified sequence
atgagtggagccggtagggccttggctgccctcctgctagcagcatcggtgctgagcgctgccctgctcgcaccgggaggctcaagcggaagggacgctcaagctgccccaccgagagacctcgacaaaaaaaggcacgccgaactgaaaatggatcaagctctgttactgatccacaacgagctgctttggacaaatctcaccgtgtactggaagagcgagtgttgctaccattgcctcttccaggtactggtcaatgtgccccagtctcctaaggctgggaagcccagcgcagccgcagctagcgtgtctacgcaacatgggtctatcctgcagctgaacgatactcttgaggagaaagaagtctgcagactggaatacagatttggtgagtttggcaattattccctcctggtgaaaaacatccacaatggcgtttcagaaatagcgtgtgatctcgccgtcaatgaagacccggtggactcgaatcttccagtctcaattgctttcctaataggcctggccgtgatcatcgtaatctctttcttacggctgctgttgtcccttgatgatttcaataattggatcagcaaggccattagtagccgagagaccgatagactgatcaattccgagctgggctctcccagccgcaccgacccactggatggggacgtccaaccagctacttggcggctgtctgcgctgcctccgcgactccgctccgtggatacatttagaggcatcgcactgatcttgatggtctttgtgaattatggaggagggaaatactggtatttcaagcacgcatcctggaatgggctcacagtggccgatctcgtgtttccttggttcgtatttataatgggcagcagtattttcctctccatgacaagcattctgcagagagggtgctctaaatttaggcttttgggcaaaatcgcatggaggtccttcctcctgatctgcattggcatcataattgtgaatcctaattactgtctaggccctttaagttgggataaagtcaggattcctggagtcctgcagagactgggtgtgacctatttcgtcgttgccgttctggaactgcttttcgccaagccagtgcccgagcactgtgcttcagagaggtcatgtcttagccttagggatatcactagttcttggccacagtggttgcttatcctcgtgctggaggggctgtggctgggtctgacattcctcctgccggtgcctgggtgccccacaggttacctgggccctgggggtataggagacttcggcaagtacccgaactgtacaggtggggctgcgggatatatcgaccgtctcctgttaggggacgatcacctgtaccagcatccttcctccgccgtactgtaccacacagaggttgcttacgaccccgagggtatccttgggaccattaattctatcgtcatggccttcctgggtgtgcaggccggaaagatcctgctttattataaagctcggaccaaggacattctgatcagatttaccgcatggtgttgcattttagggctgatttcagtggccctgacgaaagtttcagagaacgaaggctttatccccgtcaataagaacctgtggagcctgagttacgtaaccaccctgtctagctttgccttcttcatcttattagttttataccccgtggtggacgtgaaagggttgtggacagggacacctttcttctaccccggaatgaatagcattttagtgtacgtgggtcacgaggtgttcgagaactattttccgtttcagtggaagcttaaggacaaccagtcccacaaggaacacttgactcagaacattgtggctacggccttgtgggtgctgattgcatatatactgtaccgcaaaaagatcttctggaagatatag

SEQ ID NO: 243372 - DNA, 1992 bp, Artificial Sequence
  derived and/or modified sequence
atgaccggcgcacgagctagcgcggcagagcagcgcagagcaggccgttctggacaggccagagccgctgagagggcagccggtatgtcaggtgccggtcgggctttagccgcactgctgctcgccgcttcggtgctgagcgccgctctattggctccgggaggctcatccgggagggatgcccaggctgctccacctagagaccttgataaaaagaggcacgctgagctcaaaatggaccaggccctgttactcatccacaatgagttactttggaccaacctgaccgtttattggaagagtgaatgctgttaccattgcctcttccaggtcttggtaaatgttcctcagagccctaaagctggcaagcccagcgcagcggctgccagcgtctctacgcagcatggttccattctgcagctcaatgacactctggaggagaaagaagtctgtcgactcgagtatcgctttggagagtttggcaactactcgttattggtgaagaatatccacaatggtgtgtctgagattgcatgcgacctggcggtaaatgaggatcccgtcgattcgaatctacctgtgtcaatcgcttttctcatcggattggcagttataattgtcattagtttcttgaggctcctcctgtccctcgatgattttaacaattggatttctaaggccatctcctccagagaaacagacagattaatcaacagcgagctgggctcaccttcaaggactgacccattagatggagatgttcagccagccacctggagacttagtgcgctgccgccaaggctgaggtctgtggatacctttagaggcatcgctttaattctgatggtgttcgtgaactacgggggaggtaaatactggtatttcaaacacgcttcttggaacggactgaccgtggccgacttagtcttcccatggttcgtctttatcatgggctcttctattttcctttctatgacctcaatcttgcaacgagggtgctccaaattccgcctgctcggaaagattgcatggagatctttccttttgatctgtatcggcataatcattgtgaatccgaactactgcctcggaccactgtcctgggacaaagtacgcataccgggtgtactgcagcgtctcggcgttacatacttcgtagtggcagtcctggagctcctctttgcaaaacctgtgccggagcactgcgcctccgaacggtcttgcttgagcttaagggatataaccagctcatggcctcagtggctgctgatcctcgtgctcgaggggctctggcttggactgacctttctcttgcccgtcccaggctgtccaactggttacttaggccctggtggcataggagacttcgggaagtaccccaattgtacaggcggagcagcgggatacatcgacagactcttgctgggcgacgaccatctgtaccagcacccatccagtgccgtcctgtatcacaccgaagtggcttatgacccggaggggattctcgggacaatcaattcgattgtaatggcctttcttggcgtccaggccggaaaaattctgctgtattacaaggcgcgaacaaaggatatactgattaggttcaccgcctggtgctgtattctcggtctcatctctgttgcactcactaaggtctctgaaaatgaaggatttatccctgtgaataagaacctctggagtctgtcttacgttacgaccctaagctccttcgcttttttcatccttctggttctgtacccagtcgtagatgtgaaagggctctggaccggaaccccattcttttacccgggaatgaactctatcttagtctatgtcgggcacgaagtattcgaaaattactttcccttccagtggaagcttaaggacaatcagtcacacaaggagcacctcactcaaaacatagtcgctaccgctctgtgggtgctgatcgcctacattctgtatcggaagaaaattttctggaagatctag

SEQ ID NO: 243373 - DNA, 1104 bp, Artificial Sequence
  derived and/or modified sequence
atgggctggagaagaggcagaggcgcccccagattccccgacggcatggccgccggccagagaagaagcagcctgagcagactgggcagccaggccgagggcctgctgaccagccagaccatgggcggccaggccgagaccctgctgaccagccagaccggctggctgctgggcagaggctgcaacctgggcagccccggcggccaggtgagctgggacaaggtgagaatccccggcgtgctgcagagactgggcgtgacctacttcgtggtggccgtgctggagctgctgttcgccaagcccgtgcccgagcactgcgccagcgagagaagctgcctgagcctgagagacatcaccagcagctggccccagtggctgctgatcctggtgctggagggcctgtggctgggcctgaccttcctgctgcccgtgcccggctgccccaccggctacctgggccccggcggcatcggcgacttcggcaagtaccccaactgcaccggcggcgccgccggctacatcgacagactgctgctgggcgacgaccacctgtaccagcaccccagcagcgccgtgctgtaccacaccgaggtggcctacgaccccgagggcatcctgggcaccatcaacagcatcgtgatggccttcctgggcgtgcaggccggcaagatcctgctgtactacaaggccagaaccaaggacatcctgatcagattcaccgcctggtgctgcatcctgggcctgatcagcgtggccctgaccaaggtgagcgagaacgagggcttcatccccgtgaacaagaacctgtggagcctgagctacgtgaccaccctgagcagcttcgccttcttcatcctgctggtgctgtaccccgtggtggacgtgaagggcctgtggaccggcacccccttcttctaccccggcatgaacagcatcctggtgtacgtgggccacgaggtgttcgagaactacttccccttccagtggaagctgaaggacaaccagagccacaaggagcacctgacccagaacatcgtggccaccgccctgtgggtgctgatcgcctacatcctgtacagaaagaagatcttctggaagatctag

SEQ ID NO: 243374 - DNA, 1908 bp, Artificial Sequence
  derived and/or modified sequence
atgagcggcgccggcagagccctggccgccctgctgctggccgccagcgtgctgagcgccgccctgctggcccccggcggcagcagcggcagagacgcccaggccgccccccccagagacctggacaagaagagacacgccgagctgaagatggaccaggccctgctgctgatccacaacgagctgctgtggaccaacctgaccgtgtactggaagagcgagtgctgctaccactgcctgttccaggtgctggtgaacgtgccccagagccccaaggccggcaagcccagcgccgccgccgccagcgtgagcacccagcacggcagcatcctgcagctgaacgacaccctggaggagaaggaggtgtgcagactggagtacagattcggcgagttcggcaactacagcctgctggtgaagaacatccacaacggcgtgagcgagatcgcctgcgacctggccgtgaacgaggaccccgtggacagcaacctgcccgtgagcatcgccttcctgatcggcctggccgtgatcatcgtgatcagcttcctgagactgctgctgagcctggacgacttcaacaactggatcagcaaggccatcagcagcagagagaccgacagactgatcaacagcgagctgggcagccccagcagaaccgaccccctggacggcgacgtgcagcccgccacctggagactgagcgccctgccccccagactgagaagcgtggacaccttcagaggcatcgccctgatcctgatggtgttcgtgaactacggcggcggcaagtactggtacttcaagcacgccagctggaacggcctgaccgtggccgacctggtgttcccctggttcgtgttcatcatgggcagcagcatcttcctgagcatgaccagcatcctgcagagaggctgcagcaagttcagactgctgggcaagatcgcctggagaagcttcctgctgatctgcatcggcatcatcatcgtgaaccccaactactgcctgggccccctgagctgggacaaggtgagaatccccggcgtgctgcagagactgggcgtgacctacttcgtggtggccgtgctggagctgctgttcgccaagcccgtgcccgagcactgcgccagcgagagaagctgcctgagcctgagagacatcaccagcagctggccccagtggctgctgatcctggtgctggagggcctgtggctgggcctgaccttcctgctgcccgtgcccggctgccccaccggctacctgggccccggcggcatcggcgacttcggcaagtaccccaactgcaccggcggcgccgccggctacatcgacagactgctgctgggcgacgaccacctgtaccagcaccccagcagcgccgtgctgtaccacaccgaggtggcctacgaccccgagggcatcctgggcaccatcaacagcatcgtgatggccttcctgggcgtgcaggccggcaagatcctgctgtactacaaggccagaaccaaggacatcctgatcagattcaccgcctggtgctgcatcctgggcctgatcagcgtggccctgaccaaggtgagcgagaacgagggcttcatccccgtgaacaagaacctgtggagcctgagctacgtgaccaccctgagcagcttcgccttcttcatcctgctggtgctgtaccccgtggtggacgtgaagggcctgtggaccggcacccccttcttctaccccggcatgaacagcatcctggtgtacgtgggccacgaggtgttcgagaactacttccccttccagtggaagctgaaggacaaccagagccacaaggagcacctgacccagaacatcgtggccaccgccctgtgggtgctgatcgcctacatcctgtacagaaagaagatcttctggaagatctag

SEQ ID NO: 243375 - DNA, 1992 bp, Artificial Sequence
  derived and/or modified sequence
atgaccggcgccagagccagcgccgccgagcagagaagagccggcagaagcggccaggccagagccgccgagagagccgccggcatgagcggcgccggcagagccctggccgccctgctgctggccgccagcgtgctgagcgccgccctgctggcccccggcggcagcagcggcagagacgcccaggccgccccccccagagacctggacaagaagagacacgccgagctgaagatggaccaggccctgctgctgatccacaacgagctgctgtggaccaacctgaccgtgtactggaagagcgagtgctgctaccactgcctgttccaggtgctggtgaacgtgccccagagccccaaggccggcaagcccagcgccgccgccgccagcgtgagcacccagcacggcagcatcctgcagctgaacgacaccctggaggagaaggaggtgtgcagactggagtacagattcggcgagttcggcaactacagcctgctggtgaagaacatccacaacggcgtgagcgagatcgcctgcgacctggccgtgaacgaggaccccgtggacagcaacctgcccgtgagcatcgccttcctgatcggcctggccgtgatcatcgtgatcagcttcctgagactgctgctgagcctggacgacttcaacaactggatcagcaaggccatcagcagcagagagaccgacagactgatcaacagcgagctgggcagccccagcagaaccgaccccctggacggcgacgtgcagcccgccacctggagactgagcgccctgccccccagactgagaagcgtggacaccttcagaggcatcgccctgatcctgatggtgttcgtgaactacggcggcggcaagtactggtacttcaagcacgccagctggaacggcctgaccgtggccgacctggtgttcccctggttcgtgttcatcatgggcagcagcatcttcctgagcatgaccagcatcctgcagagaggctgcagcaagttcagactgctgggcaagatcgcctggagaagcttcctgctgatctgcatcggcatcatcatcgtgaaccccaactactgcctgggccccctgagctgggacaaggtgagaatccccggcgtgctgcagagactgggcgtgacctacttcgtggtggccgtgctggagctgctgttcgccaagcccgtgcccgagcactgcgccagcgagagaagctgcctgagcctgagagacatcaccagcagctggccccagtggctgctgatcctggtgctggagggcctgtggctgggcctgaccttcctgctgcccgtgcccggctgccccaccggctacctgggccccggcggcatcggcgacttcggcaagtaccccaactgcaccggcggcgccgccggctacatcgacagactgctgctgggcgacgaccacctgtaccagcaccccagcagcgccgtgctgtaccacaccgaggtggcctacgaccccgagggcatcctgggcaccatcaacagcatcgtgatggccttcctgggcgtgcaggccggcaagatcctgctgtactacaaggccagaaccaaggacatcctgatcagattcaccgcctggtgctgcatcctgggcctgatcagcgtggccctgaccaaggtgagcgagaacgagggcttcatccccgtgaacaagaacctgtggagcctgagctacgtgaccaccctgagcagcttcgccttcttcatcctgctggtgctgtaccccgtggtggacgtgaagggcctgtggaccggcacccccttcttctaccccggcatgaacagcatcctggtgtacgtgggccacgaggtgttcgagaactacttccccttccagtggaagctgaaggacaaccagagccacaaggagcacctgacccagaacatcgtggccaccgccctgtgggtgctgatcgcctacatcctgtacagaaagaagatcttctggaagatctag

SEQ ID NO: 243376 - protein, 1135 aa, Artificial Sequence
  derived and/or modified sequence
METQKDEAAQAKGAAASGSTREQTAEKGAKNKAAEATEGPTSEPSSSGPGRLKKTAMKLFGGKKGICTLPSFFGGGRSKGSGKGSSKKGLSKSKTHDGLSEAAHGPEDVVSEGTGFSLPLPELPCQFPSSQSAHGALETGSRCKTSVAGATEKAVAEKFPSMPKPKKGLKGFFSSIRRHRKSKVTGAEQSEPGAKGPERVRARPHEHVSSAPQVPCFEETFQAPRKENANPQDAPGPKVSPTPEPSPPATEKMACKDPEKPMEACASAHVQPKPAPEASSLEEPHSPETGEKVVAGEVNPPNGPVGDPLSLLFGDVTSLKSFDSLTGCGDIIAEQDMDSMTDSMASGGQRANRDGTKRSSCLVTYQGGGEEMALPDDDDEEEEEEEEVELEEEEEEVKEEEEDDDLEYLWETAQMYPRPNMNLGYHPTTSPGHHGYMLLDPVRSYPGLAPGELLTPQSDQQESAPNSDEGYYDSTTPGFEDDSGEALGLVRRDCLPRDSYSGDALYEFYEPDDSLENSPPGDDCLYDLHGRSSEMFDPFLNFEPFLSSRPPGAMETEEERLVTIQKQLLYWELRREQLEAQEARAREAHAREAHAREAYTREAYGREAYAREAHTWEAHGREARTREAQAREVRCRETQVRETQARQEKPVLEYQMRPLGPSVMGLAAGVSGTSQISHRGITSAFPTTASSEPDWRDFRPLEKRYEGTCSKKDQSTCLMQLFQSDAMFEPDMQEANFGGSPRRAYPTYSPPEDPEEEEVEKEGNATVSFSQALVEFTSNGNLFSSMSCSSDSDSSFTQNLPELPPMVTFDIADVERDGEGKCEENPEFHNDEDLAASLEAFELGYYHKHAFNNYHSRFYQGLPWGVSSLPRYLGLPGLHPRPPPAAMALNRRSRSLDTAETLEMELSNSHLVQGYLESDELQAQQEDSDEEDEEEEEGEWSRDSPLSLYTEPPGAYDWPAWAPCPLPVGPGPAWISPNQLDRPSSQSPYRQATCCIPPMTMSISLSVPESRAPGESGPQLARPSHLHLPMGPCYNLQPQASQSMRARPRDVLLPVDEPSCSSSSGGFSPSPLPQAKPVGITHGIPQLPRVRPEHPQPQPTHYGPSSLDLSKERAEQGASLATSYSSTAMNGNLAK

SEQ ID NO: 243377 - protein, 804 aa, Artificial Sequence
  derived and/or modified sequence
METQKDEAAQAKGAAASGSTREQTAEKGAKNKAAEATEGPTSEPSSSGPGRLKKTAMKLFGGKKGICTLPSFFGGGRSKGSGKGSSKKGLSKSKTHDGLSEAAHGPEDVVSEGTGFSLPLPELPCQFPSSQSAHGALETGSRCKTSVAGATEKAVAEKFPSMPKPKKGLKGFFSSIRRHRKSKVTGAEQSEPGAKGPERVRARPHEHVSSAPQVPCFEETFQAPRKENANPQDAPGPKVSPTPEPSPPATEKMACKDPEKPMEACASAHVQPKPAPEASSLEEPHSPETGEKVVAGEVNPPNGPVGDPLSLLFGDVTSLKSFDSLTGCGDIIAEQDMDSMTDSMASGGQRANRDGTKRSSCLVTYQGGGEEMALPDDDDEEEEEEEEVELEEEEEEVKEEEEDDDLEYLWETAQMYPRPNMNLGYHPTTSPGHHGYMLLDPVRSYPGLAPGELLTPQSDQQESAPNSDEGYYDSTTPGFEDDSGEALGLVRRDCLPRDSYSGDALYEFYEPDDSLENSPPGDDCLYDLHGRSSEMFDPFLNFEPFLSSRPPGAMETEEERLVTIQKQLLYWELRREQLEAQEARAREAHAREAHAREAYTREAYGREAYAREAHTWEAHGREARTREAQAREVRCRETQVRETQARQEKPVLEYQMRPLGPSVMGLAAGVSGTSQISHRGITSAFPTTASSEPDWRDFRPLEKRYEGTCSKKDQSTCLMQLFQSDAMFEPDMQEANFGGSPRRAYPTYSPPEDPEEEEVEKEGNATVSFSQALVEFTSNGNLFSSIRCPGTEDKRQVTQACGTW

SEQ ID NO: 243378 - DNA, 348 bp, Artificial Sequence
  derived and/or modified sequence
gtgagcgggggagtgcgcctgccagcttctgagagacgcttcctctcatgttgtcctttgccagctcggcccctgctccagcggctggcttctagacatccggcctccctgccctgcagtcaacagctcctgtggagatcctcacgcgcaccccccctgctgccctcactgcccctgggcgtgcttattacagacccactgactaggcacccggggcaccaccatccagctcctttccactcagctgccctgctggttcccgtcaagccccctactgcatgggaaggcaagagtcggttagcaaggccctgtctttctcaggcactcgaggcctgccagctcacctag

SEQ ID NO: 243379 - DNA, 372 bp, Artificial Sequence
  derived and/or modified sequence
atgcagagcgagaagccccagggcctcttcctgcagctgaaccccaatgccagcagcacagagacccagctgctggtgcctgccctggagagccgggacaccctgccccccacccactgcttcatggccggcacagagagccccctgggcaacccctggcccctgagcctgcccccaccctgctggacaggctgtgtgctgcctgccccccggggccagaggaagccaggccccctgggcctgagcatcttcatcagcctgggcaacaagaggcacaggagcggcaaccacgtggtgcgggagagcgagcagcccctgagccagggcaacccccaccagggctggggccctgacaccaggaaaggaagatag

SEQ ID NO: 243380 - DNA, 372 bp, Artificial Sequence
  derived and/or modified sequence
atgcagagcgagaagccccagggcctcttcctgcagctgaaccccaatgccagcagcacagagacccagctgctggtgcctgccctggagagccgggacaccctgccccccacccactgcttcatggccggcacagagagccccctgggcaacccctggcccctgagcctgcccccaccctgctggacaggctgcctgctgcctgccccccggggccagaggaagccaggccccctgggcctgagcatcttcatcagcctgggcaacaagaggcacaggagcggcaaccacgtggtgcgggagagcgagcagcccctgagccagggcaacccccaccagggctggggccctgacaccaggaaaggaagatag

SEQ ID NO: 243381 - DNA, 8443 bp, Artificial Sequence
  derived and/or modified sequence
atgggggagctacccaaagcctggggaaggggagtcagtgctggaggtgactggagccgcggcgacggcggcagcagctgcggtggcggcgctctcagccgtggcagccgaggctgcagcccggcccagggcggctcagcggacaataaccgggctaggaacctgaccgggctggaccccactgtgatgcttcctgactgataatgttataacagtgcctggaagcctgaggctgcatttccagctggacgtacctcagttgtccccatcatcatggagacccaaaaggatgaagctgctcaggccaagggagctgcagcctctgggagtacccgtgaacaaacagcagaaaaaggagccaagaacaaggcagctgaggcgacagaaggaccaacctcagagccatcctcatccggcccaggtaggctgaagaaaactgccatgaaactctttggtggcaagaagggtatctgtactctgcctagtttctttggagggggacggagcaaaggttctgggaaaggcagctccaagaaaggtctcagcaagagcaagacccacgatggcctgagtgaagcagcccatggccctgaagatgttgtcagtgaaggaactggcttctccctgcctttgcctgagttaccctgccaatttcccagctctcagagtgcccatggggctttggagacaggctccagatgtaagacatctgtggctggagccacagagaaagctgtggctgagaagtttccctctatgcccaagccaaagaaaggcctaaaaggcttttttagcagtatccgccgtcaccggaagagcaaggtcactggggctgagcaaagtgagccaggggccaaggggcctgagagggtcagagccaggcctcatgagcacgtgagctcagcccctcaggtgccctgctttgaggagaccttccaagcccctagaaaggaaaatgctaacccccaagatgcccctgggccaaaagtttctccaacaccagaaccttctccaccagctactgagaaaatggcctgtaaagatccagaaaaacccatggaggcctgtgcctcagcacatgtgcaacccaagcctgcccctgaagccagtagcctagaggagccccatagcccagaaacaggggagaaggtagtagcaggagaggtaaacccacccaatggccctgtgggggacccactgagcctcttgtttggggatgtgacatccctgaaaagctttgattcattgacaggttgtggtgacataatagcagaacaggacatggacagtatgacagacagcatggcctctgggggccagagagcaaaccgagatgggaccaagcgaagttcctgcctggtgacctaccaaggaggtggggaggagatggccttgccagatgatgatgacgaggaggaagaagaggaagaagaggtggaattagaggaggaagaagaggaggttaaggaggaggaagaagatgatgacttagaatatctgtgggaaactgcccaaatgtatccacggcccaatatgaacctgggctaccatcccaccacatccccaggccaccacggctacatgctccttgacccagttaggtcttatcctggcctagcccctggggaacttttgactcctcagagtgaccagcaagaatccgcccccaatagtgatgaaggttattatgactccaccacacctggatttgaggatgattcaggtgaggccctggggcttgtccgcagggattgtctaccccgagacagctacagtggagatgccctatatgagttctatgagccagatgacagccttgagaactctccacctggagatgactgcctttatgacctccatggtcgaagctctgagatgtttgaccccttcttaaactttgagccctttttgtcctcccggccacctggggcaatggagacagaggaagaacggctagtgaccatccagaaacagttgttgtattgggagcttcggcgggagcagcttgaggcccaggaggcacgtgcccgagaagctcatgccagggaggcccacgccagggaggcctatactcgagaggcttatggcagggaagcctatgccagggaggcccacacttgggaagctcatggcagggaggccagaacccgagaagcccaggcccgagaggttcgttgtagagagactcaagtccgagagacccaggcccggcaggagaagcccgtcttagagtatcagatgaggcccttaggcccatcagtgatgggcctggcagcaggggtatcagggacctctcagatttcccaccggggaattacctcagctttccccaccactgcaagcagcgagccagactggagggacttccgtcctctggagaagcgttatgaaggaacctgctccaagaaagatcaaagtacctgcctgatgcagctcttccagagtgatgccatgtttgagccagacatgcaagaagcaaattttggaggatctcccaggagggcctaccctacttattcaccccctgaagatccagaggaagaggaggttgagaaggaagggaatgccactgtgagtttctcacaggccctggtagagttcaccagcaatgggaacctcttttccagcatgtcctgcagctctgactctgactcatctttcactcaaaacctccctgagctgcctcccatggtgacctttgacatcgctgatgtggaacgggatggggaaggcaagtgtgaagagaatcctgagttccacaatgatgaagatcttgcagcctccttggaagcctttgagctgggctactatcacaaacatgccttcaacaactaccatagtcgattctaccaaggcctgccctggggtgtgagcagcctccctcgatacttgggactgcctggcctgcaccctcgacctccacctgctgctatggccctcaacaggagaagccgctctctcgacactgcagagaccctggagatggagctctccaattcccacttggtccagggctacctcgagtctgatgagctgcaggcccagcaggaagattcagatgaggaggacgaagaggaggaagaaggagaatggagccgagacagtcccctttccctctatactgaacccccaggggcctatgattggcctgcttgggctccctgtcctcttccagtggggccaggtcctgcctggataagccccaaccagttggacaggccttccagccagtctccatataggcaggcaacctgttgcatacctcctatgaccatgtcaatatcactatcagtgccagagtcaagggcacctggggaatctgggcctcaactagctcgtccctcacacctacacctgcccatgggcccttgctataacctccagccacaggcctcccagagcatgagggccaggcctcgagatgtgctgctgcctgttgatgagcccagttgctcttccagttctggaggcttcagccccagccctctaccacaggccaagcctgtgggcatcacccatggcattcctcagctgcccagggtccggcctgagcacccccagcctcagcccactcactatgggccttccagccttgacctgtcaaaggagagggctgagcaaggtgcctctcttgccaccagctactcctccactgccatgaatggaaacctagccaagtagttattatcaattctggagtagggacacggggcctgagcatgtgaatggggatcaggggttgggcagaagggtgggggggtgggggttgttgtttaacttgaaaaccctttgggccaaggaaaactcctgtgagttttcaccttggttttcccacttgcctcttctgccatctatggccacgttcaactcaagtgcatctgcccagggaggctgctgctgctactgcactccagtttttgctttcgaggtttcttcttgtgacccacgctgggtttgggatgctgtaattttgtgcctattccagttgccaagttagtgattatatatatatatatatatatatatatatatatatatatatatacacacacacacacacacacacacacacacatacatacacacacacacacaaacacacatgcacacacatatatagcatgcatccttgacacaggctaaacctttagtgccccctgcccctttcccccaatgaatgatgaaccactgattagcagccaagtctgcattgcctcccgcttggggaagtggggcttatttgctattagcaatgtgaaattatggtacagatcctccccacccctattccttttggcctggcatagctgccatcattatatcagatgactataagctattcatcccagctagctgtccttagagaggatcaagtagcgtgtgtctcacagcctatcgctgtggactttggcatcatgaccagatgggggccttttaactgtcctgccatagcttgggttaaagacaaaaatgctaatccccttgatggagtgataaaattcatccatttgcaaacagaagacaaaacaaggttctgttgtggacactgccatagagtgttgagctccggaatgataggattttttttccttcttttaagcttgtgactacctgagttgcagatgcttttgaatttttgttcttttttcctctaaaggaaattttcataatctcatcacaaggaacacggtcttttaattgagataagggaagagaagcaacctaaattaggcttgactataggggctggggtttttgtggagtgtaggggaaagatagaaaatgagggtccatttatcacagccagcaagaaaggggatttcagaccatgcagagcttaaggtatctcagtttcttaaaagggaaaactcccttctcaagcctcccaacacaaaatgttccttaagccttgcccatcccatcatttggactctgtaataaggccccaggtttgcactcccaagacaggataccaaaggcatctcagctgctgttctgggccctttaaagagcttttatcttccaattagccgagtccttagcatcatcaaatgacagggcttcttggcagttgcagccctttatggaatgaatggcaccctcccttctcctgcatccatgcagttttcatgttaaactaggttggaaatactggtggggaagagcttgctgtcaggaagacattggaacaggctaatcttgccaagctcaacctctcattaatcacctgtaggagagggttccttttacatgtctttattggaaatggcatatggaacattttttgcttggctgtgttcactcaaattatgattattgcaccctcgccctcacatcccaccatctccatgcctgttgagagaagaagtcaacagggttcttgccattcctgagatatggcaatttagcttgggaacagatgctgtttgccccctaagtcaaggtgactttgtgggcaaactgtttcttggccaggggatgtgtccatgctggtctttgtcaccatttctcagattggggttggcccagtgcccttactcacaaatagcagacctggctggtagaagctgcacccctggaagcaccacatgaatttgcatggcactaacaccaccactcaagggacccagaccagctcttcaggctgactttggctacagatacattgtgaagaaatgtatctgttgtggagctggagaatgaaagagggtgaggaaggccctccttaccccaagcacagcattccaagagagaagtgcccaaattccaactttctggcctcttaccaaagctgctctgggatggtggggctgaaattggcctggctatttggcaggaagtaaacactcaccaaatgcctttacaacagggaagaacccacctcttgcctcttctttcagggcagcttgagctcctgtctacatgtggactgtgccagccacagcaggcggtagagccatcaccagcctccagaccctgctggagaagggccaccagcctatctgggaagagaaaaaggaggtggccaacctttggctaagggctgagagctgccctcaggatcaggaaggcagcatgaggcattgtctctgaggggcactggcatagccctgacacactttgttgggctttggaaggtcacacaccacagagtagggcctggggctgagtgagagttcatggtttggacagccttgctgcctgcaagtcccttcactgccctagccagcccaggaataggatccttaccacctgaagtggggcagccaggatatgtggctgcagaagcaggttcctttgaatttctagagctaagcagtttgtggctgaaacccaatggcagcctaggggaggaaggaagacctgtctggggacccatggtgttgacagcacagggtgacattgggagagccagccaagcttcaggcctgtttccaaacacagactagtgctggcttgggtggcagcaaatacaccccagaccactaaaactgttgatatcatgtccacacctccaagagtactactagatgaacaacatgtctccattgcaaggtcctggaataatgcttttggatgtgattttaagggaaaatgggacttagtggaagtagctgccttcatcttattacccaataggcctagtgccagacagctgtgatcctgagaattcccagatgagactggtccttggaggaccagtgaatgtggatagagaaggccacctagtaggcctctcccagggccaggatgccagtttcttggtgctttagagtctccaaggaagcactgccttggggcccagttcaagccagccctacctatctggcctcagcttgggtaccaggccacaagactgcccggataatgggttcagtaaacaccagtctctctccctccttagtcctatgccaagaagggaagtagcttcacacactcaggaggctgggtgtgtacccttcatcctgctgccagcagctttccttacctgtgccagtgccaccaccccacctgccctcagcccccaggcccagttgctagagggaggcatggggtttagcagggagacttcaagtttacccatgtgtatgttgcattcaagttgtttttaatatatatatatatatatatcaaaagtcaattatctatttttatattgtttgcattttatattcatggaaaacaatgtttatcaattgttcttttctgatttatttttaagcggtgctgtttacagttttaaacaaaacaaagatgacacaaaaattgctgctgcttgtgcagagggctggcatctcaactgcctagggccctccctctttcccctctccctaccttagctgtaccacactgtccgttccctccccccatgatagggacagcagaagatgcccaggtactgaagacaaacgccaagtgactcaggcgtgtgggacctggtagacagcttgtcattttctggctttattttatgtttttctttcttttgaacccttcttccccatgtctagaccctctgagagtactcatgtgtcttattttttttcctcgttatgttttgtgctttagttttgaaatcagagtgcccatgttgtgctatttgtcttgttgagtttctccaaaggagcattttgggaacattctccacccaatggggaaggaagggggtttcaaccatgtcccctttccccaagaagctgtgggagacagatgacaatgatgcttgcactatcaggaatttaccatctcgttgaggaaacccttgcataggacttcctaggagctcagttgattgtgacattttcccagaagagaggctttggggaactccttcacccctcttgctgctttgggggaatctcctcccctaccaccattccccctcccctgccctgctccagctcacacgtggatggtactttggggaacagtgactttcagggtgatggcttgctggcctgatccctgactttccaatcctatagtcactccaaagaagaaaatccacatggtatgtatatgtgtgagggttgggtctattgagaggtgggactttaattattgttattattattggtgcttatttttcctgctgtatatgggggtgggggtgggggggaataaaacaggaatgtatatttaggtcatgttaaataaaatggctggaggaaggagggaagaaattaggaactgcagtacatcatcaccccaggtgtaagagttatttctctcccagtgcagaaaggggagtgtggcccctggctgtacctgagcttcctcttctccatccctgagacatcacagaatcacccgggttctgacctctccacttctagctctcactgacatctggatatcttgatgcactgcctgtttgtaacaacatatacttctttgctgaatgctaataaacttctgggttcaagagggaacccctcagtca

SEQ ID NO: 243382 - DNA, 2415 bp, Artificial Sequence
  derived and/or modified sequence
atggagacccaaaaggatgaagctgctcaggccaagggagctgcagcctctgggagtacccgtgaacaaacagcagaaaaaggagccaagaacaaggcagctgaggcgacagaaggaccaacctcagagccatcctcatccggcccaggtaggctgaagaaaactgccatgaaactctttggtggcaagaagggtatctgtactctgcctagtttctttggagggggacggagcaaaggttctgggaaaggcagctccaagaaaggtctcagcaagagcaagacccacgatggcctgagtgaagcagcccatggccctgaagatgttgtcagtgaaggaactggcttctccctgcctttgcctgagttaccctgccaatttcccagctctcagagtgcccatggggctttggagacaggctccagatgtaagacatctgtggctggagccacagagaaagctgtggctgagaagtttccctctatgcccaagccaaagaaaggcctaaaaggcttttttagcagtatccgccgtcaccggaagagcaaggtcactggggctgagcaaagtgagccaggggccaaggggcctgagagggtcagagccaggcctcatgagcacgtgagctcagcccctcaggtgccctgctttgaggagaccttccaagcccctagaaaggaaaatgctaacccccaagatgcccctgggccaaaagtttctccaacaccagaaccttctccaccagctactgagaaaatggcctgtaaagatccagaaaaacccatggaggcctgtgcctcagcacatgtgcaacccaagcctgcccctgaagccagtagcctagaggagccccatagcccagaaacaggggagaaggtagtagcaggagaggtaaacccacccaatggccctgtgggggacccactgagcctcttgtttggggatgtgacatccctgaaaagctttgattcattgacaggttgtggtgacataatagcagaacaggacatggacagtatgacagacagcatggcctctgggggccagagagcaaaccgagatgggaccaagcgaagttcctgcctggtgacctaccaaggaggtggggaggagatggccttgccagatgatgatgacgaggaggaagaagaggaagaagaggtggaattagaggaggaagaagaggaggttaaggaggaggaagaagatgatgacttagaatatctgtgggaaactgcccaaatgtatccacggcccaatatgaacctgggctaccatcccaccacatccccaggccaccacggctacatgctccttgacccagttaggtcttatcctggcctagcccctggggaacttttgactcctcagagtgaccagcaagaatccgcccccaatagtgatgaaggttattatgactccaccacacctggatttgaggatgattcaggtgaggccctggggcttgtccgcagggattgtctaccccgagacagctacagtggagatgccctatatgagttctatgagccagatgacagccttgagaactctccacctggagatgactgcctttatgacctccatggtcgaagctctgagatgtttgaccccttcttaaactttgagccctttttgtcctcccggccacctggggcaatggagacagaggaagaacggctagtgaccatccagaaacagttgttgtattgggagcttcggcgggagcagcttgaggcccaggaggcacgtgcccgagaagctcatgccagggaggcccacgccagggaggcctatactcgagaggcttatggcagggaagcctatgccagggaggcccacacttgggaagctcatggcagggaggccagaacccgagaagcccaggcccgagaggttcgttgtagagagactcaagtccgagagacccaggcccggcaggagaagcccgtcttagagtatcagatgaggcccttaggcccatcagtgatgggcctggcagcaggggtatcagggacctctcagatttcccaccggggaattacctcagctttccccaccactgcaagcagcgagccagactggagggacttccgtcctctggagaagcgttatgaaggaacctgctccaagaaagatcaaagtacctgcctgatgcagctcttccagagtgatgccatgtttgagccagacatgcaagaagcaaattttggaggatctcccaggagggcctaccctacttattcaccccctgaagatccagaggaagaggaggttgagaaggaagggaatgccactgtgagtttctcacaggccctggtagagttcaccagcaatgggaacctcttttccagcataagatgcccaggtactgaagacaaacgccaagtgactcaggcgtgtgggacctggtag

SEQ ID NO: 243383 - DNA, 3408 bp, Artificial Sequence
  derived and/or modified sequence
atggagacccaaaaagatgaggccgcacaggccaaaggggcagcagcatcgggttcgacccgagaacagacagcagaaaagggtgctaagaacaaagccgctgaagccactgaagggccgacatccgagccatccagctccggtccaggcagactaaaaaagaccgctatgaagctctttgggggaaagaaagggatctgtacactgccatccttctttggagggggtaggagcaagggaagtgggaagggcagctctaagaaaggcctgagcaagtccaagacacatgatgggttgtctgaggccgcacacggacccgaggatgtcgtctctgagggaaccgggttcagcctgcctctgcctgaacttccatgccagttcccatcaagccagagtgcccatggcgctttggagaccggcagccgctgtaaaacttctgtcgcgggtgctaccgagaaagccgtcgcagaaaaattccctagcatgcccaaacccaaaaaaggtcttaaaggtttcttcagttccatccgccggcatagaaaatcaaaagtgacaggggccgagcagtccgagcccggcgccaagggccctgagcgggtccgcgcacgcccccatgagcatgtgagcagcgccccccaggtcccctgtttcgaagagacatttcaggccccacgtaaagagaatgctaatccccaggacgctcccggtccaaaggtgagtcccacaccagagccctcaccccccgcaactgaaaaaatggcatgcaaagacccggagaaacctatggaagcctgtgcctctgctcatgtccagcctaaaccagcccctgaagccagctctctggaggagcctcattcccctgagaccggtgagaaagtcgttgcgggggaggtaaacccacctaatggccccgtgggcgatcccttgtccctactctttggggacgttacaagtctgaaatccttcgattcactcaccgggtgtggcgatatcattgcagaacaagatatggacagcatgaccgactctatggcaagcggcgggcagagggcaaaccgtgacggcacaaaacgctcatcctgtctggtaacctatcagggcggaggagaggagatggccctccccgatgatgacgacgaggaggaagaagaggaagaagaggtggagctggaagaggaggaagaggaagtcaaggaggaggaggaggatgatgaccttgagtatttgtgggagaccgcacagatgtatccgagacccaacatgaacctgggataccaccccacaacgtccccagggcatcatggatacatgctgctggaccctgtgagatcttatcctggcttggcccccggggaactcctcaccccacagtctgaccagcaagaatctgccccaaatagtgacgagggatactatgacagtaccacccctggtttcgaggatgatagcggcgaggcactgggactggtgcgcagagactgcctccctagagactcttactccggcgatgctctgtatgagttttacgaacctgatgactctctcgagaatagtccaccaggagacgactgtctctatgatttgcacgggcgaagctctgaaatgtttgatccttttctgaatttcgaacccttcctctccagcaggcctcccggtgccatggagacagaagaggagaggctggttaccatccagaaacaactgttatactgggagctgcggagagaacagcttgaggcccaggaggcgagggctagggaggcccatgcgcgggaggcacacgcaagggaggcctacacaagagaggcttatggcagagaagcgtacgcccgcgaggctcatacttgggaggcacatgggagggaggcccgcaccagggaggctcaggctcgggaagtgaggtgcagggagacacaggtaagggaaacccaggctcggcaggagaagcctgttctcgagtaccagatgagacctctgggtcccagcgtgatgggcttagctgccggggtgtccggcacttcacagattagccataggggcatcacaagcgcctttccgacgactgccagcagtgagcccgattggcgcgactttcgaccgctggaaaaacggtacgagggtacttgttcaaagaaagatcagtcgacctgtctgatgcagcttttccagagcgacgcaatgttcgagccagatatgcaggaagccaacttcggcgggagccctaggagagcctaccctacctatagtcccccggaagatcctgaggaagaagaggtggagaaagaggggaatgctaccgtctccttttcacaggccttggtcgaatttacctccaatgggaacctcttttcttccatgtcttgcagctcagatagtgacagcagcttcacccagaatctcccagagttgcctccaatggttacatttgacatagcagacgttgagagggacggcgagggcaaatgcgaggaaaacccagaattccacaatgacgaagatctcgccgcttccctggaggctttcgaactggggtattaccataaacacgcatttaataattaccattcccgcttctaccaaggtttgccctggggtgtctcttcactcccaaggtatctgggtctgcctgggctgcatcccaggccacccccagccgcgatggctctgaataggagatcaagatctcttgacacagccgagactctcgagatggagctaagtaattcccatctcgtgcaaggttacttggaatcagatgaactgcaggcgcagcaggaggactctgatgaggaggacgaagaggaagaagagggcgaatggagtagagatagcccactaagtctgtacaccgaaccccccggcgcctatgattggcccgcttgggcaccctgccctcttcccgttggacccggccccgcatggatcagccccaatcaacttgacaggccctcctctcagagtccataccggcaggcaacctgctgtattcctcccatgaccatgtcaatctcgctgagtgtgcctgaaagtcgcgcgccaggggagagcggtccacagctggcacgcccgagccacctccaccttccaatggggccctgttacaatctgcagcctcaggcttctcagtctatgagagcgagacccagggacgttctgctgccagtggacgaaccaagttgttcctcatcaagtggtggcttctctccttcacccctgccacaagccaaaccggtcggcataacccatggcatcccgcagctcccaagagtaaggcccgagcatccccagccccagcccactcattacggaccgagcagcctggatctttcgaaagaacgggccgagcagggcgcctcactggccactagttatagctctacagccatgaatgggaacttggccaaatag

SEQ ID NO: 243384 - DNA, 2415 bp, Artificial Sequence
  derived and/or modified sequence
atggagacccagaaggacgaagcagctcaagccaaaggtgcagccgcgtccgggtctacacgggagcagaccgctgagaagggggcaaaaaataaagctgctgaagccactgaaggtcccacctccgaaccttcgtcaagcgggccagggcggctgaagaagacggcgatgaaactgtttggcggcaaaaaagggatctgcaccctgcctagcttctttggtggagggcgtagcaaaggatccgggaagggctcaagtaaaaagggactgtccaagtctaagacgcatgatggcctttctgaagccgcccacggcccagaagacgtagtgtctgagggaactgggttctcactccccctgcctgagctgccatgccagttccctagttcacagtccgcccatggcgcactggagacaggatctagatgtaagacatctgttgctggcgccactgaaaaggctgtcgccgaaaaatttccatctatgcctaagcctaaaaaaggcctcaagggatttttttcatctatccgcaggcacagaaaatccaaggtaacaggagctgagcagtccgagcccggagctaagggccccgaacgcgtgcgcgcgagaccccatgaacacgtcagttcagctccgcaggtgccatgtttcgaggagactttccaggctccaaggaaagagaacgcgaacccacaggacgcccctggacctaaagtttcaccaacacccgagcccagccccccagcaacggagaagatggcttgcaaagaccccgagaaaccaatggaagcttgtgcgagcgcccacgtgcaaccgaaacccgcacctgaagcatcctctctcgaagagcctcactcgcctgaaactggcgagaaggtcgtcgctggcgaggtgaatcccccgaatggtcctgtgggcgatcctctctcactgttgtttggggatgtgactagtctgaagagcttcgattcactaactggctgcggggatattattgcagagcaggatatggactctatgacggacagtatggccagcgggggacagcgtgccaatagggacggaaccaaacgatcgtcttgtctggtaacttaccagggtgggggggaagagatggcactgcctgacgatgacgacgaggaggaagaagaagaagaagaggtggaactcgaggaagaagaagaggaagtgaaggaagaggaggaagacgacgacctcgagtatctatgggagaccgcacagatgtacccgcgcccaaacatgaacttgggctaccatcctacaaccagcccggggcaccatggatacatgttgttagatcccgtgaggtcttacccaggtttggctcccggcgagcttcttacgccgcagtccgaccaacaggagagtgctccaaattccgatgagggttattatgattcaacgacccctggcttcgaggatgatagtggggaggcattgggcttggtcagaagagactgtctgccacgtgattcttatagtggcgatgccctctacgaattctatgagcctgacgactccctggagaactcacctcctggtgatgactgtttgtacgatctccacgggcgcagcagcgaaatgttcgaccccttcctgaatttcgagcccttcctatcgagccggcctcctggggcgatggaaaccgaggaggagcgtctcgtgacaatccagaagcaactgctgtattgggaacttcgaagggaacagctggaggctcaggaggcacgggcacgggaagcccatgccagggaagcccacgcccgggaggcttatacaagagaggcttatggccgagaagcatacgccagggaagcacacacttgggaggcccacggcagagaggctcggacccgggaagcccaagcgcgggaggttagatgccgcgagacgcaggtgagagagacgcaggcccgtcaggagaagcccgtgcttgaatatcagatgaggcccctgggaccaagcgtgatgggcttggcggctggcgttagcgggacgagtcagattagccatagggggataacctctgcgtttcctacaactgcaagctcagagccggattggcgggacttccggcccctggagaaaagatatgagggaacctgctcaaaaaaggatcaaagtacctgcctgatgcaactgttccagagcgatgcgatgtttgaacctgacatgcaagaagcgaattttgggggatcccccaggagggcttatcctacctactcccccccagaggaccctgaggaagaggaggtggaaaaggagggaaatgctacagtcagcttttcccaggccctggtggagttcacttctaacgggaatcttttctcatctattcggtgtccgggtactgaggataaacggcaggtgacccaggcttgtggcacctggtag

SEQ ID NO: 243385 - DNA, 3408 bp, Artificial Sequence
  derived and/or modified sequence
atggagacccagaaggatgaggccgcccaggccaagggagctgctgccagcggcagcacccgggagcagacagctgagaagggggccaagaacaaggctgctgaggccacagagggccccaccagcgagcccagcagcagcggccctggccgcctgaagaagacagccatgaagctgtttggaggcaagaagggcatctgcaccctgcccagcttctttggaggcggccgcagcaaaggaagtggcaagggcagcagcaagaagggcctgagcaagagcaagacccatgatggcctgtctgaggccgcccacggcccagaagatgtggtgtctgagggcaccggcttcagcctgcccctgcctgagctgccctgccagttccccagcagccagagcgcccacggggccctggagaccggcagccgctgcaagacctctgtggccggggccacagagaaggctgtggccgagaagttccccagcatgcccaagcccaagaagggcctgaagggcttcttcagcagcatcagaagacacaggaagagcaaggtgactggagctgagcagagcgagcccggggccaagggccctgagcgggtgcgggcccggccccatgaacatgtgagcagcgccccccaggtgccctgctttgaggagaccttccaggcccccaggaaagaaaatgccaacccccaggatgcccctggccccaaggtgagccccaccccagagcccagccccccagccacagagaagatggcctgcaaggaccctgagaagcccatggaggcctgtgccagcgcccacgtgcagcccaagccagcccctgaggccagcagcctggaggagccccacagccctgagactggagagaaggtggtggccggggaggtgaacccccccaacggccctgtgggggaccccctgagcctgctgtttggagatgtgaccagcctgaagagctttgacagcctgaccggctgtggggacatcatcgccgagcaggacatggacagcatgacagacagcatggccagcggcggccagagggccaacagagatggcaccaagaggagcagctgcctggtgacctaccagggcggcggggaggagatggccctgcctgatgatgatgatgaggaggaggaggaggaggaggaggtggagctggaggaggaggaggaggaggtgaaggaggaggaggaggatgatgacctggagtacctgtgggagacagcccagatgtacccccggcccaacatgaacctgggctaccaccccaccaccagccctggccaccacggctacatgctgctggaccctgtgcgcagctacccaggcctggcccctggagagctgctgaccccccagagcgaccagcaggagagcgcccccaacagtgatgagggctactatgacagcaccaccccaggctttgaagatgattctggagaggccctgggcctggtgagaagagactgcctgccccgggacagctacagcggagatgccctgtatgagttctatgagccagatgacagcctggagaacagccccccaggagatgactgcctgtatgacctgcacggccgcagcagcgagatgtttgaccccttcctgaactttgagcccttcctgagcagccggcccccaggggccatggagacagaggaggagcggctggtgaccatccagaagcagctgctgtactgggagctgcggcgggagcagctggaggcccaggaggcccgggcccgggaggcccacgcccgggaggcccacgcccgggaggcctacacccgggaggcctacggccgggaggcctatgcccgggaggcccacacctgggaggcccacggccgggaggcccggacccgggaggcccaggcccgggaggtgcgctgccgggagacccaggtgcgggagacccaggcccggcaggagaagcctgtgctggagtaccagatgaggcccctgggccccagcgtgatgggcctggccgccggcgtgtctggcaccagccagatcagccaccggggcatcaccagcgccttccccaccacagccagcagcgagccagactggagggacttccggcccctggagaagagatatgagggcacctgcagcaagaaggaccagagcacctgcctgatgcagctgttccagagtgatgccatgtttgagccagacatgcaggaggccaactttggaggcagcccccggcgggcctaccccacctacagccccccagaggaccctgaggaggaggaggtggagaaggagggcaatgccaccgtgtccttcagccaggccctggtggagttcaccagcaatggaaacctcttcagctccatgagctgcagcagtgacagcgacagcagcttcacccagaacctgcctgagctgccccccatggtgacctttgatattgctgatgtggagagagatggagagggcaaatgtgaggagaaccctgagttccacaatgatgaggacctggccgccagcctggaggcctttgagctgggctactaccacaagcacgccttcaacaactaccacagccgcttctaccagggcctgccctggggcgtgagcagcctgccccgctacctgggcctgcccggcctgcacccccggcccccacctgctgccatggccctgaacagaagaagccgcagcctggacacagctgagaccctggagatggagctgagcaacagccacctggtgcagggctacctggagagtgatgagctgcaggcccagcaggaggacagtgatgaagaagatgaggaggaggaggagggggagtggagccgggacagccccctgagcctgtacacagagcccccaggggcctatgactggccagcctgggccccctgccccctgcctgtgggccctggccctgcctggatcagccccaaccagctggaccggcccagcagccagagcccctaccggcaggccacctgctgcatcccccccatgaccatgagcatcagcctgtctgtgcctgagagccgggcccctggagagagcggcccccagctggcccggcccagccacctgcacctgcccatgggcccctgctacaacctgcagccccaggccagccagagcatgagggcccggcccagagatgtgctgctgcctgtggatgagcccagctgcagcagcagcagcggcggcttcagccccagccccctgccccaggccaagcctgtgggcatcacccacggcatcccccagctgccccgggtgcggcctgagcacccccagccccagcccacccactacggccccagcagcctggacctgagcaaggagcgggcagagcagggcgccagcctggccaccagctacagcagcacagccatgaatggaaacctggccaagtag

SEQ ID NO: 243386 - DNA, 2415 bp, Artificial Sequence
  derived and/or modified sequence
atggagacccagaaggatgaggccgcccaggccaagggagctgctgccagcggcagcacccgggagcagacagctgagaagggggccaagaacaaggctgctgaggccacagagggccccaccagcgagcccagcagcagcggccctggccgcctgaagaagacagccatgaagctgtttggaggcaagaagggcatctgcaccctgcccagcttctttggaggcggccgcagcaaaggaagtggcaagggcagcagcaagaagggcctgagcaagagcaagacccatgatggcctgtctgaggccgcccacggcccagaagatgtggtgtctgagggcaccggcttcagcctgcccctgcctgagctgccctgccagttccccagcagccagagcgcccacggggccctggagaccggcagccgctgcaagacctctgtggccggggccacagagaaggctgtggccgagaagttccccagcatgcccaagcccaagaagggcctgaagggcttcttcagcagcatcagaagacacaggaagagcaaggtgactggagctgagcagagcgagcccggggccaagggccctgagcgggtgcgggcccggccccatgaacatgtgagcagcgccccccaggtgccctgctttgaggagaccttccaggcccccaggaaagaaaatgccaacccccaggatgcccctggccccaaggtgagccccaccccagagcccagccccccagccacagagaagatggcctgcaaggaccctgagaagcccatggaggcctgtgccagcgcccacgtgcagcccaagccagcccctgaggccagcagcctggaggagccccacagccctgagactggagagaaggtggtggccggggaggtgaacccccccaacggccctgtgggggaccccctgagcctgctgtttggagatgtgaccagcctgaagagctttgacagcctgaccggctgtggggacatcatcgccgagcaggacatggacagcatgacagacagcatggccagcggcggccagagggccaacagagatggcaccaagaggagcagctgcctggtgacctaccagggcggcggggaggagatggccctgcctgatgatgatgatgaggaggaggaggaggaggaggaggtggagctggaggaggaggaggaggaggtgaaggaggaggaggaggatgatgacctggagtacctgtgggagacagcccagatgtacccccggcccaacatgaacctgggctaccaccccaccaccagccctggccaccacggctacatgctgctggaccctgtgcgcagctacccaggcctggcccctggagagctgctgaccccccagagcgaccagcaggagagcgcccccaacagtgatgagggctactatgacagcaccaccccaggctttgaagatgattctggagaggccctgggcctggtgagaagagactgcctgccccgggacagctacagcggagatgccctgtatgagttctatgagccagatgacagcctggagaacagccccccaggagatgactgcctgtatgacctgcacggccgcagcagcgagatgtttgaccccttcctgaactttgagcccttcctgagcagccggcccccaggggccatggagacagaggaggagcggctggtgaccatccagaagcagctgctgtactgggagctgcggcgggagcagctggaggcccaggaggcccgggcccgggaggcccacgcccgggaggcccacgcccgggaggcctacacccgggaggcctacggccgggaggcctatgcccgggaggcccacacctgggaggcccacggccgggaggcccggacccgggaggcccaggcccgggaggtgcgctgccgggagacccaggtgcgggagacccaggcccggcaggagaagcctgtgctggagtaccagatgaggcccctgggccccagcgtgatgggcctggccgccggcgtgtctggcaccagccagatcagccaccggggcatcaccagcgccttccccaccacagccagcagcgagccagactggagggacttccggcccctggagaagagatatgagggcacctgcagcaagaaggaccagagcacctgcctgatgcagctgttccagagtgatgccatgtttgagccagacatgcaggaggccaactttggaggcagcccccggcgggcctaccccacctacagccccccagaggaccctgaggaggaggaggtggagaaggagggcaatgccaccgtgtccttcagccaggccctggtggagttcaccagcaatggaaacctcttcagcagcatccgctgccctggaacagaggacaagaggcaggtgacccaggcctgtggcacctggtag

SEQ ID NO: 243387 - DNA, 3408 bp, Artificial Sequence
  derived and/or modified sequence
atggagacccagaaggacgaggccgcccaggccaagggcgccgccgcaagcgggtcaactcgggaacaaacagcagagaagggcgccaaaaataaagcagccgaggccactgagggaccgaccagcgagccctcatcctctgggccagggcggctcaaaaaaactgccatgaagctctttggtggtaagaagggaatctgtactctgccctcatttttcgggggaggccgatcaaaaggttccgggaaaggaagctcaaagaagggcctaagtaagtccaagactcacgacggattatcggaggcagcgcacgggcctgaggacgtggtcagcgagggaacagggttttccctgcctttgcccgagcttccctgtcaattcccctcatcccagtctgcacacggggccttggagacagggtctcgttgtaagacatcagtggccggtgccacagaaaaagctgtggccgagaagtttccttccatgcctaaacccaaaaagggcctgaaaggcttttttagctctatacggcgccatcgaaaaagtaaagttacaggggccgagcagagcgagcctggggccaagggtccggagcgggtgcgcgctagaccacatgaacacgtgagtagcgcgccacaggttccttgcttcgaggagacttttcaagccccaagaaaggagaatgctaacccacaagatgcacctggccccaaggtgagccctacaccggagcctagccccccggcgacagaaaaaatggcatgtaaggaccctgagaaaccaatggaagcctgcgctagcgctcacgttcagccaaagccagccccagaagcgtcttcactggaggagcctcactcacctgaaaccggcgaaaaagtggtagctggcgaagtcaacccccctaatggccctgttggggatccactgagcctcctcttcggtgacgtcacctccctgaaaagcttcgactccctaacgggctgcggcgacatcatcgccgaacaggacatggactccatgactgatagcatggcctcagggggccagcgggcaaacagggatggaacgaagagaagctcttgtctggtcacctatcagggtgggggagaggaaatggcgttacctgacgatgatgacgaagaggaagaggaggaagaggaggtagagctggaggaggaggaggaagaagttaaggaggaggaagaagacgacgaccttgagtatctttgggagaccgctcagatgtatccgcgccccaacatgaatctgggctaccatcctactacctcgcctgggcatcacggatacatgctgctggatccagttaggtcctatcctggcttggccccaggcgagctgctcacgccacagtccgatcagcaagaatccgcccccaattcggatgagggctactatgactccaccacccccggctttgaggacgattctggggaggctctgggtctagtgcggcgggactgtctgcccagggattcctactcaggggatgccctgtatgagttctacgagccagacgacagcttggaaaactcaccacctggggacgattgcctgtacgatttacacggaagatcatcagagatgttcgacccgttcctcaattttgaaccttttctgtcatctagaccgcccggcgcgatggagacagaggaggaacgtctcgtcacaattcaaaaacagctcttatattgggaactgagaagggagcagctcgaggcacaggaagcaagggctcgagaagcacatgccagggaggcccacgcccgcgaagcctacactagagaggcttacggaagggaagcttatgcccgagaggctcatacttgggaagcgcacggtagggaggctcgaacgcgggaggctcaggctagagaggtgcgatgtcgggagactcaagtccgggagacccaggcccggcaggaaaagcccgttctggagtaccaaatgcgacctctgggtccgtccgtgatgggcctggcagccggcgtttctggcactagccagatctctcataggggaataacgtcagccttccccacaacggcttccagcgaaccagactggagggacttcagaccactcgaaaaaaggtacgagggaacctgttcaaagaaggatcagagtacctgccttatgcagctgttccagagcgacgcaatgttcgaaccagacatgcaggaagccaatttcggcggaagccccagacgcgcgtaccccacttactcacctccggaggacccagaggaagaggaggttgaaaaggagggcaacgccactgtatccttctcacaggcgctagtggaattcacttctaacgggaatctcttctcttcgatgtcatgttcttcggattcagacagctcctttacgcagaatctgcctgagctcccgccaatggtgacattcgatatcgccgacgtcgaacgcgatggcgagggcaagtgcgaggaaaaccccgagtttcataatgacgaagacctcgcagcctcactggaagcatttgagctcgggtattaccacaagcatgctttcaacaattaccatagccgattttaccagggcctgccatggggggtgtcatctcttccacgctacctgggcttgccaggattgcatccccgcccccctcctgcagcaatggcccttaaccgccgaagtagatccctggacacagctgaaaccctagagatggagttgtcaaattcccatttggtgcaggggtacctggaaagcgatgagctgcaggcccagcaggaggacagcgatgaagaggacgaagaggaagaagagggggaatggtcccgcgactcacctctgtctctgtataccgaaccccccggagcgtacgattggccggcgtgggcgccatgccctctcccagtggggccaggacccgcttggatctctccaaaccagttagacagaccatcttcccagtcgccctatcgccaggccacgtgttgcatccctccgatgactatgtcaatttcactgagtgtgccggaatccagggctccgggggagagtgggccgcagcttgcaagacctagtcatttgcatctgcccatggggccctgctataatttgcagccacaagccagccagtcaatgcgggctcggcctcgtgatgtgctgctgcctgttgacgagccttcctgcagtagttcctctgggggcttcagccctagcccgctccctcaggcgaaaccggtcggcatcacccacgggattccacaactgcccagggtgcgacccgaacacccccagcctcaaccaacgcattatggtccttcttccttggacctctccaaggagagggccgagcagggcgcgagtctcgccacatcttactctagtactgccatgaatggcaacctggctaagtag

SEQ ID NO: 243388 - DNA, 2415 bp, Artificial Sequence
  derived and/or modified sequence
atggagacccagaaggacgaggccgcccaggccaagggcgccgccgcttctggcagtaccagagaacagaccgcagagaagggcgctaagaacaaagccgccgaggccacagagggacccacgagtgaacctagtagttccggccctggaagactgaagaaaaccgccatgaagctttttggtggcaaaaaaggaatctgtaccctgccatcattcttcggtggagggcgcagcaagggttcgggcaagggtagctctaagaaggggctctctaaatcaaaaacccatgacggtctgagcgaggctgcccacgggcctgaagatgtagtgtctgaaggtaccgggttttcgctcccacttcctgaactaccatgtcagtttccctcctcacagtcagcccacggtgccttggaaactggttcgagatgcaaaacatcagtggccggcgccactgaaaaggctgtggccgagaaatttcccagtatgccgaagccaaagaaaggcctgaaggggttcttctccagcattcgccgccaccgcaaaagcaaggtgaccggagccgagcagagcgagccaggtgccaaaggacctgagcgagtgagggcccggcctcacgagcatgtgagctctgcaccccaagtcccttgtttcgaggaaacctttcaggctcctcgtaaagagaacgccaatccccaggacgcaccaggacccaaagtgtcacctacgcccgagccatcgccccctgctacagaaaaaatggcctgcaaggatcctgagaaaccaatggaggcctgtgcctcagcgcacgtgcagcccaaacctgcccccgaggcctcatccctcgaggaacctcacagcccagagacgggcgagaaggtagtcgccggtgaagtgaatccccctaacggcccagtgggggatcccctgtctctactgttcggagatgtgacatctcttaagagttttgacagcctaacgggttgcggggatataatcgccgagcaggacatggacagcatgaccgacagcatggctagtggtggacagcgagctaatagggacggtactaagcgctcatcttgcctggtgacgtatcaaggcggcggcgaggaaatggctttgcctgatgatgatgatgaagaggaagaggaggaagaagaagtggagctagaagaggaggaggaggaggtcaaggaagaggaagaggatgatgatcttgagtacctgtgggagaccgcccagatgtaccccagaccaaatatgaacctgggctaccacccaacgacgtcaccaggtcatcacggatacatgctgctggaccccgtgaggtcatatcctgggctcgctcccggggagcttctcacaccccaatcagaccagcaggaatccgcccccaacagcgatgaagggtactacgattctaccacacctggattcgaggacgattcgggagaggcactaggcctggtgaggcgggactgcctccctagagatagttattccggcgacgctctatacgagttctacgagcctgatgattccctggagaactctcccccaggcgatgattgtctgtatgacctgcacgggcggtcctcagaaatgttcgaccccttcctgaactttgaaccattcttatcatctcggccacccggcgccatggaaacagaggaggaaaggctcgtgactattcagaaacagctcctgtattgggagctgaggagggagcagctagaagcccaagaagctcgagctcgggaggcccatgcccgcgaggcccatgctcgtgaagcatacacaagagaggcttacggtagagaggcatatgccagagaggcccacacctgggaggcacacggcagagaggctaggaccagagaggcccaggccagagaagtgcggtgcagggagacccaggtgcgtgaaactcaggctaggcaggaaaagcccgtcctggagtatcagatgaggccactgggaccatctgtaatggggttagctgccggcgtgtcgggtacgtcacagatcagtcacaggggcatcacctcagctttccccaccaccgcctcttctgagcctgattggagagatttccggccgctggagaagaggtacgaaggcacctgcagcaaaaaagaccaaagcacctgtctcatgcagctatttcagtccgacgctatgtttgagcctgacatgcaggaggccaactttgggggttctcctagaagggcataccccacctatagtccacctgaggaccccgaggaagaggaggtcgaaaaggaggggaatgccaccgtcagttttagccaggctttagttgaatttacaagtaacgggaatctgtttagtagcatccgttgtccggggactgaagacaagagacaggttactcaggcatgtggcacatggtag

SEQ ID NO: 243389 - DNA, 3408 bp, Artificial Sequence
  derived and/or modified sequence
atggagacccaaaaggacgaggccgctcaggccaaaggcgcagctgcatctgggagtacccgcgagcagaccgcagaaaagggtgccaaaaataaggctgcggaagccaccgaaggaccgacaagcgaaccttcctcaagtggtcccggaagactgaagaaaacagccatgaaactgtttggaggcaagaaaggcatctgtacacttccttctttcttcggcggtggacgcagcaagggctcaggtaagggttctagcaagaaaggactaagcaaatccaagacccacgatggtctgtctgaagcagctcacgggccagaggacgttgtatctgagggaaccgggttctccctacccctgcccgaattaccttgtcagtttcctagcagccagagcgcccacggcgcactcgagactggctctaggtgtaagacttctgtcgctggggctaccgagaaggcggtggcagagaagttcccctctatgccaaaacctaagaagggattaaaaggcttcttctcaagcattcggagacatcgtaagagcaaggtgacgggcgctgagcagagcgaacccggagccaaggggccagagcgtgtgcgggctaggccacatgagcatgtgtcgagtgctccacaggtcccatgctttgaggagactttccaggcccctagaaaagagaacgccaatccccaggatgccccaggccctaaagtgtcccctacaccagaacccagccctcctgctaccgaaaaaatggcatgcaaagaccctgagaagcctatggaagcttgcgccagcgctcacgtgcagccaaagcctgcgccagaagccagtagtcttgaggagcctcactctcctgagaccggggagaaggtggttgctggagaagtgaaccctcccaacgggcctgttggcgaccctctgagtctcctctttggcgacgtcactagcttaaaatccttcgacagtctcacggggtgcggcgacatcatcgccgaacaggatatggactctatgacggactctatggcctccggtggccaaagggcaaaccgtgacgggacgaagaggtccagctgcctagttacttaccaggggggaggggaggagatggccctgcctgacgacgacgacgaagaggaggaggaagaagaagaggttgaacttgaggaggaggaagaagaggtaaaagaggaggaggaagacgatgatctcgaatacctgtgggaaacagcacagatgtatcccaggcccaatatgaatctgggctatcatcccaccacttcccctggacatcacgggtatatgttgttggatcccgtgcgctcgtaccctgggctcgctcctggagagttactaacgccgcagagtgaccagcaagagtccgccccaaacagcgatgagggctactacgattcaactacgcccggatttgaggatgacagcggagaggctctcgggctcgtccggagggattgcctcccgcgagattcgtacagtggggatgctctgtatgaattctacgagcctgatgactccctggaaaattctcccccaggggacgactgcctctatgaccttcatggtcggtccagcgagatgttcgatccgttccttaactttgagccttttctgtcctcccgacctccgggagccatggagacggaggaagagagattggtgaccattcagaagcaactgttgtactgggagctgcggagggagcagcttgaagctcaggaggccagggcccgtgaagcccacgccagagaggcccacgctagagaagcatacactcgcgaggcttacggcagagaagcctacgctcgggaagcccacacttgggaagcccacggcagggaggcgaggactcgagaggcccaggccagagaagtccgatgtagggagacacaggtccgagaaacccaggctaggcaagaaaaacccgtcctggaataccaaatgcggcctttggggccatccgtaatggggctcgcagctggcgtgtcgggcacgagccagatcagtcatagaggcatcacatctgccttcccaactacagcatcctcagaacctgactggagagatttccggcctttggagaaaagatatgagggaacctgttccaagaaagaccaatccacttgcctcatgcaattgtttcaatccgacgccatgttcgagccagatatgcaggaagctaattttggcggtagccccagaagagcctacccaacatactcacctccagaagacccagaagaggaggaagtcgaaaaagagggcaacgctacagtcagctttagccaggccctagtagagttcacttccaatgggaatctcttcagcagtatgtcgtgttcaagcgatagtgacagctcatttactcaaaacctccctgaactcccccctatggtcacgttcgacattgccgatgttgagagagacggggaaggaaaatgtgaagagaatcctgagttccataatgacgaggacctagctgccagtctggaagccttcgaactaggatactatcacaagcacgcttttaacaactaccactccaggttttatcagggcctgccctggggcgtttcctctctgccacgttaccttgggctgcccggactgcaccccaggccaccgcctgctgcaatggccctgaaccgacggtcacgcagcctggacacagcagagaccctggaaatggaactctcgaatagtcatctggtgcagggctacttggaatcagacgaattacaggcgcagcaggaagactcggatgaggaggacgaggaagaggaagaaggagagtggtccagagattcacctctgtcactgtacacggagcctcctggagcctatgactggcccgcatgggcaccttgtcccctccccgtcggtccaggcccagcctggatcagtcccaaccagttggataggccgtcttcacagtccccctatcgacaggctacctgttgtatacctccaatgacaatgagcatcagtctgagcgttccagagtctcgcgctcctggcgagagcggcccacagctggcacgcccttcccacttgcatctgcccatgggcccttgttacaacctgcagccccaagcctcgcagtccatgagggcacgccctcgcgacgtcctgttgcccgtcgatgagccaagctgttctagttcatccgggggattctctccgagccccctgcctcaggcaaagccagtgggcataacacacggcattccccagcttcccagagtgcggccagagcacccgcaaccacagcctacacactacggaccttcttcactggacctatcgaaagagagagctgaacagggcgcttccctggcaacctcatactcgagcacggccatgaacggtaaccttgcaaagtag

SEQ ID NO: 243390 - DNA, 2415 bp, Artificial Sequence
  derived and/or modified sequence
atggagacacagaaggatgaggccgcacaggccaagggcgcagccgcatccggttccacaagagagcaaacagcagagaaaggagctaaaaataaagccgcagaagctaccgaaggccctacttctgagccgagctcttcaggccctggcagacttaaaaaaacagccatgaaacttttcggaggtaaaaaaggcatatgtacattaccctctttcttcggagggggacgctccaagggcagtggcaaggggagtagcaaaaaagggttgtctaagagcaaaacacacgatggcttatcagaagctgctcacggccctgaggatgtggtctccgagggtacgggatttagcctccccctccccgaactgccgtgtcaatttcccagttcacaatcggcacacggggcactggagactggttccaggtgtaagactagcgtggcaggggcaaccgaaaaagctgtggccgaaaagttccccagtatgccaaaacctaaaaaaggattgaaagggttctttagttcaatccgccgtcatagaaaatccaaagttaccggagcggagcagtcagaacccggagccaaggggccagaaagagttcgggcacggcctcacgagcatgtgagctccgcacctcaggtgccttgttttgaagagactttccaagcaccacggaaagaaaatgccaacccccaggatgctcctggcccaaaagtgagccctacccctgaaccttccccacccgcaacagagaagatggcgtgcaaagacccagagaagccgatggaggcttgtgcctccgcgcacgttcaaccaaaacccgctcctgaagcgagtagtctggaggagccccattctccagagacaggcgaaaaggtcgtggctggcgaggtcaaccccccaaacggaccagtgggagatcctttgtcactgttatttggcgatgtgacttcactgaagagcttcgacagtcttactgggtgcggagacataatcgccgagcaagatatggatagcatgactgactcaatggcgagcggcggtcagcgtgcaaacagagatggcactaagagatcatcctgtctggtgacctatcaggggggaggggaggaaatggctttgcccgacgacgacgatgaggaagaggaagaagaggaggaagtggagttggaggaggaggaggaggaggtaaaggaggaggaggaagatgacgatctagaatacctgtgggaaaccgctcagatgtacccaaggcctaacatgaatctagggtatcaccccacgacttccccgggtcatcatgggtatatgctccttgaccctgttcggtcctacccaggcctcgcccctggcgaactgctgaccccgcaatcagaccaacaggagagcgccccaaactcagacgagggctattatgactcgaccacccctggcttcgaggatgacagcggcgaggcccttggtctggtgcggagagattgcttacctagggacagctattccggcgacgctctgtacgaattttacgagcccgatgactctctcgaaaattctccaccgggagacgactgcctttatgacctccatggccgtagtagtgagatgttcgatccatttttgaattttgaaccttttctcagctcccgtcctccaggggcaatggagacagaggaagagcggctggtgacgatccaaaaacagttgctttattgggaactgaggcgagaacagctagaagcccaggaggctcgggctcgggaggcccacgccagggaggcccatgccagagaggcctatacacgagaggcttacggcagggaggcctacgcgagagaagcgcacacgtgggaagctcacggacgagaggcacggactcgcgaagctcaggcacgagaggtgcgatgtagagagacgcaggttagagagacgcaggcacgacaagagaagcccgtcctagagtatcaaatgaggcccctcggcccttccgtgatgggactcgctgctggggtcagcggcacctcccaaatctcacaccgagggattaccagtgcttttcccaccactgcaagttccgagcccgactggcgcgactttagacccctggagaaacggtatgaaggcacgtgcagcaaaaaagaccaatcaacctgcctcatgcagttgtttcagagcgatgctatgttcgaaccagacatgcaagaagccaactttgggggttcccccagacgggcatatccgacgtacagtcccccagaggaccctgaggaagaggaagtggagaaggaaggcaatgccactgtatctttcagccaagccctagtggaatttaccagcaacggcaacctctttagttctatacgatgccccggtaccgaagacaaacgccaagtgacacaagcatgtgggacatggtag

SEQ ID NO: 243391 - DNA, 3408 bp, Artificial Sequence
  derived and/or modified sequence
atggagacccagaaggacgaggccgcccaggccaagggcgccgccgccagcggcagcaccagagagcagaccgccgagaagggcgccaagaacaaggccgccgaggccaccgagggccccaccagcgagcccagcagcagcggccccggcagactgaagaagaccgccatgaagctgttcggcggcaagaagggcatctgcaccctgcccagcttcttcggcggcggcagaagcaagggcagcggcaagggcagcagcaagaagggcctgagcaagagcaagacccacgacggcctgagcgaggccgcccacggccccgaggacgtggtgagcgagggcaccggcttcagcctgcccctgcccgagctgccctgccagttccccagcagccagagcgcccacggcgccctggagaccggcagcagatgcaagaccagcgtggccggcgccaccgagaaggccgtggccgagaagttccccagcatgcccaagcccaagaagggcctgaagggcttcttcagcagcatcagaagacacagaaagagcaaggtgaccggcgccgagcagagcgagcccggcgccaagggccccgagagagtgagagccagaccccacgagcacgtgagcagcgccccccaggtgccctgcttcgaggagaccttccaggcccccagaaaggagaacgccaacccccaggacgcccccggccccaaggtgagccccacccccgagcccagcccccccgccaccgagaagatggcctgcaaggaccccgagaagcccatggaggcctgcgccagcgcccacgtgcagcccaagcccgcccccgaggccagcagcctggaggagccccacagccccgagaccggcgagaaggtggtggccggcgaggtgaacccccccaacggccccgtgggcgaccccctgagcctgctgttcggcgacgtgaccagcctgaagagcttcgacagcctgaccggctgcggcgacatcatcgccgagcaggacatggacagcatgaccgacagcatggccagcggcggccagagagccaacagagacggcaccaagagaagcagctgcctggtgacctaccagggcggcggcgaggagatggccctgcccgacgacgacgacgaggaggaggaggaggaggaggaggtggagctggaggaggaggaggaggaggtgaaggaggaggaggaggacgacgacctggagtacctgtgggagaccgcccagatgtaccccagacccaacatgaacctgggctaccaccccaccaccagccccggccaccacggctacatgctgctggaccccgtgagaagctaccccggcctggcccccggcgagctgctgaccccccagagcgaccagcaggagagcgcccccaacagcgacgagggctactacgacagcaccacccccggcttcgaggacgacagcggcgaggccctgggcctggtgagaagagactgcctgcccagagacagctacagcggcgacgccctgtacgagttctacgagcccgacgacagcctggagaacagcccccccggcgacgactgcctgtacgacctgcacggcagaagcagcgagatgttcgaccccttcctgaacttcgagcccttcctgagcagcagaccccccggcgccatggagaccgaggaggagagactggtgaccatccagaagcagctgctgtactgggagctgagaagagagcagctggaggcccaggaggccagagccagagaggcccacgccagagaggcccacgccagagaggcctacaccagagaggcctacggcagagaggcctacgccagagaggcccacacctgggaggcccacggcagagaggccagaaccagagaggcccaggccagagaggtgagatgcagagagacccaggtgagagagacccaggccagacaggagaagcccgtgctggagtaccagatgagacccctgggccccagcgtgatgggcctggccgccggcgtgagcggcaccagccagatcagccacagaggcatcaccagcgccttccccaccaccgccagcagcgagcccgactggagagacttcagacccctggagaagagatacgagggcacctgcagcaagaaggaccagagcacctgcctgatgcagctgttccagagcgacgccatgttcgagcccgacatgcaggaggccaacttcggcggcagccccagaagagcctaccccacctacagcccccccgaggaccccgaggaggaggaggtggagaaggagggcaacgccaccgtgagcttcagccaggccctggtggagttcaccagcaacggcaacctgttcagcagcatgagctgcagcagcgacagcgacagcagcttcacccagaacctgcccgagctgccccccatggtgaccttcgacatcgccgacgtggagagagacggcgagggcaagtgcgaggagaaccccgagttccacaacgacgaggacctggccgccagcctggaggccttcgagctgggctactaccacaagcacgccttcaacaactaccacagcagattctaccagggcctgccctggggcgtgagcagcctgcccagatacctgggcctgcccggcctgcaccccagacccccccccgccgccatggccctgaacagaagaagcagaagcctggacaccgccgagaccctggagatggagctgagcaacagccacctggtgcagggctacctggagagcgacgagctgcaggcccagcaggaggacagcgacgaggaggacgaggaggaggaggagggcgagtggagcagagacagccccctgagcctgtacaccgagccccccggcgcctacgactggcccgcctgggccccctgccccctgcccgtgggccccggccccgcctggatcagccccaaccagctggacagacccagcagccagagcccctacagacaggccacctgctgcatcccccccatgaccatgagcatcagcctgagcgtgcccgagagcagagcccccggcgagagcggcccccagctggccagacccagccacctgcacctgcccatgggcccctgctacaacctgcagccccaggccagccagagcatgagagccagacccagagacgtgctgctgcccgtggacgagcccagctgcagcagcagcagcggcggcttcagccccagccccctgccccaggccaagcccgtgggcatcacccacggcatcccccagctgcccagagtgagacccgagcacccccagccccagcccacccactacggccccagcagcctggacctgagcaaggagagagccgagcagggcgccagcctggccaccagctacagcagcaccgccatgaacggcaacctggccaagtag

SEQ ID NO: 243392 - DNA, 2415 bp, Artificial Sequence
  derived and/or modified sequence
atggagacccagaaggacgaggccgcccaggccaagggcgccgccgccagcggcagcaccagagagcagaccgccgagaagggcgccaagaacaaggccgccgaggccaccgagggccccaccagcgagcccagcagcagcggccccggcagactgaagaagaccgccatgaagctgttcggcggcaagaagggcatctgcaccctgcccagcttcttcggcggcggcagaagcaagggcagcggcaagggcagcagcaagaagggcctgagcaagagcaagacccacgacggcctgagcgaggccgcccacggccccgaggacgtggtgagcgagggcaccggcttcagcctgcccctgcccgagctgccctgccagttccccagcagccagagcgcccacggcgccctggagaccggcagcagatgcaagaccagcgtggccggcgccaccgagaaggccgtggccgagaagttccccagcatgcccaagcccaagaagggcctgaagggcttcttcagcagcatcagaagacacagaaagagcaaggtgaccggcgccgagcagagcgagcccggcgccaagggccccgagagagtgagagccagaccccacgagcacgtgagcagcgccccccaggtgccctgcttcgaggagaccttccaggcccccagaaaggagaacgccaacccccaggacgcccccggccccaaggtgagccccacccccgagcccagcccccccgccaccgagaagatggcctgcaaggaccccgagaagcccatggaggcctgcgccagcgcccacgtgcagcccaagcccgcccccgaggccagcagcctggaggagccccacagccccgagaccggcgagaaggtggtggccggcgaggtgaacccccccaacggccccgtgggcgaccccctgagcctgctgttcggcgacgtgaccagcctgaagagcttcgacagcctgaccggctgcggcgacatcatcgccgagcaggacatggacagcatgaccgacagcatggccagcggcggccagagagccaacagagacggcaccaagagaagcagctgcctggtgacctaccagggcggcggcgaggagatggccctgcccgacgacgacgacgaggaggaggaggaggaggaggaggtggagctggaggaggaggaggaggaggtgaaggaggaggaggaggacgacgacctggagtacctgtgggagaccgcccagatgtaccccagacccaacatgaacctgggctaccaccccaccaccagccccggccaccacggctacatgctgctggaccccgtgagaagctaccccggcctggcccccggcgagctgctgaccccccagagcgaccagcaggagagcgcccccaacagcgacgagggctactacgacagcaccacccccggcttcgaggacgacagcggcgaggccctgggcctggtgagaagagactgcctgcccagagacagctacagcggcgacgccctgtacgagttctacgagcccgacgacagcctggagaacagcccccccggcgacgactgcctgtacgacctgcacggcagaagcagcgagatgttcgaccccttcctgaacttcgagcccttcctgagcagcagaccccccggcgccatggagaccgaggaggagagactggtgaccatccagaagcagctgctgtactgggagctgagaagagagcagctggaggcccaggaggccagagccagagaggcccacgccagagaggcccacgccagagaggcctacaccagagaggcctacggcagagaggcctacgccagagaggcccacacctgggaggcccacggcagagaggccagaaccagagaggcccaggccagagaggtgagatgcagagagacccaggtgagagagacccaggccagacaggagaagcccgtgctggagtaccagatgagacccctgggccccagcgtgatgggcctggccgccggcgtgagcggcaccagccagatcagccacagaggcatcaccagcgccttccccaccaccgccagcagcgagcccgactggagagacttcagacccctggagaagagatacgagggcacctgcagcaagaaggaccagagcacctgcctgatgcagctgttccagagcgacgccatgttcgagcccgacatgcaggaggccaacttcggcggcagccccagaagagcctaccccacctacagcccccccgaggaccccgaggaggaggaggtggagaaggagggcaacgccaccgtgagcttcagccaggccctggtggagttcaccagcaacggcaacctgttcagcagcatcagatgccccggcaccgaggacaagagacaggtgacccaggcctgcggcacctggtag

SEQ ID NO: 243393 - protein, 258 aa, Artificial Sequence
  derived and/or modified sequence
MTPPKLRASLSPSLLLLLSGCLLAAARREKGAASNVAEPVPGPTGGSSGRFLSPEQHACSWQLLLPAPEAAAGSELALRCQSPDGARHQCAYRGHPERCAAYAARRAHFWKQVLGGLRKKRRPCHDPAPLQARLCAGKKGHGAELRLVPRASPPARPTVAGFAGESKPRARNRGRTRERASGPAAGTPPPQSAPPKENPSERKTNEGKRKAALVPNEERPMGTGPDPDGLDGNAELTETYCAEKWHSLCNFFVNFWNG

SEQ ID NO: 243394 - DNA, 777 bp, Artificial Sequence
  derived and/or modified sequence
atgacgccacccaagctgagagcgagtctgtcaccttcattactgttacttctgtctgggtgcctgttggctgctgctcgccgagagaagggagctgccagtaatgttgcagagcccgtcccaggtccgaccgggggatcaagtggtcgatttctatcccccgagcaacacgcatgcagctggcagttgcttctcccagctcctgaggccgctgcaggctctgaacttgccctgcggtgccagtcgcctgacggcgcacgacatcaatgcgcctaccgagggcatcctgaaaggtgcgcggcttatgcagccagaagagcccatttctggaagcaggtgttgggaggcctgcggaaaaagcggcgtccctgtcatgatccagcaccccttcaggcacgattgtgtgccggaaaaaagggacatggagccgaacttcgactggtcccacgcgcaagccctccagcccgacccaccgtcgcaggcttcgccggagagagtaaaccacgggctagaaacaggggaagaacccgagagcgtgcctccggtcctgccgcaggtacccccccacctcagagcgcacccccaaaagaaaacccgtcggagaggaagaccaatgaaggcaaacggaaagccgcacttgttccaaatgaggagagacccatgggaactggtccagatcctgatggcttggacggaaacgctgagttgaccgaaacgtattgcgctgagaaatggcacagtctgtgcaattttttcgtgaacttctggaacggatag

SEQ ID NO: 243395 - DNA, 777 bp, Artificial Sequence
  derived and/or modified sequence
atgactcctcctaagctgcgtgcatcactcagccctagcttacttctcctcttatccgggtgcctgttggcagctgcaagacgggaaaagggagctgctagcaatgttgccgagcctgtcccgggtcccacgggcggcagttctgggcggtttctaagtcctgagcagcacgcatgcagttggcaacttttgttgcccgccccggaagccgccgcaggttccgaacttgccctgcgctgccagtctccagatggagcgcgacaccaatgtgcctacagaggacaccctgaaagatgcgccgcatatgctgccaggcgggcacacttttggaaacaggtcttgggtgggcttcgaaagaagagacgtccttgtcacgaccccgcccctcttcaagccaggctgtgtgcagggaaaaaaggccacggggcagagctgcgcttggtaccacgcgccagcccccctgctagacccactgtcgccgggtttgcaggcgagtctaaaccccgcgcccgcaaccgaggtaggacccgagagagggcttccgggcccgctgcgggtaccccgcccccacaatctgccccacctaaggaaaacccaagcgaacgaaaaacgaacgagggcaagcgcaaggcggccctcgtccccaacgaagaaagacccatgggaaccggccctgacccagatggtctagacggaaacgccgaattaaccgagacttactgcgctgaaaagtggcattctttatgcaactttttcgtcaatttttggaatggttag

SEQ ID NO: 243396 - DNA, 777 bp, Artificial Sequence
  derived and/or modified sequence
atgaccccaccgaaactacgcgccagtctctctccttccctccttctgcttttatctggatgtctgcttgcggctgcaagaagggagaaaggcgccgcatctaatgtagccgaacccgtaccagggcccactggtggaagttctggtagattcctttctcccgaacagcacgcctgctcctggcagctgctgttgcccgcgcccgaggccgcggccggatctgaactcgccttacgctgccagtcccccgatggagcccggcaccaatgtgcctatcgcgggcaccccgaaagatgtgcagcatacgccgcacgtcgagcacacttctggaagcaggttctgggcggactcagaaaaaaaaggagaccatgccacgaccccgctcccctccaagctcgcttgtgcgcaggaaagaagggacacggagccgagctgcgactggtcccccgagctagcccccccgccaggcctaccgtcgcgggcttcgccggagagtcgaaaccacgggcaagaaacagagggagaaccagagaacgcgcttccggtcctgccgctgggactccaccgccacagagcgcaccccctaaggaaaacccttcagaaagaaagacaaacgaaggcaagcgcaaagcggcacttgtgccaaacgaagaacgccccatgggaacaggccctgacccagacggactggacggaaacgcagaacttaccgagacctattgtgcagaaaagtggcactccctgtgtaactttttcgtgaatttttggaatggttag

SEQ ID NO: 243397 - DNA, 777 bp, Artificial Sequence
  derived and/or modified sequence
atgaccccccccaagctgagagccagcctgagccccagcctgctgctgctgctgagcggctgcctgctggccgccgccagaagagagaagggcgccgccagcaacgtggccgagcccgtgcccggccccaccggcggcagcagcggcagattcctgagccccgagcagcacgcctgcagctggcagctgctgctgcccgcccccgaggccgccgccggcagcgagctggccctgagatgccagagccccgacggcgccagacaccagtgcgcctacagaggccaccccgagagatgcgccgcctacgccgccagaagagcccacttctggaagcaggtgctgggcggcctgagaaagaagagaagaccctgccacgaccccgcccccctgcaggccagactgtgcgccggcaagaagggccacggcgccgagctgagactggtgcccagagccagcccccccgccagacccaccgtggccggcttcgccggcgagagcaagcccagagccagaaacagaggcagaaccagagagagagccagcggccccgccgccggcaccccccccccccagagcgccccccccaaggagaaccccagcgagagaaagaccaacgagggcaagagaaaggccgccctggtgcccaacgaggagagacccatgggcaccggccccgaccccgacggcctggacggcaacgccgagctgaccgagacctactgcgccgagaagtggcacagcctgtgcaacttcttcgtgaacttctggaacggctag

SEQ ID NO: 243398 - DNA, 2545 bp, Artificial Sequence
  derived and/or modified sequence
cacagggagccggctaaaacagactactcccccgtgcagtcgttccctctaccctaataaggctttggcgcctctcccagaactcggtcctggggaatgctctttgcctggtccagccccgacaaacgtggtctgagaacagcggagcgcggaaaccgcggagcatgactcctccgaagctgcgagcgtcgctgtcgccgtcgctgctgctgctgctgagtggttgcctcctcgcggctgctcggagggagaaaggggcggctagcaacgtggcggagccggtccccgggcccactggcggctcctcgggtcgcttcctcagccccgagcagcacgcgtgcagctggcagctcctgctgcccgccccggaggccgcagcgggcagcgagctggcgctgcgctgccagagcccggacggggcgcgccaccagtgcgcctaccgcgggcatccggagcgctgcgcagcctacgccgctcgccgcgcgcacttctggaagcaggtgctgggagggctgcgcaagaagcggaggccctgtcacgaccccgcgccgctccaggcccgcttgtgcgcgggcaagaagggccacggcgccgagctgcggctagtgccccgcgcgtccccgcccgcacgccccaccgtcgcgggattcgcgggggagtccaagccccgggcccggaaccgggggcggacccgggagcgtgcgtccggcccagccgctgggaccccgcctccccaaagcgcaccgcccaaagaaaacccctcagagaggaagaccaacgagggcaagaggaaggcggccttggtccccaacgaggagcgacccatggggaccgggcccgaccccgacgggctggacgggaacgcggagctcacggagacctactgcgctgagaagtggcactccctctgcaacttctttgtcaatttctggaacggctgagactgcctgccggcttagggagggttgatgggggaggcgtggggaagggaaagctaagggcgtcttagaccggggggtactgtgatagagattggggagaagtccaggttctcgaatgggggtgggggcaagggtaagggtgagatgcttgggatgagagtgtaaggggtatggagaatctctgggatagcagagaagttaaaaattttgaaaagtctcagtcctgattaagagcaggaaaaataatggaaacagaaataggcgtactttaaatgtgcaaaaactggagactggggagagaaatcgatgcagagggaggctgagaataagggggagatagagtgactaaagtgatgtgagtcccatgtggggagggggatgcaatgtttattgtttaacatttctattaaatgcagccatgagcaattgccaacctgagccaggttgaatcaatgtcttctcacttaatcagctaacaagactgcagactttttttccgtttctgaattggtataaacttggatgcggcgtggtgggtgtcatagataacctctatagggacagaagcctcacaggtcaaaactggctccaaggaaagttttgcagaatgatttcctttccattcttttagaagagctacctttttttttttttttccctgacagggtctggcttgcccaggctggagtgcggtggctagtcacaggtgtaataataggcactgcagtctccaactcctggcctcaagggatcctcacatcttagcctccagaatagctaggagtaggagtagctgggactacaagcatgcacagctgcacttggcttagaagtgctactttatttttatttttgagacagggtcttgtgtcatccagactggagcagtggtgcaattatggctcactgcggcctcgacattccagtctcaagtgatcctctgcctcagcctccggagtagccaggactacaggggtgtgccactagaagtgctactttttaacgaaatggtgactaatgttctggaactttcccattaaccttctgcatttagaaggaattatagatgttgagtgctccagtaaacagtgattctctttatatctgatttttttttttaaacagctaaaatgtaagtatgtatctcagagtcattttgaccattatggaagttgtatctctctgtttcatgtaactaattattaatatatttcatttttagtgtgatgtaatgagagactgtgtgtgtatgttaggtgctcaataaaaactgtatggttagatttaaagaagtggcaaggcaatggaaattctacctgcatttgatctacttccaagtacaccttgaattaagttcttaaacacatcttgaattgctgggaaaagacagaaactaagaagttgacataaagcaagagtcacaaactggcagccacctggccttatcattgttctatttgatttgcaccctggttctctttctttttcccttcctccccaccttcctcccatccattgttgaatctgtggatgcagagcccacggatgtggaggggcaactatatatatgtttttccattatatatataaatgtgtgtgtgtgt

SEQ ID NO: 243399 - DNA, 777 bp, Artificial Sequence
  derived and/or modified sequence
atgactcctccaaagctccgcgccagcctctcgccttcccttctgcttctcctttcgggttgcttactggctgccgctcggcgcgagaaaggcgcagcatctaacgtggcggagccagtaccaggacccactggcgggtccagcggtagatttctctctccagagcagcacgcctgttcctggcagttgctgctgcccgcccctgaagcagcggccggtagtgagttggctcttcgttgccagagccccgatggagctagacaccaatgtgcctaccgtggccacccagagcgatgcgcggcctacgccgcccgtagagcgcacttttggaaacaggtcctgggcggcctgaggaagaagcgtcgcccatgtcacgacccagccccactacaggctcgactgtgtgcaggtaagaaggggcatggagcggagctccgactggtcccccgcgcctctccccctgcaaggccaactgttgcagggttcgctggtgagtcgaaacctagggcccggaatcgtgggcggactagagagcgcgcgtccggacctgccgcgggcaccccgccaccacagtcggcccctcccaaggagaatccatccgagcgcaaaacaaacgaggggaaaaggaaagctgcacttgttccaaatgaagaacgtccaatgggaactggcccagatccggatggcctggatggaaacgccgagctgactgagacctattgcgcggaaaagtggcattcactgtgcaacttcttcgtgaatttttggaacggctag

SEQ ID NO: 243400 - DNA, 777 bp, Artificial Sequence
  derived and/or modified sequence
atgaccccacccaagctgcgggccagcctgagccccagcctgctgctgctgctgagcggctgcctgctggccgccgcccggcgggagaagggggccgccagcaatgtggccgagcctgtgcccggccccaccggcggcagcagcggccgcttcctgagccctgagcagcacgcctgctcctggcagctgctgctgcctgcccctgaggccgccgccggcagcgagctggccctgcgctgccagagcccagatggagcccggcaccagtgtgcctaccggggccaccctgagcgctgtgccgcctatgctgcccggcgggcccacttctggaagcaggtgctgggcggcctgaggaagaagagaagaccctgccacgaccctgcccccctgcaggcccggctgtgtgccggcaagaagggccatggagctgagctgcggctggtgccccgggccagccccccagcccggcccaccgtggccggctttgctggggagagcaagccccgggccaggaacagaggaagaacccgggagcgggccagcggccctgctgctggcaccccaccaccccagagcgccccacccaaggagaaccccagcgagaggaagaccaatgaaggcaagaggaaggccgccctggtgcccaatgaggagcggcccatgggcactggaccagaccctgatggcctggatggaaatgctgagctgacagagacctactgtgccgagaagtggcacagcctgtgcaacttctttgtgaacttctggaatggatag

SEQ ID NO: 243401 - DNA, 777 bp, Artificial Sequence
  derived and/or modified sequence
atgaccccccccaagctgcgggccagcctgagccccagcctgctgttgctgttaagcggatgtctactagctgcggctagacgcgagaaaggcgcagcctcgaatgttgctgagccggttcccggacccactggcggcagctctgggcgcttcctgtctcctgagcagcatgcttgttcatggcaactcctactgccagcgccagaggccgccgctggatcagagttggccctcagatgccagagcccagacggcgctagacatcagtgcgcatacaggggccacccggagcgatgcgccgcgtatgctgcacggagagcacacttctggaagcaggtgcttggcggcctgaggaaaaaaagaaggccttgtcacgaccccgcacctctgcaagccaggctatgtgccggtaaaaagggccacggggcagagctcagactggtgcctcgggctagtccacctgctcgaccgacggtcgccggattcgcaggcgaaagcaaaccaagagcgaggaaccgcgggaggaccagggaacgcgcatctggcccggcagctggtacccccccaccccaatccgcccctccaaaagaaaatcccagcgagcggaaaactaacgagggtaaacggaaggcggccctggtgcctaacgaagagagaccaatgggaaccggccctgatcctgatgggcttgacgggaatgcagaactgaccgagacttattgtgcggaaaagtggcactccctctgcaacttcttcgtcaacttctggaacggatag

SEQ ID NO: 243402 - RNA, 777 nt, Artificial Sequence
  derived and/or modified sequence
augacuccuccuaagcugcgugcaucacucagcccuagcuuacuucuccucuuauccgggugccuguuggcagcugcaagacgggaaaagggagcugcuagcaauguugccgagccugucccgggucccacgggcggcaguucugggcgguuucuaaguccugagcagcacgcaugcaguuggcaacuuuuguugcccgccccggaagccgccgcagguuccgaacuugcccugcgcugccagucuccagauggagcgcgacaccaaugugccuacagaggacacccugaaagaugcgccgcauaugcugccaggcgggcacacuuuuggaaacaggucuugggugggcuucgaaagaagagacguccuugucacgaccccgccccucuucaagccaggcugugugcagggaaaaaaggccacggggcagagcugcgcuugguaccacgcgccagccccccugcuagacccacugucgccggguuugcaggcgagucuaaaccccgcgcccgcaaccgagguaggacccgagagagggcuuccgggcccgcugcggguaccccgcccccacaaucugccccaccuaaggaaaacccaagcgaacgaaaaacgaacgagggcaagcgcaaggcggcccucguccccaacgaagaaagacccaugggaaccggcccugacccagauggucuagacggaaacgccgaauuaaccgagacuuacugcgcugaaaaguggcauucuuuaugcaacuuuuucgucaauuuuuggaaugguuag

SEQ ID NO: 243403 - RNA, 777 nt, Artificial Sequence
  derived and/or modified sequence
augaccccaccgaaacuacgcgccagucucucuccuucccuccuucugcuuuuaucuggaugucugcuugcggcugcaagaagggagaaaggcgccgcaucuaauguagccgaacccguaccagggcccacugguggaaguucugguagauuccuuucucccgaacagcacgccugcuccuggcagcugcuguugcccgcgcccgaggccgcggccggaucugaacucgccuuacgcugccagucccccgauggagcccggcaccaaugugccuaucgcgggcaccccgaaagaugugcagcauacgccgcacgucgagcacacuucuggaagcagguucugggcggacucagaaaaaaaaggagaccaugccacgaccccgcuccccuccaagcucgcuugugcgcaggaaagaagggacacggagccgagcugcgacuggucccccgagcuagcccccccgccaggccuaccgucgcgggcuucgccggagagucgaaaccacgggcaagaaacagagggagaaccagagaacgcgcuuccgguccugccgcugggacuccaccgccacagagcgcacccccuaaggaaaacccuucagaaagaaagacaaacgaaggcaagcgcaaagcggcacuugugccaaacgaagaacgccccaugggaacaggcccugacccagacggacuggacggaaacgcagaacuuaccgagaccuauugugcagaaaaguggcacucccuguguaacuuuuucgugaauuuuuggaaugguuag

SEQ ID NO: 243404 - protein, 318 aa, Artificial Sequence
  derived and/or modified sequence
MMVDPNGNESSATYFILIGLPGLEEAQFWLAFPLCSLYLIAVLGNLTIIYIVRTEHSLHEPMYIFLCMLSGIDILISTSSMPKMLAIFWFNSTTIQFDACLLQMFAIHSLSGMESTVLLAMAFDRYVAICHPLRHATVLTLPRVTKIGVAAVVRGAALMAPLPVFIKQLPFCRSNILSHSYCLHQDVMKLACDDIRVNVVYGLIVIISAIGLDSLLISFSYLLILKTVLGLTREAQAKAFGTCVSHVCAVFIFYVPFIGLSMVHRFSKRRDSPLPVILANIYLLVPPVLNPIVYGVKTKEIRQRILRLFHVATHASEP

SEQ ID NO: 243405 - DNA, 957 bp, Artificial Sequence
  derived and/or modified sequence
atgatggtggaccccaacggcaacgagagcagcgccacctacttcatcctgatcggcctgcccggcctggaggaggcccagttctggctggccttccccctgtgcagcctgtacctgatcgccgtgctgggcaacctgaccatcatctacatcgtgagaaccgagcacagcctgcacgagcccatgtacatcttcctgtgcatgctgagcggcatcgacatcctgatcagcaccagcagcatgcccaagatgctggccatcttctggttcaacagcaccaccatccagttcgacgcctgcctgctgcagatgttcgccatccacagcctgagcggcatggagagcaccgtgctgctggccatggccttcgacagatacgtggccatctgccaccccctgagacacgccaccgtgctgaccctgcccagagtgaccaagatcggcgtggccgccgtggtgagaggcgccgccctgatggcccccctgcccgtgttcatcaagcagctgcccttctgcagaagcaacatcctgagccacagctactgcctgcaccaggacgtgatgaagctggcctgcgacgacatcagagtgaacgtggtgtacggcctgatcgtgatcatcagcgccatcggcctggacagcctgctgatcagcttcagctacctgctgatcctgaagaccgtgctgggcctgaccagagaggcccaggccaaggccttcggcacctgcgtgagccacgtgtgcgccgtgttcatcttctacgtgcccttcatcggcctgagcatggtgcacagattcagcaagagaagagacagccccctgcccgtgatcctggccaacatctacctgctggtgccccccgtgctgaaccccatcgtgtacggcgtgaagaccaaggagatcagacagagaatcctgagactgttccacgtggccacccacgccagcgagccctag

SEQ ID NO: 243406 - DNA, 957 bp, Artificial Sequence
  derived and/or modified sequence
atgatggtagaccccaatggcaacgagtctagcgcaacttactttatcttgatcggactgccagggctggaagaagcgcaattctggcttgccttcccgttatgtagtctctacctgatcgctgtcctcggtaatctgacgatcatatacatcgtgcggacagaacattccttacatgagcctatgtacatctttctctgcatgctgagcggtatcgacattctgatcagcacaagctccatgccaaagatgctcgcgattttttggttcaactctaccactatacaatttgacgcctgccttctgcagatgtttgcaatccactcactgtcaggtatggagagcaccgtgcttctggctatggcatttgaccgctacgtggccatttgccaccctctgcgacatgccaccgttctcactttgccgagggtaaccaagatcggtgttgccgctgtggtcagaggagccgcactaatggctcccctgcctgtgtttatcaaacagttgcctttctgcagatcaaatattctgtctcattcatactgcctgcaccaagacgtaatgaaactggcctgtgatgacataagggtaaatgttgtgtacggtcttatcgtgatcatatccgccatcggactcgatagtcttctgatcagcttctcatacctgctaattctcaagaccgtcctcggtcttaccagggaggcccaggctaaagcctttggcacttgcgtgagccacgtgtgcgcggtcttcatattctatgttccatttattggtttaagcatggtgcataggttctccaagcggcgggactcccccctaccagtaattctggccaatatatacttgctagtacctccagtgctgaacccaattgtctacggcgtgaagactaaagaaatcagacaaagaatacttaggctgtttcatgtagccactcacgcgtccgagccttag

SEQ ID NO: 243407 - DNA, 957 bp, Artificial Sequence
  derived and/or modified sequence
atgatggtggaccccaatggaaatgaatcttctgccacctacttcatcctgattggcctgcccggcctggaggaggcccagttctggctggccttccccctgtgcagcctgtacctgattgctgtgctgggcaacctgaccatcatctacatcgtgaggacagagcacagcctgcacgagcccatgtacatcttcctgtgcatgctgagcggcatcgacatcctgatcagcaccagctccatgcccaagatgctggccatcttctggttcaacagcaccaccatccagtttgatgcctgcctgctgcagatgtttgccatccacagcctgagcggcatggagagcacagtgctgctggccatggcctttgaccgctacgtggccatctgccaccccctgcggcatgccaccgtgctgaccctgccccgggtgaccaagattggagtggccgctgtggtgcggggggccgccctgatggcccccctgcctgtgttcatcaagcagctgcccttctgccgcagcaacatcctgagccacagctactgcctgcaccaggatgtgatgaagctggcctgtgatgacatccgggtgaatgtggtgtatggcctcatcgtcatcatcagcgccatcggcctggacagcctgctgatctccttctcctacctgctgatcctgaagacagtgctgggcctgacccgggaggcccaggccaaggccttcggcacctgtgtgagccacgtgtgtgctgtgttcatcttctacgtgcccttcatcggcctgtccatggtgcaccgcttcagcaagagaagagacagccccctgcctgtgatcctggccaacatctacctgctggtgccccctgtgctgaaccccatcgtgtatggagtgaagaccaaggagatccggcagaggatcctgcggctcttccacgtggccacccacgccagcgagccctag

SEQ ID NO: 243408 - DNA, 957 bp, Artificial Sequence
  derived and/or modified sequence
atgatggtggaccccaacggcaacgagagcagcgccacctacttcattctgattggtctcccaggactggaagaggcccagttctggttggcattccccctatgctctctgtacctgatagcagtgctggggaacttaaccatcatctatatcgtaaggaccgaacatagccttcatgagccgatgtacatttttctgtgtatgttgtctggaatcgacattctcatctctacctcttcaatgccaaagatgcttgccatcttttggtttaacagtacaacaatccagtttgacgcctgcctcctgcagatgtttgcaatccatagcctgtccggaatggaatctacagtcttactggcaatggcctttgatagatacgtagccatttgtcatccactgaggcacgccaccgtcctgactttaccccgtgtgactaaaatcggtgtggccgcggttgtgcggggcgccgctcttatggctccattgccagtctttataaagcaactccctttttgcaggtctaatattctgtcccactcttactgcctgcaccaggatgtaatgaagttagcatgtgatgatatacgtgtgaacgtagtttacgggctcatcgtgatcatttccgcaatcggattagactcactgctgatctcgtttagttatctgctgattcttaaaactgtcctcggcctgacacgagaggctcaagcgaaagccttcgggacatgcgttagccacgtctgcgctgtgttcattttttacgtgccctttatagggttgtccatggtgcaccgattttcaaaaaggagagacagcccactccccgtgattctggccaatatttacctgctcgtgccccctgtgctcaaccctatcgtgtacggagtcaagactaaagaaatcaggcagagaatcctcaggctctttcatgtggcgactcacgcctctgagccgtag

SEQ ID NO: 243409 - DNA, 3612 bp, Artificial Sequence
  derived and/or modified sequence
aattccacgcttagcaaggacctaaacagtgtcccccaaatgagagaagggaggacagaaagaacacttcaggatggaaatgggctgacacttaaccgtggagtgtctctgcaaacttcctttgccattctcctgtttgagtttgataaacctgagaagagacttggataaagaccgtcacgaagactacactaatgagtttcttctagcttttttctactcactttccctatctatccttcacattgggagttggcatgaggatcccagcagcccatcaggggaggactctagagatccctttccccattgcctctcctccccatacccccaggcatatcctcccagggcacggaagctgagaagcagtccagaaccacagtgggctagtgaggggtacctgctgatgtaccctttggacagcattctgccccaccctgcaggaagaagcagaaggagggagagggtgaggcagagaataaataaccctgaccagggaggtccaagggagtaggcggagacagagaggctgtatttcagtgcagcctgccagacctcttctggaggaagactggacaaagggggtcacacattccttccatacggttgagcctctacctgcctggtgctggtcacagttcagcttcttcatgatggtggatcccaatggcaatgaatccagtgctacatacttcatcctaataggcctccctggtttagaagaggctcagttctggttggccttcccattgtgctccctctaccttattgctgtgctaggtaacttgacaatcatctacattgtgcggactgagcacagcctgcatgagcccatgtatatatttctttgcatgctttcaggcattgacatcctcatctccacctcatccatgcccaaaatgctggccatcttctggttcaattccactaccatccagtttgatgcttgtctgctacagatgtttgccatccactccttatctggcatggaatccacagtgctgctggccatggcttttgaccgctatgtggccatctgtcacccactgcgccatgccacagtacttacgttgcctcgtgtcaccaaaattggtgtggctgctgtggtgcggggggctgcactgatggcaccccttcctgtcttcatcaagcagctgcccttctgccgctccaatatcctttcccattcctactgcctacaccaagatgtcatgaagctggcctgtgatgatatccgggtcaatgtcgtctatggccttatcgtcatcatctccgccattggcctggactcacttctcatctccttctcatatctgcttattcttaagactgtgttgggcttgacacgtgaagcccaggccaaggcatttggcacttgcgtctctcatgtgtgtgctgtgttcatattctatgtacctttcattggattgtccatggtgcatcgctttagcaagcggcgtgactctccgctgcccgtcatcttggccaatatctatctgctggttcctcctgtgctcaacccaattgtctatggagtgaagacaaaggagattcgacagcgcatccttcgacttttccatgtggccacacacgcttcagagccctaggtgtcagtgatcaaacttcttttccattcagagtcctctgattcagattttaatgttaacattttggaagacagtattcagaaaaaaaatttccttaataaaaatacaactcagatccttcaaatatgaaactggttggggaatctccattttttcaatattattttcttctttgttttcttgctacatataattattaataccctgactaggttgtggttggagggttattacttttcattttaccatgcagtccaaatctaaactgcttctactgatggtttacagcattctgagataagaatggtacatctagagaacatttgccaaaggcctaagcacggcaaaggaaaataaacacagaatataataaaatgagataatctagcttaaaactataacttcctcttcagaactcccaaccacattggatctcagaaaaatgctgtcttcaaaatgacttctacagagaagaaataatttttcctctggacactagcacttaaggggaagattggaagtaaagccttgaaaagagtacatttacctacgttaatgaaagttgacacactgttctgagagttttcacagcatatggaccctgtttttcctatttaattttcttatcaaccctttaattaggcaaagatattattagtaccctcattgtagccatgggaaaattgatgttcagtggggatcagtgaattaaatggggtcatacaagtataaaaattaaaaaaaaaagacttcatgcccaatctcatatgatgtggaagaactgttagagagaccaacagggtagtgggttagagatttccagagtcttacattttctagaggaggtatttaatttcttctcactcatccagtgttgtatttaggaatttcctggcaacagaactcatggctttaatcccactagctattgcttattgtcctggtccaattgccaattacctgtgtcttggaagaagtgatttctaggttcaccattatggaagattcttattcagaaagtctgcatagggcttatagcaagttatttatttttaaaagttccataggtgattctgataggcagtgaggttagggagccaccagttatgatgggaagtatggaatggcaggtcttgaagataacattggccttttgagtgtgactcgtagctggaaagtgagggaatcttcaggaccatgctttatttggggctttgtgcagtatggaacagggactttgagaccaggaaagcaatctgacttaggcatgggaatcaggcatttttgcttctgaggggctattaccaagggttaataggtttcatcttcaacaggatatgacaacagtgttaaccaagaaactcaaattacaaatactaaaacatgtgatcatatatgtggtaagtttcattttctttttcaatcctcaggttccctgatatggattcctataacatgctttcatccccttttgtaatggatatcatatttggaaatgcctatttaatacttgtatttgctgctggactgtaagcccatgagggcactgtttattattgaatgtcatctctgttcatcattgactgctctttgctcatcattgaatcccccagcaaagtgcctagaacataatagtgcttatgcttgacaccggttatttttcatcaaacctgattccttctgtcctgaacacatagccaggcaattttccagccttctttgagttgggtattattaaattctggccattacttccaatgtgagtggaagtgacatgtgcaatttctatacctggctcataaaaccctcccatgtgcagcctttcatgttgacattaaatgtgacttgggaagctatgtgttacacagagtaaatcaccagaagcctggatttctgaaaaaactgtgcagagccaaacctctgtcatttgcaactcccacttgtatttgtacgaggcagttggataagtgaaaaataaagtactattgtgtcaagtctctgaaaa

SEQ ID NO: 243410 - DNA, 957 bp, Artificial Sequence
  derived and/or modified sequence
atgatggtggacccaaatggtaacgagtcttccgccacgtattttattttgattggactgcctggcctggaggaagcccagttctggctcgccttccccctctgctctctgtatcttattgctgtccttggaaacttaaccattatttacatagttagaaccgaacactctcttcacgagccaatgtatattttcctgtgtatgctgtccggtattgatatcctgatatccacatcctctatgcctaaaatgctggccattttctggtttaactctacgaccatccaattcgacgcctgtcttcttcagatgttcgccatacatagcctgtctggcatggaatctactgtgctgctcgccatggcattcgataggtatgtcgccatttgtcaccccctccggcacgctactgtgttaacactccctcgagtcactaagataggcgtcgccgcagtggtgagaggggcagctcttatggctcctttacctgtcttcattaaacagttacccttttgtcgctctaacatcctgtcccattcctattgtctgcatcaggatgtgatgaagctggcatgtgacgacattcgggttaacgtggtctacggacttattgtgattatttccgcaatcggcttggacagcctgcttatctctttctcttacctgctgatcctaaaaaccgttctggggcttacaagggaggcccaggcgaaagctttcgggacctgcgtttcccatgtctgcgccgtctttattttttacgtacccttcataggcctcagcatggtgcataggttcagcaagaggcgggatagtcctctaccagtgattctcgcgaacatctatcttctggtccccccagtactgaatcctattgtgtatggagtaaaaactaaagagattcgtcaacgcattctcagactgtttcatgtggctacacacgccagtgaaccttag

SEQ ID NO: 243411 - protein, 852 aa, Artificial Sequence
  derived and/or modified sequence
MSGRARVKARGIARSPSATEVGRIQASPLPRSVDLSNNEASSSNGFLGTSRISTNDKYGISSGDAGSTFMERGVKNKQDFMDLSICTREKLAHVRNCKTGSSGIPVKLVTNLFNLDFPQDWQLYQYHVTYIPDLASRRLRIALLYSHSELSNKAKAFDGAILFLSQKLEEKVTELSSETQRGETIKMTITLKRELPSSSPVCIQVFNIIFRKILKKLSMYQIGRNFYNPSEPMEIPQHKLSLWPGFAISVSYFERKLLFSADVSYKVLRNETVLEFMTALCQRTGLSCFTQTCEKQLIGLIVLTRYNNRTYSIDDIDWSVKPTHTFQKRDGTEITYVDYYKQQYDITVSDLNQPMLVSLLKKKRNDNSEAQLAHLIPELCFLTGLTDQATSDFQLMKAVAEKTRLSPSGRQQRLARLVDNIQRNTNARFELETWGLHFGSQISLTGRIVPSEKILMQDHICQPVSAADWSKDIRTCKILNAQSLNTWLILCSDRTEYVAESFLNCLRRVAGSMGFNVDYPKIIKVQENPAAFVRAIQQYVDPDVQLVMCILPSNQKTYYDSIKKYLSSDCPVPSQCVLARTLNKQGMMMSIATKIAMQMTCKLGGELWAVEIPLKSLMVVGIDVCKDALSKDVMVVGCVASVNPRITRWFSRCILQRTMTDVADCLKVFMTGALNKWYKYNHDLPARIIVYRAGVGDGQLKTLIEYEVPQLLSSVAESSSNTSSRLSVIVVRKKCMPRFFTEMNRTVQNPPLGTVVDSEATRNEWYDFYLISQVACRGTVSPTYYNVIYDDNGLKPDHMQRLTFKLCHLYYNWPGIVSVPAPCQYAHKLTFLVAQSIHKEPSLELANHLFYL

SEQ ID NO: 243412 - DNA, 2559 bp, Artificial Sequence
  derived and/or modified sequence
atgagcggtagggccagagtgaaagctaggggtatagcccgatccccaagtgccaccgaagtcggccgcatacaagccagccctctgccacgaagcgtggacctgtcaaacaacgaagcctcaagctcaaacgggttcctgggcacatccagaatcagcacaaacgacaaatatggcatctcttccggcgatgcgggcagtaccttcatggagcgcggggtcaagaataagcaggattttatggatttaagcatttgtacgcgcgaaaaacttgctcacgtgagaaactgtaagactggtagctccggtatccctgttaagctcgtcacaaacctctttaatttagactttcctcaagattggcaactttaccagtatcacgttacctacattcccgatctggcatcccggcggctcagaattgccctgctatacagccacagtgagctttcgaataaggccaaggcatttgacggcgctatcctatttctgtctcagaagctggaggagaaagtgacagaattgtccagtgagacccagaggggggagactattaagatgaccataacactgaaacgggagctccctagttcttccccagtttgtatccaggttttcaacattatcttcaggaaaatattgaagaaactgagcatgtaccagattggccgtaatttctataacccatcagaacccatggagataccccagcataaattgtctctttggcccggcttcgccatttccgtctcttatttcgaacgtaaattactcttcagcgccgacgtctcttataaggtccttcgcaacgagaccgtcctggaatttatgactgcattatgccaacggactgggctatcatgctttactcaaacctgtgaaaaacagctcattggactcattgtgctgactagatacaacaaccggacctactccatagatgacatcgattggtcggtcaaacccacacacacctttcaaaaacgagatggaactgagattacttacgtagattactataagcagcagtatgatatcacagtttccgacctgaatcaaccaatgctggtttccttacttaaaaaaaagaggaatgataattctgaagcacagctggctcacctcatacctgagctctgcttcttaaccggcctgaccgatcaggctactagtgattttcagttgatgaaggctgttgcagagaagacccgcctgagtccgtctggacgccagcaacgtctagcacgtctggtagacaacattcagaggaacactaacgccagattcgagctcgagacatggggtctccatttcgggagccaaatctccctcacagggcgcatcgttcccagtgaaaagatcttgatgcaggaccacatctgccagcccgtttctgccgccgactggagcaaggatatacgtacctgcaagattctgaacgcacagtccttgaacacatggcttatcctgtgttcagatagaacagaatacgtggcagaaagcttcttaaattgtctgaggagggtcgcgggatctatggggtttaatgtggactatccaaagataatcaaggtacaggaaaaccctgctgcatttgtccgcgcaattcagcagtatgtagaccctgacgtgcagctagtgatgtgtatcctcccttccaatcagaagacctactacgactccataaagaaatatctgtcctccgattgccctgttccaagccagtgtgtcctggctcggaccttgaacaagcaggggatgatgatgtctattgccacgaaaattgccatgcagatgacatgcaagctgggtggtgaactatgggccgtcgagataccactgaagtccctgatggtcgtcggcatcgacgtgtgtaaagacgccctgtccaaagatgtcatggtggttggctgcgtagcttcagtgaaccctagaataaccaggtggttcagtagatgtattctccagcggacaatgacagacgtagcagattgcctgaaagtctttatgactggcgccctaaataagtggtataagtataaccacgacttgcccgctcgcatcatcgtctatcgggccggtgtgggagacggacagcttaagaccctgatcgaatacgaggtgccacagcttttgtcttccgtggctgagtccagctcaaatacatcaagccgactaagcgtgatcgtggtcaggaaaaagtgtatgccgcgctttttcacagagatgaatcgtactgtacagaatcctcccctgggcactgtcgtggactctgaagccacccgcaacgagtggtacgacttctaccttatctctcaggtcgcctgtcgcggtacggtctcacccacctattataacgtcatctacgacgataacggactaaagcccgaccacatgcagcgtttgaccttcaaactctgccatttatactacaactggcctggcatcgttagtgtgcccgcaccttgccagtatgcccacaagctcacatttttggtggcccagtctattcacaaggagccttccttagaactggccaatcacctcttctacctgtag

SEQ ID NO: 243413 - DNA, 2559 bp, Artificial Sequence
  derived and/or modified sequence
atgagcggccgggcccgggtgaaggcccggggcatcgcccggagccccagcgccacagaggtgggccgcatccaggccagccccctgcccaggtctgtggacctgagcaacaatgaggccagcagcagcaatggcttcctgggcaccagccgcatcagcaccaatgacaagtatggcatcagcagtggagatgctggcagcaccttcatggagcggggcgtgaagaacaagcaggacttcatggacctgagcatctgcacccgggagaagctggcccacgtgaggaactgcaagacaggcagcagcggcatccctgtgaagctggtgaccaacctcttcaacctggacttcccccaggactggcagctgtaccagtaccacgtgacctacatcccagacctggccagccggcggctgagaattgccctgctgtacagccacagcgagctgagcaacaaggccaaggcctttgatggagccatcctcttcctgagccagaagctggaggagaaggtgacagagctgagcagcgagacccagagaggagagaccatcaagatgaccatcaccctgaagcgggagctgcccagcagcagccctgtgtgcatccaggtgttcaacatcatcttcaggaagatcctgaagaagctgtccatgtaccagatcggcaggaacttctacaaccccagcgagcccatggagatcccccagcacaagctgagcctgtggccaggctttgccatctctgtgtcctactttgagaggaagctgctcttcagcgcagatgtgtcctacaaggtgctgagaaatgagaccgtgctggagttcatgacagccctgtgccagaggacaggcctgagctgcttcacccagacctgtgagaagcagctgattggcctgattgtgctgacccgctacaacaacagaacctacagcattgatgacatcgactggagcgtgaagcccacccacaccttccagaagagagatggaacagagatcacctacgtggactactacaagcagcagtatgacatcaccgtgtctgacctgaaccagcccatgctggtgtccctgctgaagaagaagagaaatgacaacagcgaggcccagctggcccacctgatccctgagctgtgcttcctgaccggcctgacagaccaggccaccagtgacttccagctgatgaaggctgtggccgagaagacccggctgagccccagcggccggcagcagaggctggcccggctggtggacaacatccagaggaacaccaatgccaggtttgagctggagacctggggcctgcacttcggcagccagatcagcctgaccggccgcatcgtgcccagcgagaagatcctgatgcaggaccacatctgccagcctgtgtctgctgctgactggagcaaggacatccgcacctgcaagatcctgaatgcccagagcctgaacacctggctgatcctgtgcagcgacagaacagaatatgtggccgagagcttcctgaactgcctgcggcgggtggccggctccatgggcttcaacgtggactaccccaagatcatcaaggtgcaggagaacccagctgcctttgtgcgggccatccagcagtatgtggaccctgatgtgcagctggtgatgtgcatcctgcccagcaaccagaagacctactatgacagcatcaagaagtacctgagcagtgactgccctgtgcccagccagtgtgtgctggcccggaccctgaacaagcagggcatgatgatgagcatcgccaccaagatcgccatgcagatgacctgcaagctgggcggggagctgtgggccgtggagatccccctgaagagcctgatggtggtgggcattgatgtgtgcaaggatgccctgagcaaggatgtgatggtggtgggctgtgtggcctctgtgaacccccgcatcacccgctggttcagccgctgcatcctgcagaggaccatgacagatgtggccgactgcctgaaggtgttcatgactggagccctgaacaagtggtacaagtacaaccacgacctgcctgcccgcatcatcgtgtacagagctggggtgggagatggccagctgaagaccctcatcgagtatgaggtgccccagctgctgagctctgtggccgagagcagcagcaacaccagcagccggctgtctgtgattgtggtgaggaagaagtgcatgccccgcttcttcacagagatgaacagaacagtgcagaacccccccctgggcaccgtggtggacagcgaggccaccagaaatgagtggtatgacttctacctgatcagccaggtggcctgccggggcaccgtgagccccacctactacaacgtcatctatgatgacaatggcctgaagccagaccacatgcagaggctgaccttcaagctgtgccacctgtactacaactggccaggcatcgtgtctgtgcctgccccctgccagtatgcccacaagctgaccttcctggtggcccagagcatccacaaggagcccagcctggagctggccaaccacctgttctacctgtag

SEQ ID NO: 243414 - DNA, 2559 bp, Artificial Sequence
  derived and/or modified sequence
atgagcggccgggcccgggtgaaggcccggggcatcgcccggagcccaagtgccacagaggttgggcgtattcaggccagccctttaccaagatctgtcgacctgtctaacaacgaggctagttcttctaatggtttccttggcacgtctcgcatcagtacaaatgataagtacgggatcagcagcggtgacgctggctcaacgtttatggagaggggcgtcaagaacaagcaggacttcatggatctgtcaatttgtacccgcgaaaaactggctcacgtaaggaattgtaaaactgggagttctgggattcctgtgaaactcgtcactaacctgttcaatttggacttcccacaagactggcaactgtaccagtaccatgtaacttatattccagacttagcctcccgccgcctccgaattgcacttctttactcccactccgaactatctaataaggctaaagctttcgacggcgcaattctcttcctcagccaaaagcttgaggagaaagtgacagaactgtcttcagaaactcagcggggcgagacaataaaaatgacaatcaccctgaagagggaactgccatccagcagtcccgtttgtatccaagtctttaacattatctttcgcaaaatcttgaagaagctgtcgatgtatcagataggaaggaacttttataatccctccgaaccaatggaaattcctcagcacaagttaagcctctggccaggcttcgcaatttccgtgagttattttgaaaggaagctattgttcagcgcagatgttagttacaaggtgttgagaaacgagaccgttctagaatttatgaccgcactgtgccagaggacgggccttagctgttttacacaaacgtgcgaaaagcagctaatcgggctcattgtcttgaccaggtataataatcggacttattccatcgacgacatagactggagcgtgaaaccaactcatacattccagaaaagagatggcaccgagattacatacgtggactattacaagcagcagtatgatatcactgtctccgacctaaatcagccaatgctggtctccctacttaaaaaaaaacgtaacgacaatagtgaggcgcaattggctcacctcatccccgagctgtgtttcctaacaggcctgactgatcaggccacttccgatttccagctgatgaaagctgtggccgaaaaaacacggctgtccccatctggcagacaacagcggttagctaggctggtagacaacatccagcggaacacaaatgcccgtttcgagcttgagacttggggtcttcactttggatcacagatttccctgacgggccgcatcgtgccaagtgaaaagattcttatgcaggaccacatctgccaacccgtttccgctgcagactggtccaaagacattaggacctgtaaaatcctcaacgcccagtcattgaatacttggctgatactttgctccgaccgaaccgaatacgtcgccgaatcgttccttaactgtttgagaagggtggcagggtcaatgggcttcaacgtcgattacccaaaaatcattaaagtgcaagaaaacccagccgctttcgtgagggcgatacaacagtacgtagaccccgacgtgcagctcgtcatgtgcattctcccgagtaatcagaaaacttactatgactctataaaaaagtatctttcttccgattgtccagtaccaagtcaatgcgtcctcgctcgcacgttaaataagcagggcatgatgatgtctatagctacgaaaatagctatgcaaatgacatgtaaacttggaggcgagctctgggcggtagaaattccgctcaaaagcctgatggttgtcggcattgacgtgtgcaaagacgcactcagcaaggacgtgatggtggtgggatgtgtcgctagcgtcaatcctcgcatcacacgatggttttcccggtgtatcctacagagaactatgaccgacgtggcagactgcttgaaagtgtttatgactggggcactcaataaatggtacaaatataatcacgatctgcccgccaggatcatcgtgtaccgggccggcgtaggggatggacaactcaagacgctgattgaatatgaggtgccccagctgctcagttctgttgcagaatcctccagcaatacgagttccagactttccgtgattgtggtgcggaaaaagtgcatgcctaggttcttcacagaaatgaatcgaaccgttcagaatccccccctcggcaccgtggtcgactccgaagccacgcgcaatgaatggtacgatttctacctgatcagtcaagttgcttgccgagggactgtgtcccctacctattataacgtaatttacgacgataatgggttgaagcccgatcacatgcagagactcacttttaaactctgtcacctctattataactggccaggcattgtttcagtaccggctccatgtcagtacgcgcacaaactgacttttctggtggcgcagagtatccataaggagccaagcctggagttggctaatcacctcttttacttgtag

SEQ ID NO: 243415 - DNA, 2559 bp, Artificial Sequence
  derived and/or modified sequence
atgtctggaagggccagagtcaaagccaggggcattgctcgcagcccttcagctacggaggtgggtaggatccaggcaagtccactgcctcggtcagtggacctatccaacaatgaggcgagctcgtctaacgggtttctcggcacatctcggatttccactaacgataagtacggaatcagcagcggcgatgcaggctcaacattcatggaacggggtgtgaaaaataagcaagatttcatggatctgagcatctgtacgagagaaaaactcgcccatgtacgcaactgcaaaactggttcttctgggatcccagtgaagctcgtgaccaatttattcaatctggacttccctcaggactggcagctgtatcagtaccacgtcacgtacattccagatctggccagccgccgattaagaattgcattgctttatagtcacagtgaattgtcaaacaaggcaaaggcttttgacggggcaatcttgttccttagccagaagctggaggagaaagtcaccgaattgtcttctgaaacacagcggggtgagacaataaagatgaccataactctgaagcgcgagctaccctcgagttcacccgtatgcatccaggtgtttaatatcatctttagaaaaatcttgaagaagctgagcatgtaccagataggcaggaacttctataatccctctgagccaatggagataccccagcacaagctgtctctgtggcccggatttgcaattagcgtttcatacttcgagcgcaagctgttgtttagcgccgatgtatcttacaaggtgctgagaaatgaaaccgtgttggaatttatgactgcactgtgccagcggaccggactatcctgctttacccaaacttgtgagaagcagctgatcgggttaatcgtcctgacccggtacaacaatagaacctactcaatcgatgatattgactggtcagtgaaacccacccacacatttcagaagagggatgggacagaaatcacatatgtcgactattataagcaacaatatgacatcaccgtgagtgacctgaaccagccgatgcttgtgagccttttaaagaagaaacggaatgataattcagaggcccagctcgcccacttaattcctgaattatgttttctgacaggactcacagaccaggccacttcggacttccagttaatgaaagccgtcgctgagaaaactcgcctgtcccccagcggccgacagcagaggctggccagactcgtggataacattcaaaggaacacgaacgcccgattcgaactggaaacttggggtctccacttcggcagccagatcagtctgacaggcagaatagtcccatctgagaaaatcctcatgcaggaccacatctgccagccagtaagtgctgcagattggtccaaagacatcagaacctgtaaaatcctgaacgctcaatcccttaatacctggctgatcctatgctcggaccggaccgagtatgtggcagagtctttcctgaactgtctgaggcgagttgcagggtccatgggctttaacgtggattaccccaagattattaaggttcaagaaaaccctgctgctttcgttcgcgctattcagcaatacgtggatcctgacgtgcagctggttatgtgcatcttaccttccaatcagaaaacttactacgacagcataaagaagtacctgagtagcgattgcccagttccttcccagtgtgttctggccaggacactcaacaaacagggcatgatgatgtccattgccacaaaaatcgccatgcaaatgacctgtaaactgggcggtgagctttgggccgtcgaaattccattgaaatcactcatggtggtgggcatcgacgtctgcaaagacgctctgagcaaagatgtcatggtggtaggttgtgtagcctcggtgaacccccgtatcacacgctggttttcccggtgtatcctgcagcgtactatgactgatgtggcagactgcttaaaggtatttatgacaggcgctctaaacaagtggtataagtacaatcacgatctgccagcacgaataattgtgtaccgagcaggagtgggggacggccaactaaaaacccttattgagtacgaggtcccacaacttctatcctccgtggctgaaagcagctcaaacaccagttctcgcctaagtgtgatagtggtgagaaaaaagtgtatgccccgattcttcaccgagatgaaccgcactgtgcagaaccctcccctaggcaccgtggtggacagtgaagcaacacgcaacgaatggtacgatttttacttgatctcacaggtggcttgtaggggcaccgtttcaccgacctattacaacgttatctatgacgacaacggtttaaagcctgaccacatgcagcgtctgacgtttaaactgtgtcatctctactataattggccaggtatagtgagcgtgccggctccttgtcagtacgctcacaagctgaccttcctggtggcacagtccattcacaaggagccatcgctggaactggcaaaccatcttttttatttatag

SEQ ID NO: 243416 - DNA, 3199 bp, Artificial Sequence
  derived and/or modified sequence
gtgctcgcgccaacccctacgccccagcgcgccttctccacccacgcacgggcctcggacgcatttccagccccggcgttggttgtggatgctggacatccaccgcctccaggcagtttcgccgtcacaccgtcgccatctgtagccaaagcaaaacatatcctaactgagactttgcagctcttgtggccactctgggctcaccgggaacatgagtggaagagcccgagtgaaggccagaggcatcgcccgcagccccagtgccacagaagtggggcgcatccaagcctcgccattgcctagatctgttgatcttagtaacaatgaagcatcctctagcaatggcttcttgggaacaagcaggatctcaaccaacgataaatatgggatatcttctggtgatgctggaagtaccttcatggaaagaggtgtgaaaaacaaacaggactttatggatttgagtatctgtaccagagaaaaattggcacatgtgagaaattgtaaaacaggttccagtggaatacctgtgaaactggttacaaacctctttaacttagattttccccaagactggcagctataccagtaccatgtgacatatattccagatttagcatctagaaggctgagaattgctttactttatagtcatagtgaactttccaacaaagcaaaagcattcgacggtgccatcctttttctgtcacaaaagctagaagaaaaggtcacagagttgtcaagtgaaactcaaagaggtgagactataaagatgactatcaccctgaagagggagctgccatcaagttctcccgtgtgcatccaggtcttcaatatcatcttcagaaagatcctcaaaaagttgtccatgtaccaaattggacggaacttctataatccttcagagccaatggaaattccccagcacaaattatccctttggcctgggtttgccatttctgtgtcatattttgaaaggaagctcctgtttagtgctgatgtgagttacaaagtcctccggaatgagacggttctggaattcatgactgctctctgtcaaagaactggcttgtcctgtttcacccagacgtgtgagaagcagctaatagggctcattgtccttacaagatacaataacagaacctactccattgatgacattgactggtcagtgaagcccacacacacctttcagaagcgggatggcaccgagatcacctatgtggattactacaagcagcagtatgatattactgtatcggacctgaatcagcccatgcttgttagtctgttaaagaagaagagaaatgacaacagtgaggctcagctcgcccacctgatacctgagctctgctttctaacagggctgactgaccaggcaacatctgatttccagctgatgaaggctgtggctgaaaagacacgtctcagtccttcaggccggcagcagcgcctggccaggcttgtggacaacatccagaggaataccaatgctcgctttgaactagagacctggggactgcattttggaagccagatatctctgactggccggattgtgccttcagaaaaaatattaatgcaagaccacatatgtcaacctgtgtctgctgctgactggtccaaggatattcgaacttgcaagattttaaatgcacagtctttgaatacctggttgattttatgtagcgacagaactgaatatgttgccgagagctttctgaactgcttgagaagagttgcaggttccatgggatttaatgtggactaccccaaaatcataaaagtacaagaaaatccagctgcatttgttagagctatacagcaatatgttgatcctgatgttcagctggtaatgtgcattctgccttctaatcagaagacctattatgattccattaaaaaatatttgagctcagactgcccagtcccaagccaatgtgtgcttgctcggaccttgaataaacagggcatgatgatgagtatcgccaccaagatcgctatgcagatgacttgcaagctcggaggcgagctgtgggctgtggaaatacctttaaagtccctgatggtggtcggtattgatgtctgtaaagatgcactcagcaaggacgtgatggttgttggatgcgtggccagtgttaaccccagaatcaccaggtggttttcccgctgtatccttcagagaacaatgactgatgttgcagattgcttgaaagttttcatgactggagcactcaacaaatggtacaagtacaatcatgatttgccagcacggataattgtgtaccgtgctggtgtaggggatggtcagctgaaaacacttattgaatatgaagtcccacagctgctgagcagtgtggcagaatccagctcaaataccagctcaagactgtcggtgattgtggtcaggaagaagtgcatgccacgattctttaccgaaatgaaccgcactgtacagaaccccccacttggcactgttgtggattcagaagcaacacgtaacgaatggtatgacttttatctgatcagccaggtggcctgccggggaactgttagtcctacctactataatgtcatctatgatgacaacggcttgaagcccgaccatatgcagagacttacattcaaattgtgccacctgtactacaactggccgggcatagtcagtgtcccagcaccatgtcagtatgctcacaagctgacctttctggtggcacaaagcattcataaagaacccagtctggaattagccaaccatctcttctacctgtgatggcatgaactactggcatcactagatggacaatccaagaagaaattggtatactttgtgcaaatctgccataagctcaaggctgtgactggggaaaaagattgagcttagttttcatgtctaggaaaaaaagcaaaacaacttaatctgaaacagttttaaaaaatgtgtgttattttgttttaaagagttgtatgcttggggtaaattttcattgtcatatgtggaatttaaatataccatcatctacaaagaattccacagagttaaatatcttaagttaaacacttaaaataagtgtttgcgtgatattttgatgacagataaacagagtctaattcccaccccaaattttgctgaggttttcttaatgttgtagagcattttgtagagtggtttaaatagttgaaaataaagttcagaacatca

SEQ ID NO: 243417 - DNA, 2559 bp, Artificial Sequence
  derived and/or modified sequence
atgagcggcagagccagagtgaaggccagaggcatcgccagaagccccagcgccaccgaggtgggcagaatccaggccagccccctgcccagaagcgtggacctgagcaacaacgaggccagcagcagcaacggcttcctgggcaccagcagaatcagcaccaacgacaagtacggcatcagcagcggcgacgccggcagcaccttcatggagagaggcgtgaagaacaagcaggacttcatggacctgagcatctgcaccagagagaagctggcccacgtgagaaactgcaagaccggcagcagcggcatccccgtgaagctggtgaccaacctgttcaacctggacttcccccaggactggcagctgtaccagtaccacgtgacctacatccccgacctggccagcagaagactgagaatcgccctgctgtacagccacagcgagctgagcaacaaggccaaggccttcgacggcgccatcctgttcctgagccagaagctggaggagaaggtgaccgagctgagcagcgagacccagagaggcgagaccatcaagatgaccatcaccctgaagagagagctgcccagcagcagccccgtgtgcatccaggtgttcaacatcatcttcagaaagatcctgaagaagctgagcatgtaccagatcggcagaaacttctacaaccccagcgagcccatggagatcccccagcacaagctgagcctgtggcccggcttcgccatcagcgtgagctacttcgagagaaagctgctgttcagcgccgacgtgagctacaaggtgctgagaaacgagaccgtgctggagttcatgaccgccctgtgccagagaaccggcctgagctgcttcacccagacctgcgagaagcagctgatcggcctgatcgtgctgaccagatacaacaacagaacctacagcatcgacgacatcgactggagcgtgaagcccacccacaccttccagaagagagacggcaccgagatcacctacgtggactactacaagcagcagtacgacatcaccgtgagcgacctgaaccagcccatgctggtgagcctgctgaagaagaagagaaacgacaacagcgaggcccagctggcccacctgatccccgagctgtgcttcctgaccggcctgaccgaccaggccaccagcgacttccagctgatgaaggccgtggccgagaagaccagactgagccccagcggcagacagcagagactggccagactggtggacaacatccagagaaacaccaacgccagattcgagctggagacctggggcctgcacttcggcagccagatcagcctgaccggcagaatcgtgcccagcgagaagatcctgatgcaggaccacatctgccagcccgtgagcgccgccgactggagcaaggacatcagaacctgcaagatcctgaacgcccagagcctgaacacctggctgatcctgtgcagcgacagaaccgagtacgtggccgagagcttcctgaactgcctgagaagagtggccggcagcatgggcttcaacgtggactaccccaagatcatcaaggtgcaggagaaccccgccgccttcgtgagagccatccagcagtacgtggaccccgacgtgcagctggtgatgtgcatcctgcccagcaaccagaagacctactacgacagcatcaagaagtacctgagcagcgactgccccgtgcccagccagtgcgtgctggccagaaccctgaacaagcagggcatgatgatgagcatcgccaccaagatcgccatgcagatgacctgcaagctgggcggcgagctgtgggccgtggagatccccctgaagagcctgatggtggtgggcatcgacgtgtgcaaggacgccctgagcaaggacgtgatggtggtgggctgcgtggccagcgtgaaccccagaatcaccagatggttcagcagatgcatcctgcagagaaccatgaccgacgtggccgactgcctgaaggtgttcatgaccggcgccctgaacaagtggtacaagtacaaccacgacctgcccgccagaatcatcgtgtacagagccggcgtgggcgacggccagctgaagaccctgatcgagtacgaggtgccccagctgctgagcagcgtggccgagagcagcagcaacaccagcagcagactgagcgtgatcgtggtgagaaagaagtgcatgcccagattcttcaccgagatgaacagaaccgtgcagaacccccccctgggcaccgtggtggacagcgaggccaccagaaacgagtggtacgacttctacctgatcagccaggtggcctgcagaggcaccgtgagccccacctactacaacgtgatctacgacgacaacggcctgaagcccgaccacatgcagagactgaccttcaagctgtgccacctgtactacaactggcccggcatcgtgagcgtgcccgccccctgccagtacgcccacaagctgaccttcctggtggcccagagcatccacaaggagcccagcctggagctggccaaccacctgttctacctgtag

SEQ ID NO: 243418 - protein, 874 aa, Artificial Sequence
  derived and/or modified sequence
MGLPTLEFSDSYLDSPDFRERLQCHEIELERTNKFIKELIKDGSLLIGALRNLSMAVQKFSQSLQDFQFECIGDAETDDEISIAQSLKEFARLLIAVEEERRRLIQNANDVLIAPLEKFRKEQIGAAKDGKKKFDKESEKYYSILEKHLNLSAKKKESHLQEADTQIDREHQNFYEASLEYVFKIQEVQEKKKFEFVEPLLSFLQGLFTFYHEGYELAQEFAPYKQQLQFNLQNTRNNFESTRQEVERLMQRMKSANQDYRPPSQWTMEGYLYVQEKRPLGFTWIKHYCTYDKGSKTFTMSVSEMKSSGKMNGLVTSSPEMFKLKSCIRRKTDSIDKRFCFDIEVVERHGIITLQAFSEANRKLWLEAMDGKEPIYTLPAIISKKEEMYLNEAGFNFVRKCIQAVETRGITILGLYRIGGVNSKVQKLMNTTFSPKSPPDIDIDIELWDNKTITSGLKNYLRCLAEPLMTYKLHKDFIIAVKSDDQNYRVEAVHALVHKLPEKNREMLDILIKHLVKVSLHSQQNLMTVSNLGVIFGPTLMRAQEETVAAMMNIKFQNIVVEILIEHYEKIFHTAPDPSIPLPQPQSRSGSRRTRAICLSTGSRKPRGRYTPCLAEPDSDSYSSSPDSTPMGSIESLSSHSSEQNSTTKSASCQPREKSGGIPWIATPSSSNGQKSLGLWTTSPESSSREDATKTDAESDCQSVASVTSPGDVSPPIDLVKKEPYGLSGLKRASASSLRSISAAEGNKSYSGSIQSLTSVGSKETPKASPNPDLPPKMCRRLRLDTASSNGYQRPGSVVAAKAQLFENVGSPKPVSSGRQAKAMYSCKAEHSHELSFPQGAIFSNVYPSVEPGWLKATYEGKTGLVPENYVVFL

SEQ ID NO: 243419 - DNA, 2625 bp, Artificial Sequence
  derived and/or modified sequence
atgggcctgcccaccctggagttcagcgacagctacctggacagccccgacttcagagagagactgcagtgccacgagatcgagctggagagaaccaacaagttcatcaaggagctgatcaaggacggcagcctgctgatcggcgccctgagaaacctgagcatggccgtgcagaagttcagccagagcctgcaggacttccagttcgagtgcatcggcgacgccgagaccgacgacgagatcagcatcgcccagagcctgaaggagttcgccagactgctgatcgccgtggaggaggagagaagaagactgatccagaacgccaacgacgtgctgatcgcccccctggagaagttcagaaaggagcagatcggcgccgccaaggacggcaagaagaagttcgacaaggagagcgagaagtactacagcatcctggagaagcacctgaacctgagcgccaagaagaaggagagccacctgcaggaggccgacacccagatcgacagagagcaccagaacttctacgaggccagcctggagtacgtgttcaagatccaggaggtgcaggagaagaagaagttcgagttcgtggagcccctgctgagcttcctgcagggcctgttcaccttctaccacgagggctacgagctggcccaggagttcgccccctacaagcagcagctgcagttcaacctgcagaacaccagaaacaacttcgagagcaccagacaggaggtggagagactgatgcagagaatgaagagcgccaaccaggactacagaccccccagccagtggaccatggagggctacctgtacgtgcaggagaagagacccctgggcttcacctggatcaagcactactgcacctacgacaagggcagcaagaccttcaccatgagcgtgagcgagatgaagagcagcggcaagatgaacggcctggtgaccagcagccccgagatgttcaagctgaagagctgcatcagaagaaagaccgacagcatcgacaagagattctgcttcgacatcgaggtggtggagagacacggcatcatcaccctgcaggccttcagcgaggccaacagaaagctgtggctggaggccatggacggcaaggagcccatctacaccctgcccgccatcatcagcaagaaggaggagatgtacctgaacgaggccggcttcaacttcgtgagaaagtgcatccaggccgtggagaccagaggcatcaccatcctgggcctgtacagaatcggcggcgtgaacagcaaggtgcagaagctgatgaacaccaccttcagccccaagagcccccccgacatcgacatcgacatcgagctgtgggacaacaagaccatcaccagcggcctgaagaactacctgagatgcctggccgagcccctgatgacctacaagctgcacaaggacttcatcatcgccgtgaagagcgacgaccagaactacagagtggaggccgtgcacgccctggtgcacaagctgcccgagaagaacagagagatgctggacatcctgatcaagcacctggtgaaggtgagcctgcacagccagcagaacctgatgaccgtgagcaacctgggcgtgatcttcggccccaccctgatgagagcccaggaggagaccgtggccgccatgatgaacatcaagttccagaacatcgtggtggagatcctgatcgagcactacgagaagatcttccacaccgcccccgaccccagcatccccctgccccagccccagagcagaagcggcagcagaagaaccagagccatctgcctgagcaccggcagcagaaagcccagaggcagatacaccccctgcctggccgagcccgacagcgacagctacagcagcagccccgacagcacccccatgggcagcatcgagagcctgagcagccacagcagcgagcagaacagcaccaccaagagcgccagctgccagcccagagagaagagcggcggcatcccctggatcgccacccccagcagcagcaacggccagaagagcctgggcctgtggaccaccagccccgagagcagcagcagagaggacgccaccaagaccgacgccgagagcgactgccagagcgtggccagcgtgaccagccccggcgacgtgagcccccccatcgacctggtgaagaaggagccctacggcctgagcggcctgaagagagccagcgccagcagcctgagaagcatcagcgccgccgagggcaacaagagctacagcggcagcatccagagcctgaccagcgtgggcagcaaggagacccccaaggccagccccaaccccgacctgccccccaagatgtgcagaagactgagactggacaccgccagcagcaacggctaccagagacccggcagcgtggtggccgccaaggcccagctgttcgagaacgtgggcagccccaagcccgtgagcagcggcagacaggccaaggccatgtacagctgcaaggccgagcacagccacgagctgagcttcccccagggcgccatcttcagcaacgtgtaccccagcgtggagcccggctggctgaaggccacctacgagggcaagaccggcctggtgcccgagaactacgtggtgttcctgtag

SEQ ID NO: 243420 - DNA, 2625 bp, Artificial Sequence
  derived and/or modified sequence
atgggtctccctacccttgaattctcggatagttaccttgactcccctgactttcgagagcgcctgcagtgtcatgagattgaactggagagaaccaataaattcatcaaggaattgatcaaagatggctccttattaattggcgctctgcggaatttgagcatggccgttcagaaattttctcaatccctccaggatttccaattcgaatgcattggagatgctgagaccgacgatgaaatctctatcgcacagagcctgaaagagtttgctcggttgttgatcgccgtcgaagaagaaagaagaagactgattcagaatgcaaatgacgtgcttatagcccccctggagaagttcaggaaagagcagatcggcgctgcgaaagatggaaagaagaagtttgacaaagagtccgaaaaatattacagtattctcgaaaaacacttgaatctgtcggccaaaaaaaaagagtcacacctgcaggaggctgacacccagatcgaccgcgaacatcaaaatttttacgaggcatctttggaatatgttttcaaaatccaagaagtgcaggaaaagaaaaagtttgagttcgttgaacccctgttgagctttctgcagggactatttactttctatcacgagggctacgaactggcacaggaatttgcaccttacaaacagcagcttcagtttaacctgcagaatacacgcaacaattttgaaagcacaagacaggaggtggagcggcttatgcaaagaatgaagagtgctaatcaggactataggcccccatctcaatggaccatggagggctatctttacgtgcaggagaagcgcccattgggcttcacgtggatcaagcactactgcacctatgacaaaggctcaaaaaccttcacaatgtcagtttcggagatgaaatcatcaggcaagatgaatggcttggtaacatcatctccagagatgttcaagctcaagagctgcatcaggcggaaaaccgactccatcgacaagagattctgcttcgacatagaagtcgtggagagacatggcatcataaccctacaggcctttagcgaggcaaatcgcaagctatggctagaagccatggacggcaaggaaccaatctatacccttccagctatcatcagcaagaaagaagaaatgtacctgaatgaggctggcttcaatttcgtacggaaatgtattcaggccgtggagacacgcggaatcactatactcggattgtaccggatcgggggggtcaactctaaggtccagaagctgatgaacaccactttcagcccgaagtcgccacccgatatcgacattgacatagaactgtgggataacaagactatcacctcagggctaaagaactacctgcggtgtctggctgagcctctcatgacatataagctgcataaggactttatcatcgctgttaagtctgacgaccagaactatcgtgttgaggccgtccatgctttggtacacaagctccctgagaaaaacagggagatgctggatatccttattaagcatctagtcaaggtgtctttacactctcagcaaaaccttatgactgtgtccaatctgggtgttattttcgggccaaccctgatgagagcccaggaagaaactgttgctgcaatgatgaacataaaattccagaacatcgtagtggagatacttatcgaacactatgaaaagatttttcatacagccccggatccatccattcccctgccacagccacagtccagatctgggtccagaagaaccagggccatctgtctttctactggcagcagaaagccgaggggacgttatacgccttgtctcgctgagcctgacagcgacagctattctagctcgccggactcgacccctatgggcagtattgaaagtttgagctctcactcaagcgaacagaactcgaccacaaagtctgcatcttgtcagccacgggagaagagcggcgggattccttggatcgcaacaccttcatcttccaatggacagaagagcttagggctttggaccacatctcctgagtcaagctctcgcgaagatgcaacaaagacagatgcagaaagcgattgtcagtcagtcgcaagcgtaacgagtccgggggacgttagcccacctatcgatcttgtgaaaaaggagccctacggacttagcggtttgaagcgggccagtgctagcagccttcgatccatcagcgctgctgagggaaataagagttactctggtagcatccaatccctgacctctgttggctccaaggaaacacccaaggcatcccccaatccagacttgccccctaagatgtgtcggcgcttgagactggataccgcatcgagcaatggctaccaacggccaggatccgtagtggcagccaaggcacaactgtttgaaaatgtaggttcccccaagcctgtgtccagcggacggcaggcgaaggcaatgtactcctgcaaagctgaacatagccatgaactgtcattcccacagggggcaattttctctaatgtgtaccctagtgtggaacctggttggctcaaagccacttacgagggcaaaacaggactggtgcccgaaaactatgtggtgtttctctag

SEQ ID NO: 243421 - DNA, 2625 bp, Artificial Sequence
  derived and/or modified sequence
atgggcctgcccaccctggagttcagtgacagctacctggacagcccagacttccgggagcggctgcagtgccatgaaattgagctggagaggaccaacaagttcatcaaggagctgatcaaggatggcagcctgctgattggagccctgaggaacctgtccatggctgtgcagaagttcagccagagcctgcaggacttccagtttgagtgcattggagatgctgagacagatgatgagatcagcatcgcccagagcctgaaggagtttgcccggctgctgattgctgtggaggaggagcggcggcggctcatccagaatgccaatgatgtgctgattgcccccctggagaagttcaggaaggagcagatcggggccgccaaggatggcaagaagaagtttgacaaggagagcgagaagtactacagcatcctggagaagcacctgaacctgagcgccaagaagaaggagagccacctgcaggaggccgacacccagattgaccgggagcaccagaacttctatgaggccagcctggagtatgtgttcaagatccaggaggtgcaggagaagaagaagtttgaatttgtggagcccctgctgtccttcctgcagggcctcttcaccttctaccacgagggctatgagctggcccaggagtttgccccctacaagcagcagctgcagttcaacctgcagaacaccaggaacaactttgagagcacccggcaggaggtggagcggctgatgcagaggatgaagagcgccaaccaggactaccggccccccagccagtggaccatggagggctacctgtatgtgcaggagaagaggcccctgggcttcacctggatcaagcactactgcacctatgacaagggcagcaagaccttcaccatgtctgtgtctgagatgaagagcagcggcaagatgaatggcctggtgaccagcagccctgagatgttcaagctgaagagctgcatccggaggaagacagacagcattgacaagcgcttctgctttgatattgaggtggtggagagacatggcatcatcaccctgcaggccttcagcgaggccaacaggaagctgtggctggaggccatggatggcaaggagcccatctacaccctgcctgccatcatcagcaagaaggaggagatgtacctgaatgaagctggcttcaactttgtgaggaagtgcatccaggccgtggagacccggggcatcaccatcctgggcctgtaccgcatcggcggcgtgaacagcaaggtgcagaagctgatgaacaccaccttcagccccaagagccccccagacattgatattgatattgagctgtgggacaacaagaccatcaccagcggcctgaagaactacctgcgctgcctggccgagcccctgatgacctacaagctgcacaaggacttcatcatcgctgtgaagagtgatgaccagaactacagagtggaggccgtgcacgccctggtgcacaagctgcctgagaagaaccgggagatgctggacatcctgatcaagcacctggtgaaggtgtccctgcacagccagcagaacctgatgacagtgagcaacctgggcgtcatcttcggccccaccctgatgagggcccaggaggagaccgtggccgccatgatgaacatcaagttccagaacatcgtggtggagatcctgattgagcactatgagaagatcttccacacagccccagaccccagcatccccctgccccagccccagagccgcagcggcagcaggaggacccgggccatctgcctgagcacaggcagcaggaagccccggggccgctacaccccctgcctggccgagccagacagcgacagctacagcagcagcccagacagcacccccatgggcagcattgagagcctgagcagccacagcagcgagcagaacagcaccaccaagagcgccagctgccagccccgggagaagagcggcggcatcccctggatcgccacccccagcagcagcaatggccagaagagcctgggcctgtggaccaccagccctgagagcagcagccgggaggatgccaccaagacagatgctgagagtgactgccagagcgtggcctctgtgaccagccctggagatgtgtccccacccatcgacctggtgaagaaggagccctacggcctgagcggcctgaagagggccagcgccagcagcctgcggagcatctctgctgctgagggcaacaagagctacagcggcagcatccagagcctgacctctgtgggcagcaaggagacccccaaggccagccccaacccagacctgccccccaagatgtgccggcggctgcggctggacacagccagcagcaatggctaccagaggcctggctctgtggtggccgccaaggcccagctgtttgaaaatgtgggcagccccaagcctgtgagcagcggccggcaggccaaggccatgtacagctgcaaggccgagcacagccatgagctgtccttcccccagggcgccatcttcagcaatgtgtaccccagcgtggagcccggctggctgaaggccacctatgagggcaagacaggcctggtgcctgagaactacgtggtgttcctgtag

SEQ ID NO: 243422 - DNA, 2625 bp, Artificial Sequence
  derived and/or modified sequence
atgggcctgcccaccctggagttcagcgacagctacctggacagccctgacttccgcgagagattacagtgtcacgaaattgaactggagagaacaaataaattcattaaggagttgatcaaagatggcagccttctaatcggcgccctacgaaatctatctatggctgtacaaaagttcagccagtctcttcaggactttcagtttgaatgcattggcgacgcggagacagacgatgaaatctctattgcccaaagcctcaaggagtttgctcggctgctgatcgccgtcgaagaggaacggcgaaggctaatacaaaacgccaatgacgtcctgatcgcccctttggagaagttccggaaggaacagatcggcgctgcaaaagacggcaaaaagaagtttgataaggaatctgaaaagtattatagtattttggagaagcacctgaatttaagtgccaagaagaaagagagccacctgcaggaagctgatacgcagattgacagagaacatcagaatttctatgaggcaagcctcgagtatgtgtttaaaatccaagaagttcaggaaaagaagaagtttgaatttgtggagcctctgcttagctttctccagggtctgtttaccttttaccacgaaggctacgaattggcccaggagtttgctccttacaaacagcagctgcagtttaacctccagaataccaggaataatttcgagtctacgaggcaggaagtggagcggctgatgcagcggatgaagtctgcaaaccaagactacaggcccccaagtcagtggactatggagggctacctgtatgtgcaggaaaagaggcccttaggctttacttggatcaaacattactgcacctacgacaagggcagtaagacgtttaccatgtcggtctccgaaatgaaaagctccggaaaaatgaatggactggttacctcatcacctgagatgttcaaactcaagtcttgcatacggcggaagactgattcaatcgataaacgcttctgtttcgatatcgaggtagtggaaagacacggcataataaccttgcaagcctttagtgaagcaaatcgcaagctgtggcttgaagccatggacggcaaggaacccatatatacactaccggccataatctccaagaaggaggagatgtacctgaatgaggcaggcttcaactttgtccggaagtgtatccaagctgtggagacgagaggaatcactatcctgggtctctacagaattggtggggtgaactccaaggtacagaagctgatgaataccactttttccccaaagagcccaccggatatagatattgacatcgagctttgggacaacaaaaccatcacaagcggattgaagaactatctgcgatgtctagcagagccactgatgacatacaaacttcacaaggatttcatcatcgcggtaaaaagcgatgatcagaattacagggttgaggccgtgcatgcccttgtgcacaagcttcccgagaagaatcgtgaaatgctggacattctcatcaaacacctggtcaaggtgtccctgcattctcagcagaacctcatgaccgtgagcaatcttggagtcatcttcggtcccacactcatgcgggcccaagaagagacagttgccgccatgatgaacattaaatttcaaaacatcgtggtcgaaattcttatcgagcattacgaaaagatcttccacaccgcccccgacccctccatacccctgccacagccacaaagtcggtcaggatcacggaggacgcgggcaatttgtcttagcaccggctcacgaaagcctaggggacgctataccccatgtttagccgaacctgacagtgattcatactctagctcccccgatagcacacccatggggtccatcgaatcccttagcagtcattcgtccgaacagaatagtacgaccaaaagcgcatcctgtcagcctcgagagaaatctggcggcattccctggattgcgaccccgagctcctcaaacggacagaaatctctcgggttgtggactacgagtcccgaatcttcttcccgtgaagacgctacgaagacagatgctgaatccgactgtcagagcgtagcttctgtgacaagtcccggggatgtatccccacccatagacctggtcaagaaagaaccctacgggttaagcggtttgaagcgcgcatcagcatcctctctccggagtattagcgccgcagaaggcaacaagagctattccgggtccatccagtctctaacaagtgtgggcagtaaagagacgcctaaggcgagccctaatcctgacctgcctccaaaaatgtgcaggcggctgaggttagacaccgcgtctagcaacggctaccagcgccccgggtctgtggtggcagccaaggcacagcttttcgaaaatgtcgggtctccgaaacctgttagttcggggagacaggctaaagctatgtattcatgcaaagcagagcatagccatgagttgtcctttcctcagggtgccatattttctaatgtataccctagcgtcgagcctgggtggttaaaagctacttacgagggcaaaactggcctggtccccgagaactatgtggtgttcctttag

SEQ ID NO: 243423 - DNA, 2625 bp, Artificial Sequence
  derived and/or modified sequence
atggggttacccaccctggaatttagtgatagttatctggactcaccagatttccgcgaaagactgcaatgccatgaaattgaactggagcggacaaataaatttatcaaggaactcatcaaggatggcagtctcctcatcggcgcactgaggaacctctctatggccgtgcagaaatttagtcaatctctccaagacttccagtttgaatgtatcggagacgccgagacagacgatgagatatcaattgctcagtccttaaaggaattcgcacgattacttatagccgtggaggaagaacggcgacggctgattcagaatgctaacgatgtgcttatcgcccctcttgaaaagttccgtaaggagcagatcggagccgctaaggacggaaagaagaagtttgataaagaatcagagaagtattactcaattctcgagaagcatctgaatctgagtgcaaagaagaaggaatctcatctacaggaagctgacacccagatcgatcgagaacaccagaatttctatgaggccagcctggagtatgttttcaagattcaagaagtacaggaaaagaaaaaattcgaattcgtcgaaccattactgagcttcctgcaggggctatttactttctatcatgagggctatgaattggcccaggagtttgccccatataagcagcagctccagtttaacttgcagaatactaggaataatttcgagagcactcggcaggaagtcgaaagattgatgcagcgtatgaagtctgcgaaccaggattaccgccctccatcccagtggaccatggagggatacctttatgtgcaggagaaacgtccacttgggttcacatggatcaagcattattgcacttatgataaggggagtaagacgttcacaatgtcggtgagcgaaatgaaaagtagcggaaaaatgaacgggctggtgacatctagccccgaaatgttcaaactcaagtcctgtatcagaaggaagaccgattccattgataaacgattctgcttcgatattgaggtggtagagcgacacggaatcatcacactacaggcatttagcgaagcgaataggaagctatggctagaggcaatggacgggaaagaacccatctacactctgcccgcaatcattagtaagaaggaggaaatgtatttgaatgaggcaggttttaatttcgtgaggaagtgcattcaggccgtggaaactcgcggtatcaccattctggggctctaccgaatcggaggtgttaattccaaggttcaaaaactgatgaataccacatttagccccaaatccccgcctgatatcgacattgacattgagctgtgggacaacaaaacgatcacctcagggttgaaaaactacctgcggtgccttgcagaacccttgatgacttacaagctgcacaaggacttcattatcgccgttaagtccgatgaccagaattaccgcgttgaggctgtccacgcccttgtgcacaaactccccgagaaaaatcgagaaatgctcgatatactgattaagcatctcgtgaaagtctctcttcatagccagcaaaatctgatgacagtttctaatcttggtgtcatttttggacctacactaatgcgcgcacaggaggagacagttgccgcaatgatgaatatcaagtttcagaacatcgtcgtagagatattgatagagcactacgaaaaaattttccatacagccccagacccttccattccgctgcctcagcctcaaagccgctctggctctagacggactcgcgctatatgccttagcacaggaagtaggaaacccagaggtcggtatacgccatgccttgccgaacccgactcggacagttatagcagcagtccagattccacgcctatgggaagcattgaatctctgtcctcccactccagcgaacaaaattctactaccaaatccgcttcttgtcagcccagagagaaaagtggcggaatcccatggattgcaacgccatcaagctctaacggtcaaaaaagcttgggcctctggacgacttcccccgagagtagttcacgggaagatgccacaaaaactgatgctgagtccgactgtcagtcggtggcttcggtcacgagcccaggggacgtgtccccgcctattgacctggtgaagaaagagccatatggtctgagtgggctaaaaagagcctccgccagttcgctcaggagtatttcagccgcagaggggaacaagtcttattccggctctatccaatctttaacaagtgtcggatcaaaggaaacccctaaggctagcccaaacccagatctgccacctaaaatgtgtaggcgcctacgcctggacaccgcatcctcaaatggttatcagcgcccaggctcagtggtcgccgctaaagcccagctatttgaaaatgtcgggagtcccaaacctgtgtcatcagggcgtcaggctaaagccatgtactcctgtaaggctgaacacagccacgaactcagcttccctcagggtgctatattctccaatgtttatccatcagtggagcctggctggctgaaggccacctacgaggggaagacagggctagttccagagaactacgtagtgtttctctag

SEQ ID NO: 243424 - DNA, 4752 bp, Artificial Sequence
  derived and/or modified sequence
gccatggggctgcccactctggagttcagcgattcctacttggacagcccagatttcagggagcgcttgcagtgtcacgagattgagctggagcgaaccaacaagttcatcaaggagctcattaaggacggctctctgctcattggggcgttgaggaatctgtctatggcagtgcagaaattttcccagtcattgcaagatttccagtttgaatgtattggtgatgctgaaacagatgatgaaattagtattgctcagtcactaaaagaatttgcaagactactcattgcagtagaagaagaaaggcgaagactgatccaaaacgctaacgatgtattaattgcaccacttgagaaatttcgaaaagaacagataggtgcagcaaaagatggaaagaagaagtttgacaaagagagtgaaaaatattactctatccttgaaaagcatttaaatttgtccgcaaagaaaaaggagtctcatttacaagaggcagatacacaaattgaccgagaacatcagaacttctatgaagcatcattagaatatgtctttaaaattcaagaggtccaagaaaaaaagaagtttgaatttgttgaaccgcttttgtcatttcttcagggcttatttactttttaccatgagggatatgaacttgcccaggaatttgcaccgtataagcaacagctgcagttcaacttgcagaatacaaggaataattttgaaagtactcgacaagaggtagagcggttgatgcaaaggatgaaatctgctaaccaggactacagaccacccagccagtggacgatggaaggctatctgtatgtccaggagaaacgaccgcttggttttacatggattaaacattattgtacatatgataagggaagtaaaacatttacaatgagtgtttcagaaatgaaatccagtgggaaaatgaatggccttgttactagctcaccggaaatgtttaaattaaaatcttgtatccgacgaaagacagattcaattgacaaacgattctgctttgacatagaagtagttgaaaggcatgggatcatcacgttacaggccttctcagaagctaataggaaactctggcttgaagccatggatgggaaggaaccgatttatactctgcctgccattataagcaagaaagaagaaatgtatttgaatgaagcagggttcaactttgtgagaaaatgcattcaagctgtggaaacaagaggtatcaccattttaggactctaccgaataggaggagtgaactccaaagttcaaaaactcatgaataccacattttctcctaaatcccctcctgatattgatattgatattgaactgtgggacaataagacgataacaagtgggctgaaaaactacctcaggtgccttgcagaaccactgatgacttacaagttgcacaaagattttatcattgctgttaaatctgatgatcaaaactacagggtggaggctgtacatgcattggtgcacaaattgccggagaaaaacagagagatgctggacatcttaataaagcatctggtcaaagtatcactacacagccaacaaaatctcatgactgtctcaaatcttggtgtcatatttggcccaactctaatgagagcacaggaagaaactgtggctgctatgatgaatattaaatttcagaatattgtggtagaaattctgatagagcactatgaaaagatttttcatactgctccagacccaagcattcctcttcctcagcctcagtctcgatctggatcccgaaggacacgagcaatctgcctctctacagggtctaggaagcccagagggaggtatactccatgcctggccgaacctgatagtgactcctatagcagcagcccagacagcacacctatggggagcattgagtcactctcttctcattcctctgaacaaaatagcactacaaagtcagcttcctgccagcccagggagaaatctggagggattccttggattgcaaccccatcatcttccaatggacagaaaagccttggtctgtggacaactagtcctgaatcaagttccagagaagatgcaaccaagacagatgcagaatcagactgccagagtgttgcttcagtcactagcccaggagacgtttccccacccatagacctagtcaagaaagagccttatgggctttcaggactgaaaagagcttctgcttcttctctcagatccatctctgcagctgaaggaaacaagagctacagtggatctattcaaagcttaacttctgtaggttccaaggagacacccaaagcttcaccaaacccagacctgcctccgaaaatgtgcaggagattaagactagacactgcctcaagcaatggctatcagcggcctggctcagtagtggcagcaaaagctcaactgtttgaaaatgttggttcacctaaaccagtttcttctgggcgccaagccaaagccatgtactcctgtaaagcagagcacagtcatgagctttccttcccacaaggagcaatattttctaatgtgtacccatcagtggaaccaggatggttaaaggcaacttatgaaggcaaaacaggactagttccagaaaattatgttgtcttcctctaatactatttagtggatggcagtatcttcatggtatccatggtaacgaataaatgctatgattttatctgacacagatacacggggatcagcccactaagtgaaaacagtcaatttctatcaagttcttcaccagcagactatgtagctccttattaatggaaaaaaagatttaaattgttggccattcttttttggttggtttcttattttaaaatatcttacttgtgaaaaatgtgtttttggataatatgtaactctccacaatgtcgcttccgtagcaattgtagagtttcaaatactgtgttaaatactgtatcccagaaatttggaaaccagaaatctgctatatggattttgagatctgtcctttactgcctggcattctctgaggatctctgaaattgttacttaaaaatgtaatttaaattgttcatttattgttttttttttcttagaaatatactgcttttatatatgattgttttgctggtcctaaacatttcaaggatgtaagtctttgttttaatataactttatttgttttccaagtagatgataatattcaaaagcaataatgtatatgatatctataaaggaagcaaaattaagtcatacactgattccactgtaaacaatctgtccagaattccagacaccttcagcaaactttttctgtaaaggcctgatagcaaatatttttgtggtgggttgaatttggcttatgggttatagtttgctgacacctagtttagagggtgtgtaaaactatcttcataactttgagatttttataaaattttacatgaaaatatactgataaattatatgcacatattttctaccagtagcattatagtggcatcatagaagaatatttaccaatgatggggaaactgtaaaactacagtatcaaggcatacaacttaaattccacttggaagattgtaaagtgtcaaagtattttaatgataatttaatttgggcttttgaaatgttcttctacaaatgaaaaagatgtttaaaaacgttacaagggaagctatgccttctgaagtctatccttagttgaaacagaaaataaacacaaaggtacaagatccttaaattattttgaaccacagaggttgaaattgttttgtgatcttcagcagaaataaaatctgtacatgattttcttttatgccttttagtttacagtctttattagcaatttcagtgaatttgtagagcatagtaataggtatttactgtccacttatatatatcagcatctggtcatgcacgaaccattaattctatatttctatttcaataattctaatatattatttctataaatgtaatatctgtatgtggcaaagagcctttcttctcaagatcctgaaaagctggttacctgccctttgagtgccacagtcctgaactgcttgttcttgacatcttgcatattacttcagagttccccactgtgcagactctcaggtattaactgtaaaaaactctttacatgccattattatctgtaatctctatctcttctactttaaattaatgtttctagaattaataggttaaatacacatacacacacacaactatgcctcagaaaagttaggcttttacaaataaaaagaataagattagaattaacaagtagagagaataacggtaggcagagtcagaatcaggaataaatatcagtgaatcaaaagaatgaaaaatattatgtaataaaaattagcaatgtaatgtaaacgtttgataaaagagtatctttttcttttatctcttactgttgacctctgtgcactgtaataaggtgtgttgctggatcttcttggtcgaggtccttggtgaccttagtagtaataacagcattgctgacaccctaattgccctctgctggaacagaaggtagttttccagtgtaccagtcccttagtctatacagcacccttggtttaagcacacttgccatcatctggtatcctgctagactagaatctcttaaaagcaaattggttttctttcaaagaccaacttgactccaaagagagattcagaatcctacttctcctgctgctgcataaagaatctcaaccttcattttatttgaacacggac

SEQ ID NO: 243425 - protein, 894 aa, Artificial Sequence
  derived and/or modified sequence
MATSMAAASGRFESAKSIEERKEQTRNARAEVLRQAKANFEKEERRKELKRLRGEDTWMLPDVNERIEQFSQEHSVKKKKKKDKHSKKAKKEKKKKSKKQKYEKNNESSDSSSSSEDEWVEAVPSQTPDKEKAWKVKDEKSGKDDTQIIKRDEWMTVDFMSVKTVSSSSLKAEKETMRKIEQEKNQALEQSKLMERELNPYWKDGGTGLPPEDCSVSSITKVSVVEDGGLSWLRKSYLRMKEQAEKQSRNFEDIVAERYGSMEIFQSKLEDAEKAASTKEDYRRERWRKPTYSDKAQNCQESRESDLVKYGNSSRDRYATTDTAKNSNNEKFIGDEKDKRPGSLETCRRESNPRQNQEFSFGNLRAKFLRPSDDEELSFHSKGRKFEPLSSSSALVAQGSLCSGFRKPTKNSEERLTSWSRSDGRGDKKHSNQKPSETSTDEHQHVPEDPREKSQDEVLRDDPPKKEHLRDTKSTFAGSPERESIHILSVDEKNKLGAKIIKAEMMGNMELAEQLKVQLEKANKFKETITQIPKKSGVENEDQQEVILVRTDQSGRVWPVNTPGKSLESQGGRRKRQMVSTHEERERVRYFHDDDNLSLNDLVKNEKMGTAENQNKLFMRMASKFMGKTDGDYYTLDDMFVSKAAERERLGEEEENQRKKAIAEHRSLAAQMEKCLYCFDSSQFPKHLIVAIGVKVYLCLPNVRSLTEGHCLIVPLQHHRAATLLDEDIWEEIQMFRKSLVKMFEDKGLDCIFLETNMSMKKQYHMVYECIPLPKEVGDMAPIYFKKAIMESDEEWSMNKKLIDLSSKDIRKSVPRGLPYFSVDFGLHGGFAHVIEDQHKFPHYFGKEIIGGMLDIEPRLWRKGIRESFEDQRKKALQFAQWWKPYDFTKSKNY

SEQ ID NO: 243426 - protein, 96 aa, Artificial Sequence
  derived and/or modified sequence
MFEDKGLDCIFLETNMSMKKQYHMVYECIPLPKEVGDMAPIYFKKAIMESDEEWSMNKKLIDLSSKDIRKSVPRGLPYFSVDFGLHGGFAHVIEDQ

SEQ ID NO: 243427 - protein, 742 aa, Artificial Sequence
  derived and/or modified sequence
MATSMAAASGRFESAKSIEERKEQTRNARAEVLRQAKANFEKEERRKELKRLRGEDTWMLPDVNERIEQFSQEHSVKKKKKKDKHSKKAKKEKKKKSKKQKYEKNNESSDSSSSSEDEWVEAVPSQTPDKEKAWKVKDEKSGKDDTQIIKRDEWMTVDFMSVKTVSSSSLKAEKETMRKIEQEKNQALEQSKLMERELNPYWKDGGTGLPPEDCSVSSITKVSVVEDGGLSWLRKSYLRMKEQAEKQSRNFEDIVAERYGSMEIFQSKLEDAEKAASTKEDYRRERWRKPTYSDKAQNCQESRESDLVKYGNSSRDRYATTDTAKNSNNEKFIGDEKDKRPGSLETCRRESNPRQNQEFSFGNLRAKFLRPSDDEELSFHSKGRKFEPLSSSSALVAQGSLCSGFRKPTKNSEERLTSWSRSDGRGDKKHSNQKPSETSTDEHQHVPEDPREKSQDEVLRDDPPKKEHLRDTKSTFAGSPERESIHILSVDEKNKLGAKIIKAEMMGNMELAEQLKVQLEKANKFKETITQIPKKSGVENEDQQEVILVRTDQSGRVWPVNTPGKSLESQGGRRKRQMVSTHEERERVRYFHDDDNLSLNDLVKNEKMGTAENQNKLFMRMASKFMGKTDGDYYTLDDMFVSKAAERERLGEEEENQRKKAIAEHRSLAAQMEKCLYCFDSSQFPKHLIVAIGVKVYLCLPNVRSLTEGHCLIVPLQHHRAATLLDEDIWEEIQIKSRTVIQ

SEQ ID NO: 243428 - DNA, 2685 bp, Artificial Sequence
  derived and/or modified sequence
atggccaccagcatggccgccgccagcggcagattcgagagcgccaagagcatcgaggagagaaaggagcagaccagaaacgccagagccgaggtgctgagacaggccaaggccaacttcgagaaggaggagagaagaaaggagctgaagagactgagaggcgaggacacctggatgctgcccgacgtgaacgagagaatcgagcagttcagccaggagcacagcgtgaagaagaagaagaagaaggacaagcacagcaagaaggccaagaaggagaagaagaagaagagcaagaagcagaagtacgagaagaacaacgagagcagcgacagcagcagcagcagcgaggacgagtgggtggaggccgtgcccagccagacccccgacaaggagaaggcctggaaggtgaaggacgagaagagcggcaaggacgacacccagatcatcaagagagacgagtggatgaccgtggacttcatgagcgtgaagaccgtgagcagcagcagcctgaaggccgagaaggagaccatgagaaagatcgagcaggagaagaaccaggccctggagcagagcaagctgatggagagagagctgaacccctactggaaggacggcggcaccggcctgccccccgaggactgcagcgtgagcagcatcaccaaggtgagcgtggtggaggacggcggcctgagctggctgagaaagagctacctgagaatgaaggagcaggccgagaagcagagcagaaacttcgaggacatcgtggccgagagatacggcagcatggagatcttccagagcaagctggaggacgccgagaaggccgccagcaccaaggaggactacagaagagagagatggagaaagcccacctacagcgacaaggcccagaactgccaggagagcagagagagcgacctggtgaagtacggcaacagcagcagagacagatacgccaccaccgacaccgccaagaacagcaacaacgagaagttcatcggcgacgagaaggacaagagacccggcagcctggagacctgcagaagagagagcaaccccagacagaaccaggagttcagcttcggcaacctgagagccaagttcctgagacccagcgacgacgaggagctgagcttccacagcaagggcagaaagttcgagcccctgagcagcagcagcgccctggtggcccagggcagcctgtgcagcggcttcagaaagcccaccaagaacagcgaggagagactgaccagctggagcagaagcgacggcagaggcgacaagaagcacagcaaccagaagcccagcgagaccagcaccgacgagcaccagcacgtgcccgaggaccccagagagaagagccaggacgaggtgctgagagacgacccccccaagaaggagcacctgagagacaccaagagcaccttcgccggcagccccgagagagagagcatccacatcctgagcgtggacgagaagaacaagctgggcgccaagatcatcaaggccgagatgatgggcaacatggagctggccgagcagctgaaggtgcagctggagaaggccaacaagttcaaggagaccatcacccagatccccaagaagagcggcgtggagaacgaggaccagcaggaggtgatcctggtgagaaccgaccagagcggcagagtgtggcccgtgaacacccccggcaagagcctggagagccagggcggcagaagaaagagacagatggtgagcacccacgaggagagagagagagtgagatacttccacgacgacgacaacctgagcctgaacgacctggtgaagaacgagaagatgggcaccgccgagaaccagaacaagctgttcatgagaatggccagcaagttcatgggcaagaccgacggcgactactacaccctggacgacatgttcgtgagcaaggccgccgagagagagagactgggcgaggaggaggagaaccagagaaagaaggccatcgccgagcacagaagcctggccgcccagatggagaagtgcctgtactgcttcgacagcagccagttccccaagcacctgatcgtggccatcggcgtgaaggtgtacctgtgcctgcccaacgtgagaagcctgaccgagggccactgcctgatcgtgcccctgcagcaccacagagccgccaccctgctggacgaggacatctgggaggagatccagatgttcagaaagagcctggtgaagatgttcgaggacaagggcctggactgcatcttcctggagaccaacatgagcatgaagaagcagtaccacatggtgtacgagtgcatccccctgcccaaggaggtgggcgacatggcccccatctacttcaagaaggccatcatggagagcgacgaggagtggagcatgaacaagaagctgatcgacctgagcagcaaggacatcagaaagagcgtgcccagaggcctgccctacttcagcgtggacttcggcctgcacggcggcttcgcccacgtgatcgaggaccagcacaagttcccccactacttcggcaaggagatcatcggcggcatgctggacatcgagcccagactgtggagaaagggcatcagagagagcttcgaggaccagagaaagaaggccctgcagttcgcccagtggtggaagccctacgacttcaccaagagcaagaactactag

SEQ ID NO: 243429 - DNA, 2229 bp, Artificial Sequence
  derived and/or modified sequence
atggccaccagcatggccgccgccagcggcagattcgagagcgccaagagcatcgaggagagaaaggagcagaccagaaacgccagagccgaggtgctgagacaggccaaggccaacttcgagaaggaggagagaagaaaggagctgaagagactgagaggcgaggacacctggatgctgcccgacgtgaacgagagaatcgagcagttcagccaggagcacagcgtgaagaagaagaagaagaaggacaagcacagcaagaaggccaagaaggagaagaagaagaagagcaagaagcagaagtacgagaagaacaacgagagcagcgacagcagcagcagcagcgaggacgagtgggtggaggccgtgcccagccagacccccgacaaggagaaggcctggaaggtgaaggacgagaagagcggcaaggacgacacccagatcatcaagagagacgagtggatgaccgtggacttcatgagcgtgaagaccgtgagcagcagcagcctgaaggccgagaaggagaccatgagaaagatcgagcaggagaagaaccaggccctggagcagagcaagctgatggagagagagctgaacccctactggaaggacggcggcaccggcctgccccccgaggactgcagcgtgagcagcatcaccaaggtgagcgtggtggaggacggcggcctgagctggctgagaaagagctacctgagaatgaaggagcaggccgagaagcagagcagaaacttcgaggacatcgtggccgagagatacggcagcatggagatcttccagagcaagctggaggacgccgagaaggccgccagcaccaaggaggactacagaagagagagatggagaaagcccacctacagcgacaaggcccagaactgccaggagagcagagagagcgacctggtgaagtacggcaacagcagcagagacagatacgccaccaccgacaccgccaagaacagcaacaacgagaagttcatcggcgacgagaaggacaagagacccggcagcctggagacctgcagaagagagagcaaccccagacagaaccaggagttcagcttcggcaacctgagagccaagttcctgagacccagcgacgacgaggagctgagcttccacagcaagggcagaaagttcgagcccctgagcagcagcagcgccctggtggcccagggcagcctgtgcagcggcttcagaaagcccaccaagaacagcgaggagagactgaccagctggagcagaagcgacggcagaggcgacaagaagcacagcaaccagaagcccagcgagaccagcaccgacgagcaccagcacgtgcccgaggaccccagagagaagagccaggacgaggtgctgagagacgacccccccaagaaggagcacctgagagacaccaagagcaccttcgccggcagccccgagagagagagcatccacatcctgagcgtggacgagaagaacaagctgggcgccaagatcatcaaggccgagatgatgggcaacatggagctggccgagcagctgaaggtgcagctggagaaggccaacaagttcaaggagaccatcacccagatccccaagaagagcggcgtggagaacgaggaccagcaggaggtgatcctggtgagaaccgaccagagcggcagagtgtggcccgtgaacacccccggcaagagcctggagagccagggcggcagaagaaagagacagatggtgagcacccacgaggagagagagagagtgagatacttccacgacgacgacaacctgagcctgaacgacctggtgaagaacgagaagatgggcaccgccgagaaccagaacaagctgttcatgagaatggccagcaagttcatgggcaagaccgacggcgactactacaccctggacgacatgttcgtgagcaaggccgccgagagagagagactgggcgaggaggaggagaaccagagaaagaaggccatcgccgagcacagaagcctggccgcccagatggagaagtgcctgtactgcttcgacagcagccagttccccaagcacctgatcgtggccatcggcgtgaaggtgtacctgtgcctgcccaacgtgagaagcctgaccgagggccactgcctgatcgtgcccctgcagcaccacagagccgccaccctgctggacgaggacatctgggaggagatccagatcaagagcagaaccgtgatccagtag

SEQ ID NO: 243430 - DNA, 3278 bp, Artificial Sequence
  derived and/or modified sequence
aattttcttgcggcttcttagctttacgatggcaacaagtatggcggctgctagtggtagatttgaaagtgcgaagagtatcgaagagcggaaagaacagacccggaatgccagggccgaggtgttgcgccaggctaaagccaattttgaaaaagaagaaaggcgtaaagaacttaagcgacttcggggtgaggatacatggatgctacctgatgtgaatgagagaattgaacagttctcacaggaacactctgtgaagaaaaagaagaaaaaagacaagcattcaaaaaaagcaaagaaagaaaagaaaaaaaagagcaagaaacagaaatatgaaaaaaacaatgagtcatctgatagctcatcaagctctgaagatgagtgggttgaggctgttccatcccagactcctgacaaggaaaaagcctggaaagtgaaagatgaaaagtcaggaaaagatgacacccaaattatcaagagggatgagtggatgactgttgattttatgtctgttaaaactgtgtcatcatcatcactcaaagctgaaaaggaaactatgaggaaaatagagcaagagaaaaaccaagcgcttgaacagtccaaactgatggaaagagaattgaatccgtactggaaggatggtgggacaggtcttccacctgaagactgtagtgtgtcatcgattactaaagtttcagtggtagaagatggtggattaagctggctaaggaaatcttatctaagaatgaaggaacaagctgagaaacaaagtagaaactttgaggacattgtagccgaaagatatgggtcaatggaaatatttcagtcaaaattagaagatgctgaaaaagctgcatccacgaaagaagattatagacgggaacggtggaggaaacccacatattcagataaagcacaaaattgtcaagaaagtagagaatcagacttagtaaaatatggtaacagttcaagggatagatatgctacaacagatactgcaaaaaatagcaataatgaaaaatttattggtgatgaaaaagataagagacctgggtctttagaaacgtgtagaagagaatctaacccaaggcaaaatcaagagttttcttttggcaatttgagagctaaattcttgagaccctctgatgatgaagaactgtcatttcacagcaagggcagaaaatttgaaccacttagttcatcttcagcattggtagctcagggctctttgtgtagtggttttagaaaacccaccaagaacagtgaagaaagattaacatcatggagtcgctctgatgggagaggagacaagaaacattcaaatcaaaagccatcggaaaccagtactgatgaacaccaacatgttccagaagacccaagagaaaaatcacaagatgaagtcttgagagatgaccctccaaaaaaagaacatctacgggatacaaagtctacatttgctggcagtccagagcgtgagtccattcacatcctgagtgttgatgagaagaacaagttgggagccaagattatcaaagcagagatgatggggaatatggaattagctgaacaacttaaagttcaacttgaaaaggcaaataaattcaaagaaactataacacagataccaaaaaaatctggggtagagaatgaagaccagcaagaagtaatccttgtcagaacagatcagtctggaagagtatggcctgtgaacacacccggaaaatctctggaatcacaaggaggaagaagaaagagacagatggtttcaacccatgaggaaagagaaagggtcagatactttcatgatgatgataatctaagcctaaatgatttagtcaaaaatgaaaagatgggaacagcagaaaatcaaaacaagctctttatgagaatggcatctaagtttatgggaaaaacagatggagactattacaccctggatgacatgtttgtctccaaagcagctgagagagaacgtcttggtgaagaggaagagaaccaaaggaaaaaagctattgctgagcatcggagtcttgctgcacaaatggaaaaatgtctgtattgttttgacagctctcaatttcccaagcatcttattgttgcaataggtgttaaggtttatttatgtttacccaacgtacggtctcttactgaggggcactgcctgatagtccctttgcagcaccatagagcagctactttgttggatgaagacatctgggaggagatccagatgttcagaaaatcattggtaaagatgtttgaagataaaggattagactgcatttttttggaaactaatatgagcatgaagaaacagtatcacatggtttatgaatgtattcctcttcccaaggaagtgggtgacatggctcccatctattttaagaaagccataatggaatctgatgaagagtggtccatgaacaagaagttgatagatctctcttcaaaagatatcagaaagtctgtacccagagggttaccttacttctctgtggattttggccttcacggagggtttgcccatgtcattgaagatcagcacaaattccctcattactttggaaaggaaatcataggtgggatgctggatatagaaccaagactttggaggaaaggcatccgagaaagctttgaggatcagaggaaaaaagcactgcagtttgctcagtggtggaaaccatatgacttcaccaaaagtaaaaactattgaggtgtaccttccattttaaaatttttcttcagatcccgttcagttttatttccattgcatctaatgaagcaactgaccctcaggtcacaggcagagagagtcacagcagcagactgctctgggtcagtgacaactgtacatcaggagattgtgttgttttcttcttcacctgctcctatctatggacttcattttagtcaccatggagtaaaaacatatattcgatgatctgctcacattcctgctctctacctacttcttggtattccgaattgttcagttaatttagagaaggccttttctgaagggatatctaaaaagcataggaaatccttggttcagagggaagtgggtctgcttcatggttgttaagtctactgtctggcttcttttgcatttttaaaaataagacgatttaattttaatttcataggattttatagaaaagctcttaattttctactagcagtatatagtatcacttctattctttttgttaaaggaaaaggaaatgtccccaaagtattaaagaattaaatgatactgaaaatttgtatgattcaaa

SEQ ID NO: 243431 - DNA, 2259 bp, Artificial Sequence
  derived and/or modified sequence
agaattttcttgcggcttcttagctttacgatggcaacaagtatggcggctgctagtggtagatttgaaagtgcgaagagtatcgaagagcggaaagaacagacccggaatgccagggccgaggtgttgcgccaggctaaagccaattttgaaaaagaagaaaggcgtaaagaacttaagcgacttcggggtgaggatacatggatgctacctgatgtgaatgagagaattgaacagttctcacaggaacactctgtgaagaaaaagaagaaaaaagacaagcattcaaaaaaagcaaagaaagaaaagaaaaaaaagagcaagaaacagaaatatgaaaaaaacaatgagtcatctgatagctcatcaagctctgaagatgagtgggttgaggctgttccatcccagactcctgacaaggaaaaagcctggaaagtgaaagatgaaaagtcaggaaaagatgacacccaaattatcaagagggatgagtggatgactgttgattttatgtctgttaaaactgtgtcatcatcatcactcaaagctgaaaaggaaactatgaggaaaatagagcaagagaaaaaccaagcgcttgaacagtccaaactgatggaaagagaattgaatccgtactggaaggatggtgggacaggtcttccacctgaagactgtagtgtgtcatcgattactaaagtttcagtggtagaagatggtggattaagctggctaaggaaatcttatctaagaatgaaggaacaagctgagaaacaaagtagaaactttgaggacattgtagccgaaagatatgggtcaatggaaatatttcagtcaaaattagaagatgctgaaaaagctgcatccacgaaagaagattatagacgggaacggtggaggaaacccacatattcagataaagcacaaaattgtcaagaaagtagagaatcagacttagtaaaatatggtaacagttcaagggatagatatgctacaacagatactgcaaaaaatagcaataatgaaaaatttattggtgatgaaaaagataagagacctgggtctttagaaacgtgtagaagagaatctaacccaaggcaaaatcaagagttttcttttggcaatttgagagctaaattcttgagaccctctgatgatgaagaactgtcatttcacagcaagggcagaaaatttgaaccacttagttcatcttcagcattggtagctcagggctctttgtgtagtggttttagaaaacccaccaagaacagtgaagaaagattaacatcatggagtcgctctgatgggagaggagacaagaaacattcaaatcaaaagccatcggaaaccagtactgatgaacaccaacatgttccagaagacccaagagaaaaatcacaagatgaagtcttgagagatgaccctccaaaaaaagaacatctacgggatacaaagtctacatttgctggcagtccagagcgtgagtccattcacatcctgagtgttgatgagaagaacaagttgggagccaagattatcaaagcagagatgatggggaatatggaattagctgaacaacttaaagttcaacttgaaaaggcaaataaattcaaagaaactataacacagataccaaaaaaatctggggtagagaatgaagaccagcaagaagtaatccttgtcagaacagatcagtctggaagagtatggcctgtgaacacacccggaaaatctctggaatcacaaggaggaagaagaaagagacagatggtttcaacccatgaggaaagagaaagggtcagatactttcatgatgatgataatctaagcctaaatgatttagtcaaaaatgaaaagatgggaacagcagaaaatcaaaacaagctctttatgagaatggcatctaagtttatgggaaaaacagatggagactattacaccctggatgacatgtttgtctccaaagcagctgagagagaacgtcttggtgaagaggaagagaaccaaaggaaaaaagctattgctgagcatcggagtcttgctgcacaaatggaaaaatgtctgtattgttttgacagctctcaatttcccaagcatcttattgttgcaataggtgttaaggtttatttatgtttacccaacgtacggtctcttactgaggggcactgcctgatagtccctttgcagcaccatagagcagctactttgttggatgaagacatctgggaggagatccagataaaatctagaacagtcatccaataa

SEQ ID NO: 243432 - DNA, 2685 bp, Artificial Sequence
  derived and/or modified sequence
atggcaacctctatggcagccgcaagtgggcgctttgagtccgcaaaatccatcgaggagagaaaagagcagaccaggaatgccagggccgaggttctgagacaggcaaaggcgaattttgagaaggaggagagacgtaaggagcttaaaaggctgcgtggcgaggacacttggatgctgccagacgtgaacgagcgcattgagcagttttctcaggagcattcggtgaagaaaaaaaaaaagaaagacaagcacagcaagaaagccaagaaggaaaagaagaaaaaaagtaaaaaacaaaagtacgagaagaacaacgaatcctccgatagtagtagcagttccgaggatgagtgggttgaagcggttccatcccagacacccgataaagagaaggcctggaaagttaaagatgagaagagcggaaaggatgatacccagattataaaaagggatgagtggatgaccgtagacttcatgagtgtgaaaactgtctcttccagctctttaaaagcggagaaagaaaccatgcggaaaatcgaacaagagaaaaatcaggccttggagcagtcaaagctgatggagagagagctgaatccatattggaaggacggggggaccggccttccaccagaagactgctcagtgtctagtattacgaaggtttcagttgttgaggacggcggactgagttggctcagaaaatcctacctcagaatgaaggagcaagccgagaaacaatctaggaactttgaagacatcgtggccgaacgatatgggagcatggagatcttccagtccaagctggaagatgctgagaaggccgcgagcactaaagaggactatagacgtgagaggtggagaaagcccacatactccgacaaggctcagaactgtcaagaaagtagagaatccgatttggttaagtacggtaattcctcacgggatcgctacgcgacaacagacaccgcgaaaaattcaaataatgagaagttcataggagacgaaaaagacaaacgccctggctccctggagacttgcagaagggaaagtaatccacgccagaatcaggaattctcctttgggaacctgagagcgaaattccttcgaccgagtgatgatgaagaactgtcctttcatagcaagggaagaaagttcgagcctttgtccagtagttcagccctggtggcccaaggatcactgtgtagcgggtttagaaagcccaccaagaactctgaggagcgactaaccagctggagccggtctgatgggcgcggtgacaagaaacactcaaatcaaaaacccagcgagacttcgactgatgagcatcagcacgtacctgaagacccccgggagaaatcacaggatgaagtactgagagacgatcctcccaaaaaggaacatctgcgggacacaaagagtacattcgccggatcacccgaaagagagtcaattcacatcctgagcgtggacgagaagaataagctgggcgccaaaatcattaaagcagaaatgatgggtaatatggaactggccgaacaactcaaggtccagcttgaaaaagcaaataaattcaaagaaacaatcacacagattcctaagaagtccggcgttgagaatgaagaccagcaagaagtgatcttagttagaactgatcagtcagggagggtgtggcctgtgaatacgccaggtaagagcctggagtcccagggtgggaggaggaaacggcagatggtgtctacccacgaagagcgggagcgggtccggtactttcatgatgacgacaacctctctttaaatgatctcgttaagaatgagaagatggggaccgccgaaaatcagaataaactgttcatgagaatggcttccaagttcatgggcaagacagacggcgactactacaccctggacgatatgtttgtatccaaagccgctgagagagaaaggctcggggaggaagaggaaaatcagagaaaaaaggcaatcgccgagcatagatccctggccgcacagatggagaaatgcctgtattgctttgatagcagccagttccccaagcacctgatcgtggcaattggcgtcaaagtatatctctgtctgcccaatgtaaggtctctcaccgagggccattgtctgattgtaccactacaacaccaccgcgcggcgacgctgctggacgaggacatctgggaagagatccagatgttcagaaagtccctcgtgaaaatgtttgaggataagggccttgattgtattttcctcgaaactaatatgtcgatgaaaaaacagtaccatatggtttatgagtgcatacctctcccaaaggaggtgggcgacatggcacccatttattttaagaaggccatcatggagtctgatgaggaatggtcaatgaataagaaattgatagacctgtcctccaaagatatcaggaaatccgtcccgcggggtctaccatatttttccgtggactttggactgcacggcggcttcgcgcatgttatcgaggaccagcacaaattccctcactactttgggaaggaaataataggcggaatgttggatatcgaacccaggctgtggaggaagggcattagggaatccttcgaggaccagcggaaaaaggcattgcagttcgctcaatggtggaaaccctatgattttaccaaaagtaaaaactactag

SEQ ID NO: 243433 - DNA, 2229 bp, Artificial Sequence
  derived and/or modified sequence
atggctactagtatggccgcagcttcaggcagattcgagtctgctaagtcaatagaagaaagaaaggaacagaccagaaacgcgcgggcagaggttctaagacaggcaaaagccaattttgagaaggaagagcgtaggaaggaattgaaacgcttacgaggcgaggacacatggatgctccctgacgtgaatgagcggatcgaacagttcagtcaggagcactccgtgaaaaaaaaaaaaaagaaggacaagcattctaaaaaagcaaaaaaggaaaagaagaaaaagagcaagaaacagaagtacgaaaaaaataatgaaagctcagatagcagctcaagtagtgaggacgaatgggtggaggcagttccttcacagacccctgacaaggagaaggcgtggaaggtaaaggatgagaagtcgggcaaggatgatactcagatcatcaaacgtgacgagtggatgaccgtggattttatgagcgttaaaacggtgtccagttcttcactcaaggccgagaaggaaactatgaggaaaatagagcaggaaaagaatcaggctctggaacagagcaaactgatggaacgggaactgaacccatactggaaggatggcggcaccggtcttccgcctgaggactgttctgtgagctcaattaccaaagtcagtgtcgtcgaggatggcggcctgtcatggctgcgtaaatcatatttgcgaatgaaggagcaggcagaaaagcagtcaagaaactttgaagacatcgtggctgagcgttatgggtcaatggaaattttccagagcaaactggaagatgctgaaaaagccgctagcaccaaagaagattacaggagagagcgatggcgtaagcctacatattccgacaaagcccagaattgtcaggagagccgcgagtccgacctggttaagtacggcaactcctctcgagaccgctacgctaccactgatactgctaagaatagcaataatgagaaatttatcggtgatgagaaagacaagagacctgggtcactggagacgtgtcggcgggaaagtaatccgcgccagaatcaggagtttagctttggaaatctgcgggccaagtttctgcgtccttccgatgacgaagaactcagcttccacagcaagggacggaaattcgagcccctgtcatcctcttccgcccttgtcgcccaggggagcctgtgtagtggttttcgtaagcctacaaaaaattctgaggagcgactcacctcttggagcagaagcgatggacgcggcgataagaaacattctaaccagaaaccttcagagacaagcaccgatgaacaccagcacgtccccgaggatccccgcgagaaatcacaggacgaggtgctgagggacgatcctcctaagaaagagcatttacgcgacacaaagagcactttcgccggctctcctgagcgagaaagtattcacatattgtccgttgacgagaagaacaagctgggggcaaaaataatcaaggccgagatgatggggaacatggaactagctgagcaactgaaggtgcagttggaaaaagccaacaagtttaaggaaactatcacccagatccccaaaaagtcaggggtggaaaatgaggatcagcaagaagttattctcgttagaaccgaccagagcggcagagtatggcctgttaataccccggggaagagtttggaatcacaaggcggtcggagaaagagacaaatggtgtctacccacgaggaacgagaacgtgtgcgttacttccacgatgatgacaatctgagtctcaacgacctggtgaaaaacgagaaaatggggactgcagagaatcaaaataagctgttcatgcggatggcctcaaagttcatgggaaagacagatggggattactacaccttagacgatatgttcgtctctaaggctgccgaaagggaaagacttggcgaagaggaggaaaatcagagaaagaaggcaattgcagagcaccgcagcctagccgcacagatggaaaagtgcctgtactgcttcgatagctctcagttccctaagcacctgatcgtggcaataggagtgaaagtttatttgtgtttaccaaatgttaggagcctcaccgaaggccattgtctgatcgtaccactgcagcatcacagggcagccacacttctcgatgaggacatctgggaagagatccagattaagagccgaacagtcatacagtag

SEQ ID NO: 243434 - DNA, 2685 bp, Artificial Sequence
  derived and/or modified sequence
atggccacctccatggctgctgccagcggccgctttgagagcgccaagagcattgaggagaggaaggagcagaccagaaatgcccgggcagaggtgctgcggcaggccaaggccaactttgagaaggaggagaggaggaaggagctgaagaggctgcggggggaggacacctggatgctgcctgatgtgaatgaaagaattgagcagttcagccaggagcacagcgtgaagaagaagaagaagaaggacaagcacagcaagaaggccaagaaggagaagaagaagaagagcaagaagcagaagtatgagaagaacaatgaaagcagtgacagcagcagcagcagtgaagatgagtgggtggaggccgtgcccagccagaccccagacaaggagaaggcctggaaggtgaaggatgagaagagcggcaaggatgacacccagatcatcaagagagatgagtggatgacagtggacttcatgtctgtgaagacagtgagcagcagcagcctgaaggccgagaaggagaccatgaggaagattgagcaggagaagaaccaggccctggagcagagcaagctgatggagcgggagctgaacccctactggaaggatggcggcaccggcctgcccccagaggactgcagcgtgagcagcatcaccaaggtgtctgtggtggaggatggcggcctgtcctggctgaggaagagctacctgaggatgaaggagcaggccgagaagcagagcaggaactttgaggacatcgtggccgagagatatggctccatggagatcttccagagcaagctggaggatgctgagaaggccgccagcaccaaggaggactacagaagagagcgctggaggaagcccacctacagcgacaaggcccagaactgccaggagagccgggagagtgacctggtgaagtatggcaacagcagccgggacagatatgccaccacagacacagccaagaacagcaacaatgagaagttcatcggagatgagaaggacaagaggcctggcagcctggagacctgccggcgggagagcaacccccggcagaaccaggagttctcctttggaaacctgcgggccaagttcctgcggcccagtgatgatgaggagctgtccttccacagcaagggcaggaagtttgagcccctgagcagcagcagcgccctggtggcccagggcagcctgtgcagcggcttcaggaagcccaccaagaacagcgaggagcggctgacctcctggagcagaagtgatggccgcggggacaagaagcacagcaaccagaagcccagcgagaccagcacagatgagcaccagcacgtgcctgaggacccccgggagaagagccaggatgaggtgctgagagatgatcctcccaagaaggagcacctgcgggacaccaagagcacctttgctggcagccctgagcgggagagcatccacatcctgtctgtggatgagaagaacaagctgggcgccaagatcatcaaggccgagatgatgggcaacatggagctggccgagcagctgaaggtgcagctggagaaggccaacaagttcaaggagaccatcacccagatccccaagaagagcggcgtggagaatgaagaccagcaggaggtgatcctggtgaggacagaccagagcggccgggtgtggcctgtgaacaccccaggcaagagcctggagagccagggcggccgcaggaagaggcagatggtgtccacccatgaggagcgggagcgggtgcgctacttccatgatgatgacaacctgagcctgaatgacctggtgaagaatgagaagatgggcacagctgagaaccagaacaagctgttcatgaggatggccagcaagttcatgggcaagacagatggagactactacaccctggatgacatgtttgtgtccaaggctgctgagcgggagcggctgggggaggaggaggagaaccagaggaagaaggccatcgccgagcacaggagcctggccgcccagatggagaagtgcctgtactgctttgacagcagccagttccccaagcacctgattgtggccatcggcgtgaaggtgtacctgtgcctgcccaacgtgcgcagcctgacagagggccactgcctgattgtgcccctgcagcaccacagagctgccaccctgctggatgaggacatctgggaggagatccagatgttcaggaagagcctggtgaagatgtttgaagataaaggcctggactgcatcttcctggagaccaacatgtccatgaagaagcagtaccacatggtgtatgagtgcatccccctgcccaaggaggtgggggacatggcccccatctacttcaagaaggccatcatggagagtgatgaggagtggagcatgaacaagaagctgattgacctgagcagcaaggacatcaggaagtctgtgccccggggcctgccctacttctctgtggactttggcctgcacggcggctttgcccacgtgattgaggaccagcacaagttcccccactactttgggaaggagatcatcggcggcatgctggacatcgagccccggctgtggaggaagggcatccgggagagctttgaggaccagaggaagaaggccctgcagtttgcccagtggtggaagccctatgacttcaccaagagcaagaactactag

SEQ ID NO: 243435 - DNA, 2229 bp, Artificial Sequence
  derived and/or modified sequence
atggccacctccatggctgctgccagcggccgctttgagagcgccaagagcattgaggagaggaaggagcagaccagaaatgcccgggcagaggtgctgcggcaggccaaggccaactttgagaaggaggagaggaggaaggagctgaagaggctgcggggggaggacacctggatgctgcctgatgtgaatgaaagaattgagcagttcagccaggagcacagcgtgaagaagaagaagaagaaggacaagcacagcaagaaggccaagaaggagaagaagaagaagagcaagaagcagaagtatgagaagaacaatgaaagcagtgacagcagcagcagcagtgaagatgagtgggtggaggccgtgcccagccagaccccagacaaggagaaggcctggaaggtgaaggatgagaagagcggcaaggatgacacccagatcatcaagagagatgagtggatgacagtggacttcatgtctgtgaagacagtgagcagcagcagcctgaaggccgagaaggagaccatgaggaagattgagcaggagaagaaccaggccctggagcagagcaagctgatggagcgggagctgaacccctactggaaggatggcggcaccggcctgcccccagaggactgcagcgtgagcagcatcaccaaggtgtctgtggtggaggatggcggcctgtcctggctgaggaagagctacctgaggatgaaggagcaggccgagaagcagagcaggaactttgaggacatcgtggccgagagatatggctccatggagatcttccagagcaagctggaggatgctgagaaggccgccagcaccaaggaggactacagaagagagcgctggaggaagcccacctacagcgacaaggcccagaactgccaggagagccgggagagtgacctggtgaagtatggcaacagcagccgggacagatatgccaccacagacacagccaagaacagcaacaatgagaagttcatcggagatgagaaggacaagaggcctggcagcctggagacctgccggcgggagagcaacccccggcagaaccaggagttctcctttggaaacctgcgggccaagttcctgcggcccagtgatgatgaggagctgtccttccacagcaagggcaggaagtttgagcccctgagcagcagcagcgccctggtggcccagggcagcctgtgcagcggcttcaggaagcccaccaagaacagcgaggagcggctgacctcctggagcagaagtgatggccgcggggacaagaagcacagcaaccagaagcccagcgagaccagcacagatgagcaccagcacgtgcctgaggacccccgggagaagagccaggatgaggtgctgagagatgatcctcccaagaaggagcacctgcgggacaccaagagcacctttgctggcagccctgagcgggagagcatccacatcctgtctgtggatgagaagaacaagctgggcgccaagatcatcaaggccgagatgatgggcaacatggagctggccgagcagctgaaggtgcagctggagaaggccaacaagttcaaggagaccatcacccagatccccaagaagagcggcgtggagaatgaagaccagcaggaggtgatcctggtgaggacagaccagagcggccgggtgtggcctgtgaacaccccaggcaagagcctggagagccagggcggccgcaggaagaggcagatggtgtccacccatgaggagcgggagcgggtgcgctacttccatgatgatgacaacctgagcctgaatgacctggtgaagaatgagaagatgggcacagctgagaaccagaacaagctgttcatgaggatggccagcaagttcatgggcaagacagatggagactactacaccctggatgacatgtttgtgtccaaggctgctgagcgggagcggctgggggaggaggaggagaaccagaggaagaaggccatcgccgagcacaggagcctggccgcccagatggagaagtgcctgtactgctttgacagcagccagttccccaagcacctgattgtggccatcggcgtgaaggtgtacctgtgcctgcccaacgtgcgcagcctgacagagggccactgcctgattgtgcccctgcagcaccacagagctgccaccctgctggatgaggacatctgggaggagatccagatcaagagcaggacagtcatccagtag

SEQ ID NO: 243436 - DNA, 2685 bp, Artificial Sequence
  derived and/or modified sequence
atggccaccagcatggccgccgccagcggccggttcgagagcgccaaaagcatcgaagagcggaaggaacaaactagaaatgcaagggctgaggtcctcaggcaggcgaaggccaactttgaaaaagaggaacgtcgtaaagagctaaagaggcttcgaggagaggacacatggatgctccccgacgtgaacgagaggatcgaacagttctcgcaagaacacagtgtgaagaagaagaaaaaaaaagacaaacacagcaaaaaggccaagaaggaaaagaagaaaaagtctaagaaacagaagtatgaaaaaaacaatgagtccagcgactcctcttcttcctctgaggacgaatgggtcgaggccgttcctagtcagacaccagacaaagagaaggcgtggaaagtgaaggacgagaagagcgggaaagatgacacccaaataattaagcgcgacgaatggatgacagtcgacttcatgtccgttaagaccgtctcaagctcaagtttgaaggcagaaaaggagacaatgcgcaaaattgaacaagagaagaaccaggccttggagcagtctaagctgatggaacgggagttgaacccttattggaaagacggcggcacaggcctgcctccagaggactgctcggtatctagtatcaccaaggtaagcgtggtggaagacgggggccttagttggctccgcaagtcttacctgagaatgaaggaacaggccgaaaaacagtcgcgaaatttcgaggacattgtggccgagagatatggaagtatggagatcttccagagtaagctggaggatgccgaaaaggcggccagcacgaaggaggattacaggagggagcgatggcggaaacccacatattctgataaggcacagaactgtcaagagagcagagaatcagacctagtgaagtatggaaactcctctcgtgaccggtacgccaccaccgacaccgccaagaacagcaacaatgagaagttcattggtgatgaaaaagataagcgaccaggctctctggagacttgtagacgcgaaagcaatcccagacaaaaccaggagttttccttcggtaaccttagggctaaatttcttcggccttcggatgatgaggagttgtcctttcactcaaagggacggaagttcgaacctctttcatctagctccgctctggtggcccaaggttctctctgtagtggcttcagaaagcccaccaaaaacagtgaggaaaggttaacatcttggagccggtctgatggcagaggagacaaaaagcacagcaatcaaaagcctagcgagacaagcactgatgagcaccagcatgtgccagaggatccgagagagaagagccaggatgaagtgctgagagatgatcctccgaaaaaggagcacctacgcgacactaaatcgacgttcgcgggaagtccggaacgagaatctatccacattctgtcagttgatgaaaaaaataagctgggcgcaaagattattaaggcggagatgatgggtaatatggaactcgccgaacagctcaaggttcaattagaaaaggccaataaatttaaagagacgatcacacagatccctaaaaagagcggggtcgagaacgaggatcaacaggaggtgatcctggtacggactgatcaatcgggacgtgtgtggcccgtcaacaccccgggcaagagcctggagagccagggaggaagaagaaaacggcagatggtgtctacacatgaagaaagagaacgcgtgcggtacttccacgatgacgacaacctgagtctgaacgacctggtgaaaaacgaaaagatgggcactgccgagaaccagaacaaactctttatgaggatggcaagtaagtttatggggaagaccgatggagactattatacactagacgacatgtttgtgagtaaggccgctgaacgggaacgtctgggtgaggaagaggaaaaccagcggaaaaaggccatcgcagagcaccgctccctcgccgcccagatggaaaagtgtctgtattgctttgatagtagccagttcccgaagcatcttatcgttgcgataggcgtgaaggtctatctgtgccttccaaacgtgcggtccctgactgaaggccattgtctgattgtgcccctgcagcaccatagagccgcaaccctgcttgatgaagacatatgggaggaaattcaaatgttcaggaaaagtctggtcaaaatgttcgaggacaagggcctcgattgcatctttctagagaccaacatgtccatgaagaaacagtatcacatggtgtacgagtgcatccctctccccaaggaagtaggggatatggctcccatctattttaagaaggctattatggagtcggatgaggagtggagcatgaacaaaaagctcatagatctcagttccaaggatatccgtaagagcgtgccgagggggctcccttacttctccgttgattttggactgcatgggggatttgcacatgtgattgaggaccaacacaagttcccccattactttggaaaggaaattatcggcggaatgttagatattgagccaagactgtggaggaagggcataagagagtcttttgaagatcagcgtaagaaagccctgcagtttgcgcaatggtggaaaccttacgattttaccaagagcaagaactattag

SEQ ID NO: 243437 - DNA, 2229 bp, Artificial Sequence
  derived and/or modified sequence
atggccaccagcatggccgccgccagcggccggttcgagagcgccaagtccattgaggaacggaaagaacagactcgaaacgcccgagcggaggttctgaggcaggctaaggctaactttgaaaaggaagagcgtaggaaggaattgaaaagactccgaggagaggatacctggatgctgcctgatgtgaacgagaggattgaacagttttcgcaggagcactccgtgaagaagaagaagaaaaaagataagcatagcaagaaggcgaaaaaagaaaaaaaaaagaagtcaaaaaaacagaaatacgaaaagaataatgagagctccgattcttcatcctccagtgaggacgagtgggtcgaggcagttccttcgcagacccccgataaggagaaggcctggaaagtcaaggacgagaagtccgggaaggatgacacccagatcatcaaacgggatgaatggatgacagtggatttcatgtctgtgaaaacagtctcttcaagctccctcaaggctgaaaaagagacgatgaggaagattgaacaggagaagaaccaggctctggagcagtccaaattgatggaaagggagctcaatccctattggaaagacggcggaaccgggctaccgccagaggactgctcggtgtcctccatcacgaaagtgtcagtggtcgaggatgggggtctgtcatggctccggaaatcctatctccggatgaaggagcaggcggagaagcagtcaagaaacttcgaggatattgtggctgagaggtacgggtccatggagatctttcagagcaaacttgaggatgcagagaaagctgcttctaccaaagaggactaccgtcgagaacgctggagaaaacccacatactccgacaaagctcagaattgtcaggaaagtagagagtctgacttggtgaaatatggtaacagcagcagggataggtatgccaccacagatacagcgaagaacagtaacaatgagaaatttatcggggatgagaaggataagcgcccaggcagcctagagacctgccgacgcgaatctaaccccaggcagaaccaagagttttcttttggcaacctccgcgccaagtttctgcggccctctgacgatgaggaactcagttttcacagtaagggtagaaaatttgagccactttcctcttcttccgcattagtcgcccaggggtccctgtgcagcggatttaggaaacctacaaaaaactccgaagaacgtctgacatcctggtcaagaagcgatggacgcggggataaaaagcacagtaatcagaagccgagcgagacttcgaccgacgagcatcagcacgttcccgaggacccgcgcgaaaagtcccaggacgaggtgctcagagatgaccctccaaaaaaggaacacctgagggatactaaaagtaccttcgctggttctccagaacgcgagtcaatccacatcctctcagtggacgaaaagaacaaactgggcgccaagataatcaaagccgaaatgatgggaaatatggagttagcggaacaattgaaggtgcagctggagaaagccaataaattcaaagagaccattacacagattccgaagaaatcaggtgttgaaaatgaagaccagcaggaagtgattcttgtgagaactgaccagtccggacgggtgtggcccgtgaacactcccgggaaatcactagagagtcaagggggcaggcgcaagagacagatggtgagcacccatgaagaacgggagagggtacgctatttccacgacgatgataatctgagcctcaacgacctggtcaagaacgagaagatgggcacagcggaaaaccagaacaagttgttcatgagaatggcctccaaattcatgggaaaaacggacggagactattatactctcgatgatatgtttgtctctaaggccgccgagagagagaggctcggggaggaagaagagaatcaacggaaaaaggcaatcgcagaacacagaagcctggccgctcagatggagaagtgtttgtactgcttcgacagtagtcaatttcccaagcatttaatcgtggccattggggtgaaagtctatctgtgcctccccaatgttcgctccttaaccgaaggacactgcctcatcgttccactgcagcatcatagagccgcaaccctgctggatgaggacatttgggaggaaattcagataaagtcacgaacagtgattcagtag

SEQ ID NO: 243438 - DNA, 2685 bp, Artificial Sequence
  derived and/or modified sequence
atggccactagcatggccgcagcatctgggagattcgagtccgccaaatctattgaggaacgaaaagaacaaacacgaaatgccagggccgaggtgctgcgacaagcgaaagccaacttcgagaaggaagagcgccgaaaagaactgaaacgcctgaggggcgaggacacttggatgctgcccgacgtgaacgaacgaatcgaacaattctctcaagaacactccgttaaaaagaaaaagaagaaggataaacactcaaaaaaagcgaagaaagagaagaagaaaaagtccaagaagcagaaatatgaaaagaataatgaatcctccgattcttcaagctcaagcgaggatgagtgggttgaagctgtaccttcgcagactccggataaggagaaggcctggaaagtgaaagacgaaaagtccggaaaagacgatacacaaatcatcaaaagggacgaatggatgaccgtggatttcatgtccgtcaagactgtgagttcatctagtttgaaggccgaaaaggaaacaatgagaaaaatagagcaggaaaaaaaccaggctttagagcagtctaaactcatggagcgcgagctcaatccttactggaaggatgggggtaccggtctgcccccagaggactgttccgtgagcagcattactaaagtgtctgttgtcgaggatgggggactcagttggctccgtaaatcctacctcaggatgaaagagcaggcagaaaagcagagcaggaacttcgaggacatcgtggccgagcgctacggtagtatggagatctttcaatccaagctggaggatgctgagaaagcagcatcaactaaagaagattataggagggaacgatggcgcaaacctacttattcagataaagcacagaattgtcaggaatctagggaatctgatctggttaagtacggtaacagtagtagagacaggtacgctacaactgatacggccaagaattccaacaacgagaagtttatcggggacgagaaagacaaacggcctggctccctagagacctgtcgtagggagagcaaccctagacaaaatcaggagttcagcttcgggaacttgcgcgcaaaatttctgcgcccatcggatgacgaggagctgtcctttcattctaaaggccgtaaatttgaaccgctgtcctcgtcctctgcactggtggcccaggggagtttgtgttccggctttaggaagcctaccaagaactcagaggaaaggctcacctcctggagtaggagtgacggtcgaggcgataagaagcactcgaaccagaaaccatccgaaacatctaccgacgagcatcaacacgtgcccgaagatcccagagaaaagagtcaagatgaggtgcttagagacgatcctccaaagaaggaacacctgcgcgataccaagagcacttttgccggtagccctgaaagagaatcgatccacatcctgtcagtcgacgaaaagaataaactcggagcaaagattattaaggctgaaatgatggggaacatggagctggctgaacagttaaaggtgcaattggaaaaggctaacaagtttaaagaaactatcacccagatcccaaaaaagtcgggggtagaaaacgaagaccagcaggaggtcatcctcgtgagaacagatcagagcggccgagtgtggcccgtgaatacccccggaaaatcattggagtcgcaaggtgggagacggaaaaggcagatggtcagtactcatgaggagagagaaagggtccgatattttcatgatgacgacaacctctcgctgaatgacctggtcaagaacgaaaagatggggacagcggagaatcagaacaagttgttcatgagaatggcctctaagttcatggggaaaaccgacggagactattatacattggatgatatgttcgtgtccaaggccgctgaacgtgagcggctaggtgaagaagaggagaaccagcggaaaaaggccatcgcagagcaccggtccctggccgcacaaatggaaaagtgcctgtattgtttcgactcatctcagtttcctaagcacttaatagttgcaatcggggtgaaggtgtacctgtgccttcccaacgtacggtctctgacggagggtcactgtttgatcgttcccttacagcaccacagagcggctacacttcttgatgaagacatctgggaggaaattcagatgttccgcaaaagtctggttaaaatgttcgaagacaaggggttggactgtattttcctggaaactaacatgtctatgaagaagcagtaccatatggtttatgagtgcatcccactgccgaaggaggtgggagacatggcccctatttacttcaagaaggcgatcatggagtcagatgaggaatggagtatgaataagaaattaatcgacctttcctccaaggatatcagaaagtctgtgccacgtgggctgccatatttcagcgttgatttcggacttcatggcggattcgctcacgtgatcgaagaccagcataaatttccccactactttggaaaagagattatcgggggaatgctggatatagagcctcgtctttggaggaaaggcatcagggagtcatttgaggatcagagaaaaaaggccctccagttcgcacagtggtggaagccttacgactttacaaagagcaagaactattag

SEQ ID NO: 243439 - DNA, 2229 bp, Artificial Sequence
  derived and/or modified sequence
atggctacttcaatggccgcagcaagcggaagattcgaatcagctaaatccattgaggaacgaaaagagcagacaagaaacgctcgggcagaggtgcttcgacaggcaaaagctaacttcgagaaggaggagaggcgaaaggagctgaagcggctacgtggtgaagacacctggatgcttccagatgtgaacgagcggattgagcaattttctcaggagcattccgtgaagaagaaaaagaagaaggataaacatagcaaaaaagctaagaaggagaagaaaaaaaaatcgaaaaaacagaagtacgaaaaaaataacgagagctctgatagctcttccagctcggaggatgagtgggtagaagccgtgccatcacagactcccgataaggagaaggcctggaaggttaaggacgagaaatctggaaaggacgacactcagataataaaacgggacgagtggatgaccgtggattttatgagcgtcaaaactgtctcatcatcttcattgaaggcagagaaggagactatgaggaaaatcgagcaggaaaaaaaccaagctctcgaacaatcgaaactgatggaacgggagttgaacccctactggaaggacgggggaactgggctcccaccggaagactgtagcgttagctctattactaaagtgtcggttgttgaagatggaggactgtcttggttacgtaagtcttacctgaggatgaaggaacaagctgagaaacaatccagaaacttcgaggatatagttgcagagcggtatggttcaatggagattttccagtctaaacttgaagatgcggaaaaagccgctagcactaaggaagactaccggcgagaaaggtggcgaaagcccacttattcagacaaagcccagaactgtcaggaatccagagaatctgatctggtgaaatacggtaatagcagcagagatagatacgcgacaacagatacagctaaaaattctaacaacgaaaaattcataggggatgaaaaagacaagcgccctggaagcctggagacatgcagacgggaatcgaatcccagacagaaccaggagttctcctttggtaacctgagggcaaagtttcttaggccaagcgatgatgaggagctgtcttttcactccaagggcaggaaattcgaacctctttccagctccagcgctctggtcgctcaggggtcattatgttccggctttagaaagcctactaaaaactctgaagagagactcacaagctggtctaggtcagacggtcggggagataagaaacattccaatcagaaacccagcgagacctccacagacgagcatcagcacgtgcccgaagacccacgggaaaagagccaggacgaagtgctgcgggatgatcccccaaaaaaggagcacttacgggatactaagtcaacattcgccggaagccccgaaagagaatctatccacattctttctgtggatgagaagaataagctcggagctaaaattataaaagctgagatgatggggaatatggagttggccgagcagctcaaggtgcagcttgagaaggccaataaattcaaagaaacaataactcagatcccaaaaaagtccggcgtagaaaacgaggatcagcaagaggtgattctcgtgcgtaccgatcagtcagggagagtgtggcctgtgaatacaccaggcaagtcactagaaagtcagggtgggcgacgcaaaagacagatggtgtccactcacgaggagcgtgagagagtgcgctacttccacgatgacgacaatctaagtctgaatgatctcgtgaaaaatgaaaaaatgggcacagccgaaaaccagaataagttgttcatgaggatggcaagtaaatttatggggaaaaccgatggtgactactacaccttggatgacatgttcgtaagcaaggcagccgagagagagagactgggggaggaggaagagaaccagaggaagaaggccatcgcagaacatcggtctcttgccgctcaaatggaaaaatgtttgtactgttttgattcttcccaattccccaaacatctgattgttgctataggagtcaaggtttacctctgtttgccaaatgttagaagcctgactgaagggcactgtctcatcgtgccattgcagcatcaccgagctgccaccctcctcgacgaagatatttgggaggaaatccagattaaatccagaacggttatacagtag

SEQ ID NO: 243440 - protein, 261 aa, Artificial Sequence
  derived and/or modified sequence
MIYKCPMCREFFSERADLFMHQKIHTAEKPHKCDKCDKGFFHISELHIHWRDHTGEKVYKCDDCGKDFSTTTKLNRHKKIHTVEKPYKCYECGKAFNWSSHLQIHMRVHTGEKPYVCSECGRGFSNSSNLCMHQRVHTGEKPFKCEECGKAFRHTSSLCMHQRVHTGEKPYKCYECGKAFSQSSSLCIHQRVHTGEKPYRCCGCGKAFSQSSSLCIHQRVHTGEKPFKCDECGKAFSQSTSLCIHQRVHTKERNHLKISVI

SEQ ID NO: 243441 - protein, 199 aa, Artificial Sequence
  derived and/or modified sequence
MIVVRILALQQNLIDIRKSTQWRSPINVTSGKAFNWSSHLQIHMRVHTGEKPYVCSECGRGFSNSSNLCMHQRVHTGEKPFKCEECGKAFRHTSSLCMHQRVHTGEKPYKCYECGKAFSQSSSLCIHQRVHTGEKPYRCCGCGKAFSQSSSLCIHQRVHTGEKPFKCDECGKAFSQSTSLCIHQRVHTKERNHLKISVI

SEQ ID NO: 243442 - DNA, 786 bp, Artificial Sequence
  derived and/or modified sequence
atgatctacaagtgccccatgtgcagagagttcttcagcgagagagccgacctgttcatgcaccagaagatccacaccgccgagaagccccacaagtgcgacaagtgcgacaagggcttcttccacatcagcgagctgcacatccactggagagaccacaccggcgagaaggtgtacaagtgcgacgactgcggcaaggacttcagcaccaccaccaagctgaacagacacaagaagatccacaccgtggagaagccctacaagtgctacgagtgcggcaaggccttcaactggagcagccacctgcagatccacatgagagtgcacaccggcgagaagccctacgtgtgcagcgagtgcggcagaggcttcagcaacagcagcaacctgtgcatgcaccagagagtgcacaccggcgagaagcccttcaagtgcgaggagtgcggcaaggccttcagacacaccagcagcctgtgcatgcaccagagagtgcacaccggcgagaagccctacaagtgctacgagtgcggcaaggccttcagccagagcagcagcctgtgcatccaccagagagtgcacaccggcgagaagccctacagatgctgcggctgcggcaaggccttcagccagagcagcagcctgtgcatccaccagagagtgcacaccggcgagaagcccttcaagtgcgacgagtgcggcaaggccttcagccagagcaccagcctgtgcatccaccagagagtgcacaccaaggagagaaaccacctgaagatcagcgtgatctag

SEQ ID NO: 243443 - DNA, 600 bp, Artificial Sequence
  derived and/or modified sequence
atgatcgtggtgagaatcctggccctgcagcagaacctgatcgacatcagaaagagcacccagtggagaagccccatcaacgtgaccagcggcaaggccttcaactggagcagccacctgcagatccacatgagagtgcacaccggcgagaagccctacgtgtgcagcgagtgcggcagaggcttcagcaacagcagcaacctgtgcatgcaccagagagtgcacaccggcgagaagcccttcaagtgcgaggagtgcggcaaggccttcagacacaccagcagcctgtgcatgcaccagagagtgcacaccggcgagaagccctacaagtgctacgagtgcggcaaggccttcagccagagcagcagcctgtgcatccaccagagagtgcacaccggcgagaagccctacagatgctgcggctgcggcaaggccttcagccagagcagcagcctgtgcatccaccagagagtgcacaccggcgagaagcccttcaagtgcgacgagtgcggcaaggccttcagccagagcaccagcctgtgcatccaccagagagtgcacaccaaggagagaaaccacctgaagatcagcgtgatctag

SEQ ID NO: 243444 - DNA, 786 bp, Artificial Sequence
  derived and/or modified sequence
atgatttacaaatgccctatgtgtagagagttcttctccgagagggcagatttgttcatgcaccaaaaaatccacaccgccgagaaaccacataagtgtgacaaatgcgacaagggattcttccatattagcgaattgcatatccactggagggatcatactggagaaaaagtgtacaaatgcgacgattgcggaaaagattttagtactaccaccaagctgaatcggcataaaaaaatccacaccgtggagaagccctataagtgctacgaatgtggcaaggccttcaattggtcttcacatctccagatacatatgcgagttcataccggggaaaagccttatgtgtgcagtgaatgcggtcgggggttttctaattcctctaacctctgtatgcatcaacgagtccacacgggtgaaaagccgttcaaatgtgaggaatgcggcaaagcattccggcacacaagcagcctgtgcatgcatcagcgggtgcacacgggggagaagccttataaatgctatgagtgtggaaaggctttcagtcaatcatcctctctgtgtatacatcagcgcgttcatacaggcgagaaaccttacagatgttgcggatgcgggaaggccttctctcagtctagctcactatgcatccatcagcgtgtgcataccggcgagaagccattcaaatgtgacgaatgtggcaaggccttctcccagtccacatcactgtgtattcaccagcgggtgcacactaaggagagaaaccatctgaaaatctcggtgatctag

SEQ ID NO: 243445 - DNA, 786 bp, Artificial Sequence
  derived and/or modified sequence
atgatctataaatgcccaatgtgcagagaattcttcagcgagcgggccgatctgtttatgcaccagaagatccacaccgcagaaaaacctcacaaatgtgacaagtgtgacaaaggtttcttccacatcagcgaactgcatatccattggagggaccacactggtgagaaagtttataagtgtgatgattgcggaaaagacttcagtaccacaacaaagctgaatcggcacaagaagattcacacagtggagaagccctataaatgttatgagtgcggcaaggccttcaattggtctagccacttacagattcacatgcgcgttcatactggtgaaaagccatacgtgtgtagcgaatgcggacggggattcagcaactctagcaacctgtgcatgcaccaacgcgtgcatacgggggaaaagcctttcaaatgtgaggaatgtggtaaagcgtttaggcatacttcctccctctgcatgcaccagcgagtgcacaccggggagaagccttataagtgttacgagtgcggcaaggccttctcacagtccagctcactatgcattcaccagagagttcatactggcgaaaaaccgtatcgctgttgcgggtgtggaaaggctttcagtcagagtagttccctgtgtatacaccagcgggttcatactggggagaagcccttcaagtgcgacgagtgcgggaaagcatttagtcagagcacgtccctctgcattcaccagcgagtgcatacaaaggagcgtaaccacctgaaaatttccgtgatctag

SEQ ID NO: 243446 - DNA, 600 bp, Artificial Sequence
  derived and/or modified sequence
atgatcgtggtccgaatactggccttacaacagaacctgattgacatcaggaagtcaacccagtggagatcccctatcaacgttacttccggcaaagcgttcaactggtcctcacacttgcagatacacatgcgtgtccacactggtgagaaaccatatgtctgttccgaatgcggccggggcttctcgaatagcagcaacctttgcatgcaccagagggtgcacactggtgaaaagccctttaaatgtgaagagtgcggaaaggccttcagacatacgagcagcttgtgcatgcaccagagggtgcatactggggagaaaccctacaagtgttacgagtgcgggaaagcgttctctcagtcttccagtctctgcatccatcaaagggtccatactggggagaagccgtacaggtgttgcggatgtggcaaggcgttctcccagagcagctccctgtgcatacaccaaagggtccatacaggagagaagccctttaagtgcgatgaatgcggcaaggccttctcacagtccacctcgctctgcattcaccagagggttcatacaaaagaaaggaaccaccttaagatctccgtaatctag

SEQ ID NO: 243447 - DNA, 786 bp, Artificial Sequence
  derived and/or modified sequence
atgatctataaatgtccaatgtgccgggagtttttttctgagagggccgacctgtttatgcaccagaagattcacaccgccgagaagccgcacaagtgcgacaaatgcgacaagggctttttccatatcagcgagttacacattcactggcgagaccacacaggcgaaaaggtctataaatgtgacgactgcgggaaggacttctccaccaccactaagctcaaccgccataagaagatccacacagtagaaaagccttacaaatgttatgaatgcggaaaagcttttaattggtctagtcatctgcaaattcatatgcgcgtgcacacaggagagaaaccctatgtatgcagcgaatgtggacgcggtttcagtaactccagcaacctatgcatgcaccagagggttcacaccggggaaaagccttttaagtgtgaggaatgcggcaaggccttccgccacacctcgtctctgtgcatgcatcaaagagtccacacaggggagaagccatacaagtgttacgaatgtggcaaggccttcagtcagtcatcttccctgtgcattcaccagcgagtgcacactggagagaagccttacaggtgttgcgggtgcgggaaggctttttcccagtcaagttccttgtgcatccatcagcgggtccatactggcgagaaaccctttaaatgcgacgaatgtgggaaggcatttagccagagcacatcactctgtatacatcaaagggtccatactaaggagcgcaaccacctgaagataagtgtgatctag

SEQ ID NO: 243448 - DNA, 786 bp, Artificial Sequence
  derived and/or modified sequence
atgatctacaaatgccccatgtgccgcgagttttttagcgagcgggccgacctgttcatgcatcagaagattcacaccgcagaaaaaccacacaagtgcgacaagtgcgataaagggttctttcacatctctgaattgcacattcactggcgagaccacacaggcgaaaaagtatacaagtgtgatgattgcggcaaggattttagcactaccaccaagctgaaccgacacaagaaaatccacacggtggaaaagccctataagtgctacgagtgtggaaaggcctttaattggtctagccacttacaaattcatatgcgagtccacacgggagagaagccctatgtgtgctctgagtgcggacgcggattctccaacagctccaatttgtgcatgcaccagcgagtgcacacaggcgagaagccattcaagtgcgaggagtgcggaaaggcttttcgccacacatcttccctgtgtatgcaccagcgggtccacacgggcgaaaaaccatataagtgctatgagtgtggaaaggcgttctcccagagctcgagcttatgtatccatcaaagagtacacaccggtgagaagccttatcggtgctgcgggtgtggcaaggcctttagccagtcttcttctctttgtattcaccagcgtgtccatacaggtgaaaaacctttcaagtgcgacgagtgcgggaaggctttttctcaatccacatctctgtgcatacatcagcgagtgcataccaaggagcgaaatcacctgaaaatctcagtcatatag

SEQ ID NO: 243449 - DNA, 786 bp, Artificial Sequence
  derived and/or modified sequence
atgatctacaagtgccccatgtgccgggagttcttcagcgagagagctgacctcttcatgcaccagaagatccacacagctgagaagccccacaagtgtgacaagtgtgacaagggcttcttccacatcagcgagctgcacatccactggagggaccacactggagagaaggtgtacaagtgtgatgactgtgggaaggacttcagcaccaccaccaagctgaacagacacaagaagatccacacagtggagaagccctacaagtgctatgaatgtgggaaggccttcaactggagcagccacctgcagatccacatgagggtgcacactggagagaagccctacgtgtgcagtgaatgtggccggggcttcagcaacagcagcaacctgtgcatgcaccagagggtgcacactggagagaagcccttcaagtgtgaagaatgtgggaaggccttccgccacaccagcagcctgtgcatgcaccagagggtgcacactggagagaagccctacaagtgctatgaatgtgggaaggccttcagccagagcagcagcctgtgcatccaccagagggtgcacactggagagaagccctaccgctgctgcggctgtgggaaggccttcagccagagcagcagcctgtgcatccaccagagggtgcacactggagagaagcccttcaagtgtgatgaatgtgggaaggccttcagccagagcaccagcctgtgcatccaccagagggtgcacaccaaggagaggaaccacctgaagatcagcgtcatctag

SEQ ID NO: 243450 - DNA, 600 bp, Artificial Sequence
  derived and/or modified sequence
atgattgtggtgcgcatcctggccctgcagcagaacctgattgacatcaggaagagcacccagtggaggagccccatcaacgtgaccagcggcaaggccttcaactggagcagccacctgcagatccacatgagggtgcacactggagagaagccctacgtgtgcagtgaatgtggccggggcttcagcaacagcagcaacctgtgcatgcaccagagggtgcacactggagagaagcccttcaagtgtgaagaatgtgggaaggccttccgccacaccagcagcctgtgcatgcaccagagggtgcacactggagagaagccctacaagtgctatgaatgtgggaaggccttcagccagagcagcagcctgtgcatccaccagagggtgcacactggagagaagccctaccgctgctgcggctgtgggaaggccttcagccagagcagcagcctgtgcatccaccagagggtgcacactggagagaagcccttcaagtgtgatgaatgtgggaaggccttcagccagagcaccagcctgtgcatccaccagagggtgcacaccaaggagaggaaccacctgaagatcagcgtcatctag

SEQ ID NO: 243451 - DNA, 786 bp, Artificial Sequence
  derived and/or modified sequence
atgatctacaagtgccccatgtgccgggagttcttcagcgagcgggcagatctgttcatgcatcaaaaaatccatactgctgagaaacctcataagtgcgataagtgcgacaagggctttttccacattagtgaattacacattcactggcgagatcatactggcgagaaggtttacaaatgcgatgactgtggcaaggacttctcaacaaccacaaagctgaaccgccacaaaaagattcacaccgtcgagaaaccctataaatgctacgagtgcggcaaagcattcaattggagctcccatctacagatccacatgcgggtgcacactggggagaagccatatgtctgttccgagtgcggtaggggcttttcaaactcatcaaacctctgtatgcatcaacgtgtccatactggcgaaaaaccattcaagtgcgaggagtgcggcaaagcttttcggcatacctcaagtctctgcatgcatcagagagtgcataccggtgagaagccatataaatgctacgagtgcggaaaggcattttcccaatccagctccctgtgtattcaccagcgggttcacacaggcgagaagccatatagatgttgcggctgtgggaaagcctttagccagtcctcatccctgtgtatccaccagagggtccataccggagaaaagcccttcaagtgcgacgaatgcgggaaagcgttctctcagtctacgagtttgtgtatacaccaaagggttcacactaaagagaggaatcatcttaaaatctcagtgatctag

SEQ ID NO: 243452 - DNA, 786 bp, Artificial Sequence
  derived and/or modified sequence
atgatctacaagtgccccatgtgccgggagttcttcagcgagcgggccgatctctttatgcaccagaagatccataccgccgagaagccgcacaaatgtgacaagtgcgacaagggtttttttcacattagcgagcttcatatacattggagagatcacactggggagaaggtgtacaagtgcgacgactgcggcaaggacttctccacaactacaaagctcaaccgccataaaaaaatccacaccgtggagaaaccctacaaatgctatgaatgtgggaaagctttcaactggtcaagccacctccagatacatatgcgcgtgcacacgggtgagaagccatacgtgtgttccgagtgtgggagggggtttagcaacagcagcaacctgtgtatgcatcaacgcgtgcacaccggagagaaaccattcaaatgcgaagaatgcgggaaggctttcaggcatacctcctccctgtgcatgcaccagagggtacacactggtgagaagccgtataaatgctacgagtgtggaaaggcattttcgcagagcagctccctctgtatacaccagagagtgcatacgggggaaaagccttaccgatgttgcggttgcggcaaagcctttagtcaatcatcctccctctgcatccaccaacgcgtacatactggggaaaagccttttaaatgcgatgagtgcggcaaggccttttctcaaagtacatctctgtgcattcaccagcgcgtacatacaaaagagcgcaatcacctgaagatcagtgtgatttag

SEQ ID NO: 243453 - DNA, 600 bp, Artificial Sequence
  derived and/or modified sequence
atgatcgtggtgcggatcctggccctgcagcagaacctgatcgacatacgcaagtccactcagtggagaagtcccataaatgtgaccagtggcaaggccttcaattggtccagccaccttcagatccacatgcgggtacatacaggcgaaaaaccctacgtctgctccgagtgtggccgtggatttagcaacagctctaacctctgtatgcaccagcgcgtccatactggcgaaaaacctttcaagtgcgaggagtgtggcaaggcgttccgtcacacatcttcactctgcatgcatcagcgagtccacaccggggagaaaccctacaaatgctacgaatgcggcaaggctttctcccagagcagctctctgtgcatccatcagcgcgtgcacacgggagagaaaccctatagatgctgcggctgcgggaaggccttttctcaatcaagttctttatgtattcatcaacgcgttcacacaggcgaaaaaccctttaagtgcgatgagtgcggtaaagcatttagccagtctacatccctgtgtattcatcagcgcgtgcatacaaaggaacgcaaccatctaaaaatatccgtgatctag

SEQ ID NO: 243454 - DNA, 786 bp, Artificial Sequence
  derived and/or modified sequence
atgatctacaagtgccccatgtgccgggagttcttcagcgagcgggccgatctcttcatgcatcagaagatccacacagcagagaaaccccataagtgcgataaatgcgataagggattttttcacatttcggagctgcacatacactggagagaccacacgggagaaaaggtgtacaagtgcgatgattgtgggaaagacttcagtactaccacaaaacttaatcgacacaagaagatccacaccgttgaaaagccctacaagtgttacgaatgcggtaaggctttcaattggagcagccaccttcagattcatatgcgggtccatacaggtgaaaaaccttatgtctgctctgagtgcggccggggcttctccaactcctccaatctctgcatgcatcaacgagttcatacaggcgaaaagccattcaagtgcgaagagtgcgggaaggccttccgccatacctcaagcctctgcatgcaccaacgtgtacacacaggtgagaaaccatacaaatgttacgagtgcggtaaggcatttagccagagcagctcactgtgtatccaccaacgtgtgcatactggggagaagccataccggtgctgtggatgtgggaaagccttctctcagtcctcctcgttatgcatccatcaaagagttcatacaggcgagaaaccgttcaaatgtgacgaatgcggaaaggcctttagccagtcgactagcctctgcatccaccaaagagtacacactaaagagaggaaccatctgaaaattagtgtcatttag

SEQ ID NO: 243455 - DNA, 786 bp, Artificial Sequence
  derived and/or modified sequence
atgatctacaagtgccccatgtgccgggagttcttcagcgagcgggccgacctgttcatgcaccagaagatacacacagccgagaaaccacataagtgcgacaagtgcgacaaaggcttttttcacattagcgaattacatatccactggcgcgatcacaccggtgaaaaggtttacaaatgcgacgattgcggaaaagatttcagtactacaacaaagcttaaccggcacaagaaaatccacactgtagaaaagccttataaatgctacgaatgtggaaaagcatttaattggtccagtcacttgcagattcatatgcgggtgcacacaggggagaagccctatgtatgtagcgaatgcggtcggggatttagtaatagctcaaacctctgcatgcatcagagagtccacaccggggaaaagccctttaagtgcgaagagtgcgggaaagcatttcgccacacatcaagtctgtgtatgcatcagagagttcacacgggggaaaaaccttacaaatgctatgagtgtggtaaagcattcagccaatcttcatccctgtgtattcatcagagggttcacaccggcgaaaaaccttacaggtgttgcggttgtggcaaagctttcagtcagtcctctagtctatgtatccaccagcgagttcacacaggcgagaaaccgttcaagtgtgacgagtgtgggaaagcgtttagccaaagcacttctttatgcatccaccaacgcgtgcacacaaaagagcggaaccatttaaaaatctcggtgatctag

SEQ ID NO: 243456 - DNA, 786 bp, Artificial Sequence
  derived and/or modified sequence
atgatctacaagtgtcctatgtgtcgcgaatttttttcagaacgggcagatcttttcatgcaccagaagatccataccgcagagaaaccacacaaatgcgacaaatgtgacaaaggattcttccacatcagtgagctgcacatccactggcgggaccataccggtgagaaggtatacaaatgtgacgattgcggcaaagactttagcactaccacaaagctcaataggcacaaaaaaatacacaccgtagaaaagccatacaagtgttacgagtgtgggaaagcatttaattggtcatcccacttgcaaatccacatgcgggtccataccggcgaaaagccgtatgtgtgcagcgaatgtggccgaggcttttctaacagttctaacctgtgtatgcaccagcgcgtgcacaccggggagaagccattcaagtgcgaggagtgcgggaaggcattccggcacacaagctcactctgcatgcaccaaagggtgcatactggtgagaagccttataaatgttatgaatgtgggaaagctttcagtcagtctagtagcctctgtatccaccagcgcgtccataccggggaaaagccctatcggtgttgcgggtgtggcaaggcattttctcagagctcaagcctgtgcattcatcagcgggtacacacaggcgagaagcccttcaagtgcgatgaatgcgggaaagccttctcccagagcacaagtctttgcatacaccagagggtgcatactaaggagcgaaaccatctgaagatatccgtgatttag

SEQ ID NO: 243457 - DNA, 786 bp, Artificial Sequence
  derived and/or modified sequence
atgatatataagtgtccaatgtgtcgcgagtttttctcagagagagcggacctgtttatgcaccagaaaatccatacagccgagaagcctcacaaatgtgataaatgtgacaagggcttctttcatattagcgagttgcacattcattggagagaccacactggggagaaagtgtacaagtgtgatgattgtgggaaggatttctcgactacaaccaagctcaaccgccataaaaagattcacactgttgagaaaccttacaagtgctacgagtgcggcaaggcatttaattggagctcacatctgcagattcacatgcgggtacacacaggggagaagccctatgtttgctctgaatgcggcagaggattctctaatagcagcaatctgtgtatgcaccaacgcgtgcataccggagagaaaccgttcaaatgcgaggagtgcggtaaggcgttccgacacacaagttccttgtgcatgcatcagagggtgcacacaggggagaaaccctataagtgctatgagtgtggaaaagctttctctcagagcagctctctgtgtatccatcaaagagtgcacaccggagaaaaaccttaccgctgttgtggctgcggcaaggcattctctcagagctccagcctatgcattcaccaaagggtacacacaggggagaagccatttaagtgtgatgagtgtggcaaggccttttctcagtcaacgtccctgtgtatccatcagagagtgcacaccaaggagcgcaaccacctcaagatctcagtaatttag

SEQ ID NO: 243458 - DNA, 600 bp, Artificial Sequence
  derived and/or modified sequence
atgattgttgtgagaatattagccctccagcagaacctgattgatatccggaagtcaacacagtggcggtctcctatcaacgtaacatctggcaaggccttcaattggtcaagtcacctccaaattcatatgcgagtgcataccggcgaaaagccgtatgtgtgtagtgagtgcggccgaggcttcagcaactccagtaatctctgtatgcatcaaagagtacatacaggagagaagcccttcaagtgcgaagagtgcggtaaagcgtttcgccatacaagtagtctgtgtatgcatcaacgggtgcataccggtgagaaaccctacaagtgctatgaatgtggcaaggctttctctcaaagctcctccctgtgcatccaccaacgcgtgcacaccggcgagaaaccgtatcgttgttgcggttgcggaaaagcctttagtcagtcgtcttcactgtgcatccatcagagagtgcatactggggagaaaccttttaagtgtgacgagtgcggtaaggcgttttcccagtccactagcctttgtatacatcaacgcgtgcacacgaaggagagaaatcacctgaagatctccgttatctag

SEQ ID NO: 243459 - DNA, 786 bp, Artificial Sequence
  derived and/or modified sequence
atgatctataaatgtcccatgtgcagggagttttttagcgaacgggctgatctgttcatgcaccagaagatccataccgctgaaaagcctcacaagtgcgacaagtgtgataaaggcttttttcatatctccgaactacacatacattggcgcgaccacacaggcgaaaaagtctataagtgcgacgactgcgggaaggacttttctactaccaccaaactgaatagacacaagaaaatacacacggttgaaaaaccttacaaatgttacgaatgcggaaaagccttcaactggagcagccacctgcaaattcacatgcgcgtccatacaggtgaaaagccttatgtgtgtagtgagtgcggtcgcggttttagtaatagtagtaatttatgcatgcaccagcgcgtgcacacgggagaaaagccttttaaatgtgaggagtgtgggaaggcgtttaggcacacatcctccctttgcatgcaccaaagggtgcacactggcgagaaaccctataagtgctatgagtgcgggaaagccttctcacagtcatcttctctgtgtattcaccagcgggtgcacaccggagagaagccttacaggtgctgcggctgcgggaaggcgttctcccagtcttcttccctgtgtattcaccaacgcgtccacacgggagagaagccgtttaagtgtgacgagtgtggtaaggccttttcccagtcgacttcactgtgcatccatcaaagagtgcatactaaggaaaggaatcaccttaaaattagcgtgatctag

SEQ ID NO: 243460 - DNA, 786 bp, Artificial Sequence
  derived and/or modified sequence
atgatctacaagtgtccaatgtgtagagaatttttttccgagcgggctgacctgtttatgcaccagaagatccacacagctgaaaagccacataaatgcgataagtgtgacaaggggttcttccacatttctgagctgcatattcactggagggaccatacaggcgagaaggtctataaatgtgatgactgtggtaaagactttagtacaacaaccaaactgaataggcataagaagatccatacagtggaaaaaccctataagtgttacgaatgcggcaaggcattcaattggtcctctcacctccagatccacatgagagttcatacaggtgagaagccctacgtttgctcagagtgcggacggggattctcaaacagcagtaatctgtgtatgcatcaacgagtgcacactggcgaaaaaccattcaagtgtgaggagtgcgggaaagctttccgccacacgagctccttgtgcatgcatcagcgtgttcatactggggaaaaaccctacaaatgctatgagtgcggaaaggccttctcacagtcctcttcattgtgtatccaccaaagagtgcatacaggcgagaaaccctacaggtgctgcggctgcggaaaagcgttctcgcagagttcatctctctgcatccatcaacgcgtgcacacaggagagaaaccattcaagtgtgacgaatgcggaaaagctttcagtcagtctacttctctctgcattcatcagagggttcacactaaagagcgcaatcatctcaagatcagtgtgatttag

SEQ ID NO: 243461 - DNA, 4227 bp, Artificial Sequence
  derived and/or modified sequence
gagagggaggtgggtgcgcggcgcccgcggcctggggcgctgactcccctcacttggaggcgccctgcgtccggcagaggaggcgagcatcccgctcaggtgatgaggaacccctcgcgcacccagcgcagaaggctgctgccgccggacgcctccattgtttgaccacaacaagggccggattctcacccagcaggatcctaaggcctttgtagtccttcagccactgtgggccctgcctctgcctgttcttctggaatgtcttgggggttttgatcctgtcactgtgacctgcaaatccaagagacacatctttggaagataagagagcttcttcaagaccaaaaaaggagacggcatgatacccatgtagggaattccccaaagcagggcttgccatacctggaccccgaggagcctgcttgctggaaaggctttcctgtctgatgtgcaggaggcagaatgccaaactgactcttcaaggggcaactgcaggggctcgagaccagccagcagtatctcatccttcgatacaggggatatactgtacagtcctttttctagaagtgagacatacaagattactctacaagaggaagattccaggggctcaaaaacgcaaaggtttgcactttgagagccccttggaatgttgacaactcaggatctaaaacaaagttctgtgttaatgagttacagaattcacgtggaagtcaatgtcactttataatcgataataatactgagtgaggaacactatgcaggaagaaaccttccgtagaaagacaggcagggaaaagcttaggctgaccttaaacttacctaatagagcaagcctgagatagactgccaaaatggccaaataagagactctatgaaataacagtcttgtaactgtagtaatcataaggaaattttctccttgaaatcacgataccaaataggaaaaatgatctacaagtgccccatgtgtagggaatttttctctgagagagcagatctttttatgcatcagaaaattcacacagctgagaagccccataaatgtgacaagtgtgataagggtttctttcatatatcagaacttcatattcattggagagaccatacaggagagaaggtctataaatgtgatgattgtggtaaggattttagcactacaacaaaacttaatagacataagaaaatccacacagtggagaagccctataaatgttacgagtgtggcaaagccttcaattggagctcccatcttcaaattcatatgagagttcatacaggtgagaaaccgtatgtctgtagtgagtgtggaaggggctttagtaatagttcaaacctttgcatgcatcagagagtccacaccggagagaagccctttaaatgtgaagagtgtgggaaggccttcaggcacacctccagcctctgcatgcatcaaagagtccacacaggagagaaaccctataaatgttatgagtgtgggaaggcgttcagtcagagttcgagcctctgcatccaccagagagtccacactggagagaaaccctatagatgttgtggatgtgggaaggccttcagtcagagttcgagcctgtgcatccaccagagagtccacacaggagagaaacctttcaaatgtgatgagtgcggaaaggccttcagtcagagtacgagcctctgcatccaccagagagtccacacaaaggagagaaaccatctcaaaatatcagttatataaaacgttttgctaagagtttaaaatcttaaaacccataagtgccactaggaaggaaaccctgtatatacctacattgacccaagaaatatttacgcaatccctagcagaacattgtttctgaggaggcatatgtgagattgatttgttggttcatgccaagtgtgttccacaggttgactttgaatgtggacctctgagcatccacgcaggatggctctcaggtcccagtcacagacgtcgcttcctgggattccagcacgatgcctccatagttgaaagactacacaaaaagccacaatcattgcccggcctcctgagtcaccttctatctatactttgcttaaaagctatcccagatactcccccttgaggagctcatgcccttccttcctctttattcgagcatactggcaatgcattggaaaacagacagctcccactaagatcacgttctggtatttctgaggttaacacttgatttagcccctacatatctttccatatatcctattatttctgaatatatgtcctcaaaatccccataaatatccatcccttcctagatggcattaactttcattttagattttaggtgactcataattcccattcacttagcctatcagaaaagtcattggcagacatatatgtccttgaaccttttttatttgtgtggattctgctcatcactgtctctgttagacttattttgtagtggctgcatcacatatttttcacttgaatttttttggaaatagctgaatgtaaatagcagggaggaagaagcaagcaaagtgagagcttttcttcatccagaattgccctctgggctcctttggtaacagatggagctccttcctagctagggagaccttatgagaagtggatggtaggaggagtcactaatgtttcaatctctatttctgtaatcttgggcaataatgcataggagttcttgataccccttcattgattactgtgtatcagttctttgttaggcatgaacgtctttattaatccatcattcttttcttcattcaacaaatatgtattgaacacctcctatatgccaggcactgtgctaggtgctgggaataccactgatgagacagacaaggtccctactcttgtggagtttacttctggtggaggagacagatgataagtaaacaaataaataatgtagtttgagatagtgattaagtgctatgaagaaaataaactagggtgatgattttagtggtggggtggggtgggggtggggtgacattagctagtggtcagggaggcctttccgcggtgggatgttgagctgaggccggaggagaagtagcagtcgctggcagagcacacaggctgctctgggggatgagctggtgcgtttaaggaacaggccagcactggcattcgcaagcagtggggaaggggagagatgccgaggtggtcagtatcctgactttcagaggcctttttttgtttgttttaatttttgctagattgatattaaaaactcatgtggaggaactcaaggaatgtttagaagaccaaaagtccccaatgacaggaacaaaagcaaccaatttttaactttctcttctcattcctgttttcattgatttcccacatgtagtccttttgctcaggaagtctttggggaaattaaggatctttgaagctctgaaataggtgatcaggttagtggtgtctgtcagctgtctaagaggttggaaaatgaactactcaagatagtcacgaaaatactgaaagtttgatttttctttccatatttgaattaattttttctgtttgactggaaggggtttttgtataactaaaacctcagcgcataaaggagatttaaaaggagcacatgatttagtgggtgggccatgaaactagagatgggatttgggggtgaatttgtcaatatctggattttaatccagacatctctgctaacaagcctttggtaagtcacttcagatacttttcctcctttttacaaagagagggctggcttagttatttgccaaagccccttccaggcctgaattccacaagtacgatttactgtagtgtcttatcactctttcatgtcacaatagcgtggagcattagagaaaagcctagacttttagttgatagccagttgaaatatcattgatagaattttagttttaggaaaaattggtttgatttctagctttattactattaggtatgtgagcttgggcaaatcgcttaatctttgagtctagttttctctcaaaatgagaacattaggctaaatgatttccgagtttccagctagtcctagagttctatatttctacatagttgaattattttatcatgctgttgctggggaatatgactaacccttttgaagctactaattttatgtcgagctttaaagtccataattgttatcttcagaaaatattatttgacctacagtatgtccaaatcaatttaataaaatcgctttataa

SEQ ID NO: 243462 - DNA, 4262 bp, Artificial Sequence
  derived and/or modified sequence
cgcgcgctgtcccccggaggcgtctgggtgtgcggagcgcgcgcgcgcgcggctcggaggcgcacctgtgaggtgtccctgaggagagggagggcgccctgcgtccggcagaggaggcgagcatcccgctcaggtgatgaggaacccctcgcgcacccagcgcagaaggctgctgccgccggacgcctccattgtttgaccacaacaagggccggattctcacccaggatcctaaggcctttgtagtccttcagccactgtgggccctgcctctgcctgttcttctggaatgtcttgggggttttgatcctgtcactgtgacctgcaaatccaagagacacatctttggaagataagagagcttcttcaagaccaaaaaaggagacggcatgatacccatgtagggaattccccaaagcagggcttgccatacctggaccccgaggagcctgcttgctggaaaggctttcctgtctgatgtgcaggaggcagaatgccaaactgactcttcaaggggcaactgcaggggctcgagaccagccagcagtatctcatccttcgatacaggggatatactgtacagtcctttttctagaagtgagacatacaagattactctacaagaggaagattccaggggctcaaaaacgcaaaggtttgcactttgagagccccttggaatgttgacaactcaggatctaaaacaaagttctgtgttaatgagttacagaattcacgtggaagtcaatgtcactttataatcgataataatactgagtgaggaacactatgcaggaagaaaccttccgtagaaagacaggcagggaaaagcttaggctgaccttaaacttacctaatagagcaagcctgagatagactgccaaaatggccaaataagagactctatgaaataacagtcttgtaactgtagtaatcataaggaaattttctccttgaaatcacgataccaaataggaaaaatgatctacaagtgccccatgtgtagggaatttttctctgagagagcagatctttttatgcatcagaaaattcacacagctgagaagccccataaatgtgacaagtgtgataagggtttctttcatatatcagaacttcatattcattggagagaccatacaggagagaaggtctataaatgtgatgattgtggtaaggattttagcactacaacaaaacttaatagacataagaaaatccacacagtggagaagccctataaatgttacgagtgtggcaaagccttcaattggagctcccatcttcaaattcatatgagagttcatacaggtgagaaaccgtatgtctgtagtgagtgtggaaggggctttagtaatagttcaaacctttgcatgcatcagagagtccacaccggagagaagccctttaaatgtgaagagtgtgggaaggccttcaggcacacctccagcctctgcatgcatcaaagagtccacacaggagagaaaccctataaatgttatgagtgtgggaaggcgttcagtcagagttcgagcctctgcatccaccagagagtccacactggagagaaaccctatagatgttgtggatgtgggaaggccttcagtcagagttcgagcctgtgcatccaccagagagtccacacaggagagaaacctttcaaatgtgatgagtgcggaaaggccttcagtcagagtacgagcctctgcatccaccagagagtccacacaaaggagagaaaccatctcaaaatatcagttatataaaacgttttgctaagagtttaaaatcttaaaacccataagtgccactaggaaggaaaccctgtatatacctacattgacccaagaaatatttacgcaatccctagcagaacattgtttctgaggaggcatatgtgagattgatttgttggttcatgccaagtgtgttccacaggttgactttgaatgtggacctctgagcatccacgcaggatggctctcaggtcccagtcacagacgtcgcttcctgggattccagcacgatgcctccatagttgaaagactacacaaaaagccacaatcattgcccggcctcctgagtcaccttctatctatactttgcttaaaagctatcccagatactcccccttgaggagctcatgcccttccttcctctttattcgagcatactggcaatgcattggaaaacagacagctcccactaagatcacgttctggtatttctgaggttaacacttgatttagcccctacatatctttccatatatcctattatttctgaatatatgtcctcaaaatccccataaatatccatcccttcctagatggcattaactttcattttagattttaggtgactcataattcccattcacttagcctatcagaaaagtcattggcagacatatatgtccttgaaccttttttatttgtgtggattctgctcatcactgtctctgttagacttattttgtagtggctgcatcacatatttttcacttgaatttttttggaaatagctgaatgtaaatagcagggaggaagaagcaagcaaagtgagagcttttcttcatccagaattgccctctgggctcctttggtaacagatggagctccttcctagctagggagaccttatgagaagtggatggtaggaggagtcactaatgtttcaatctctatttctgtaatcttgggcaataatgcataggagttcttgataccccttcattgattactgtgtatcagttctttgttaggcatgaacgtctttattaatccatcattcttttcttcattcaacaaatatgtattgaacacctcctatatgccaggcactgtgctaggtgctgggaataccactgatgagacagacaaggtccctactcttgtggagtttacttctggtggaggagacagatgataagtaaacaaataaataatgtagtttgagatagtgattaagtgctatgaagaaaataaactagggtgatgattttagtggtggggtggggtgggggtggggtgacattagctagtggtcagggaggcctttccgcggtgggatgttgagctgaggccggaggagaagtagcagtcgctggcagagcacacaggctgctctgggggatgagctggtgcgtttaaggaacaggccagcactggcattcgcaagcagtggggaaggggagagatgccgaggtggtcagtatcctgactttcagaggcctttttttgtttgttttaatttttgctagattgatattaaaaactcatgtggaggaactcaaggaatgtttagaagaccaaaagtccccaatgacaggaacaaaagcaaccaatttttaactttctcttctcattcctgttttcattgatttcccacatgtagtccttttgctcaggaagtctttggggaaattaaggatctttgaagctctgaaataggtgatcaggttagtggtgtctgtcagctgtctaagaggttggaaaatgaactactcaagatagtcacgaaaatactgaaagtttgatttttctttccatatttgaattaattttttctgtttgactggaaggggtttttgtataactaaaacctcagcgcataaaggagatttaaaaggagcacatgatttagtgggtgggccatgaaactagagatgggatttgggggtgaatttgtcaatatctggattttaatccagacatctctgctaacaagcctttggtaagtcacttcagatacttttcctcctttttacaaagagagggctggcttagttatttgccaaagccccttccaggcctgaattccacaagtacgatttactgtagtgtcttatcactctttcatgtcacaatagcgtggagcattagagaaaagcctagacttttagttgatagccagttgaaatatcattgatagaattttagttttaggaaaaattggtttgatttctagctttattactattaggtatgtgagcttgggcaaatcgcttaatctttgagtctagttttctctcaaaatgagaacattaggctaaatgatttccgagtttccagctagtcctagagttctatatttctacatagttgaattattttatcatgctgttgctggggaatatgactaacccttttgaagctactaattttatgtcgagctttaaagtccataattgttatcttcagaaaatattatttgacctacagtatgtccaaatcaatttaataaaatcgctttataacagg

SEQ ID NO: 243463 - DNA, 4207 bp, Artificial Sequence
  derived and/or modified sequence
gagagggaggtgggtgcgcggcgcccgcggcctggggcgctgactcccctcacttggaggcgccctgcgtccggcagaggaggcgagcatcccgctcaggtgatgaggaacccctcgcgcacccagcgcagaaggctgctgccgccggacgcctccattgtttgaccacaacaagggccggattctcacccagcaggatcctaaggcctttgtagtccttcagccactgtgggccctgcctctgcctgttcttctggaatgtcttgggggttttgatcctgtcactgtgacctgcaaatccaagagacacatctttggaagataagagagcttcttcaagaccaaaaaaggagacggcatgatacccatgtagggaattccccaaagcagggcttgccatacctggaccccgaggagcctgcttgctggaaaggctttcctgtctgatgtgcaggaggcagaatgccaaactgactcttcaaggggcaactgcaggggctcgagaccagccagcagtatctcatccttcgatacaggggatatactgtacagtcctttttctagaagtgagacatacaagattactctacaagaggaagattccaggggctcaaaaacgcaaaggtttgcactttgagagccccttggaatgttgacaactcaggatctaaaacaaagttctgtgttaatgagttacagaattcacgtggaagtcaatgtcactttataatcgataataatactgagtgaggaacactatgcaggaagaaaccttccgtagaaagacaggcagggaaaagcttaggctgaccttaaacttacctaatagagcaagcctgagatagactgccaaaatggccaaataagagactctatgaaataacagtcttgtaactgtagtaatcataaggaaattttctccttgaaatcacgataccaaataggaaaaatgatctacaagtgccccatgtgtagggaatttttctctgagagagcagatctttttatgcatcagaaaattcacacagctgagaagccccataaatgtgacaagtgtgataagggtttctttcatatatcagaacttcatattcattggagagaccatacaggagagaaggtctataaatgtgatgattgtggtaaggattttagcactacaacaaaacttaatagacataagaaaatccacacagtggagaagccctataaatgttacgagtggcaaagccttcaattggagctcccatcttcaaattcatatgagagttcatacaggtgagaaaccgtatgtctgtagtgagtgtggaaggggctttagtaatagttcaaacctttgcatgcatcagagagtccacaccggagagaagccctttaaatgtgaagagtgtgggaaggccttcaggcacacctccagcctctgcatgcatcaaagagtccacacaggagagaaaccctataaatgttatgagtgtgggaaggcgttcagtcagagttcgagcctctgcatccaccagagagtccacactggagagaaaccctatagatgttgtggatgtgggaaggccttcagtcagagttcgagcctgtgcatccaccagagagtccacacaggagagaaacctttcaaatgtgatgagtgcggaaaggccttcagtcagagtacgagcctctgcatccaccagagagtccacacaaaggagagaaaccatctcaaaatatcagttatataaaacgttttgctaagagtttaaaatcttaaaacccataagtgccactaggaaggaaaccctgtatatacctacattgacccaagaaatatttacgcaatccctagcagaacattgtttctgaggaggcatatgtgagattgatttgttggttcatgccaagtgtgttccacaggttgactttgaatgtggacctctgagcatccacgcaggatggctctcaggtcccagtcacagacgtcgcttcctgggattccagcacgatgcctccatagttgaaagactacacaaaaagccacaatcattgcccggcctcctgagtcaccttctatctatactttgcttaaaagctatcccagatactcccccttgaggagctcatgcccttccttcctctttattcgagcatactggcaatgcattggaaaacagacagctcccactaagatcacgttctggtatttctgaggttaacacttgatttagcccctacatatctttccatatatcctattatttctgaatatatgtcctcaaaatccccataaatatccatcccttcctagatggcattaactttcattttagattttaggtgactcataattcccattcacttagcctatcagaaaagtcattggcagacatatatgtccttgaaccttttttatttgtgtggattctgctcatcactgtctctgttagacttattttgtagtggctgcatcacatatttttcacttgaatttttttggaaatagctgaatgtaaatagcagggaggaagaagcaagcaaagtgagagcttttcttcatccagaattgccctctgggctcctttggtaacagatggagctccttcctagctagggagaccttatgagaagtggatggtaggaggagtcactaatgtttcaatctctatttctgtaatcttgggcaataatgcataggagttcttgataccccttcattgattactgtgtatcagttctttgttaggcatgaacgtctttattaatccatcattcttttcttcattcaacaaatatgtattgaacacctcctatatgccaggcactgtgctaggtgctgggaataccactgatgagacagacaaggtccctactcttgtggagtttacttctggtggaggagacagatgataagtaaacaaataaataatgtagtttgagatagtgattaagtgctatgaagaaaataaactagggtgatgattttagtggtggggtggggtgggggtggggtgacattagctagtggtcagggaggcctttccgcggtgggatgttgagctgaggccggaggagaagtagcagtcgctggcagagcacacaggctgctctgggggatgagctggtgcgtttaaggaacaggccagcactggcattcgcaagcagtggggaaggggagagatgccgaggtggtcagtatcctgactttcagaggcctttttttgtttgttttaatttttgctagattgatattaaaaactcatgtggaggaactcaaggaatgtttagaagaccaaaagtccccaatgacaggaacaaaagcaaccaatttttaactttctcttctcattcctgttttcattgatttcccacatgtagtccttttgctcaggaagtctttggggaaattaaggatctttgaagctctgaaataggtgatcaggttagtggtgtctgtcagctgtctaagaggttggaaaatgaactactcaagatagtcacgaaaatactgaaagtttgatttttctttccatatttgaattaattttttctgtttgactggaaggggtttttgtataactaaaacctcagcgcataaaggagatttaaaaggagcacatgatttagtgggtgggccatgaaactagagatgggatttgggggtgaatttgtcaatatctggattttaatccagacatctctgctaacaagcctttggtaagtcacttcagatacttttcctcctttttacaaagagagggctggcttagttatttgccaaagccccttccaggcctgaattccacaagtacgatttactgtagtgtcttatcactctttcatgtcacaatagcgtggagcattagagaaaagcctagacttttagttgatagccagttgaaatatcattgatagaattttagttttaggaaaaattggtttgatttctagctttattactattaggtatgtgagcttgggcaaatcgcttaatctttgagtctagttttctctcaaaatgagaacattaggctaaatgatttccgagtttccagctagtcctagagttctatatttctacatagttgaattattttatcatgctgttgctggggaatatgactaacccttttgaagctactaattttatgtcgagctttaaagtccataattgttatcttcagaaaatattatttgacctacagtatgtccaaatcaattt

SEQ ID NO: 243464 - DNA, 4309 bp, Artificial Sequence
  derived and/or modified sequence
gcgctgtcccccggaggcgtctgggtgtgcggagcgcgcgcgcgcgcggctcggaggcgcacctgtgaggtgtccctgaggagagggaggtgggtgcgcggcgcccgcggcctggggcgctgactcccctcacttggaggcgccctgcgtccggcagaggaggcgagcatcccgctcaggtgatgaggaacccctcgcgcacccagcgcagaaggctgctgccgccggacgcctccattgtttgaccacaacaagggccggattctcacccaggatcctaaggcctttgtagtccttcagccactgtgggccctgcctctgcctgttcttctggaatgtcttgggggttttgatcctgtcactgtgacctgcaaatccaagagacacatctttggaagataagagagcttcttcaagaccaaaaaaggagacggcatgatacccatgtagggaattccccaaagcagggcttgccatacctggaccccgaggagcctgcttgctggaaaggctttcctgtctgatgtgcaggaggcagaatgccaaactgactcttcaaggggcaactgcaggggctcgagaccagccagcagtatctcatccttcgatacaggggatatactgtacagtcctttttctagaagtgagacatacaagattactctacaagaggaagattccaggggctcaaaaacgcaaaggtttgcactttgagagccccttggaatgttgacaactcaggatctaaaacaaagttctgtgttaatgagttacagaattcacgtggaagtcaatgtcactttataatcgataataatactgagtgaggaacactatgcaggaagaaaccttccgtagaaagacaggcagggaaaagcttaggctgaccttaaacttacctaatagagcaagcctgagatagactgccaaaatggccaaataagagactctatgaaataacagtcttgtaactgtagtaatcataaggaaattttctccttgaaatcacgataccaaataggaaaaatgatctacaagtgccccatgtgtagggaatttttctctgagagagcagatctttttatgcatcagaaaattcacacagctgagaagccccataaatgtgacaagtgtgataagggtttctttcatatatcagaacttcatattcattggagagaccatacaggagagaaggtctataaatgtgatgattgtggtaaggattttagcactacaacaaaacttaatagacataagaaaatccacacagtggagaagccctataaatgttacgagtgtggcaaagccttcaattggagctcccatcttcaaattcatatgagagttcatacaggtgagaaaccgtatgtctgtagtgagtgtggaaggggctttagtaatagttcaaacctttgcatgcatcagagagtccacaccggagagaagccctttaaatgtgaagagtgtgggaaggccttcaggcacacctccagcctctgcatgcatcaaagagtccacacaggagagaaaccctataaatgttatgagtgtgggaaggcgttcagtcagagttcgagcctctgcatccaccagagagtccacactggagagaaaccctatagatgttgtggatgtgggaaggccttcagtcagagttcgagcctgtgcatccaccagagagtccacacaggagagaaacctttcaaatgtgatgagtgcggaaaggccttcagtcagagtacgagcctctgcatccaccagagagtccacacaaaggagagaaaccatctcaaaatatcagttatataaaacgttttgctaagagtttaaaatcttaaaacccataagtgccactaggaaggaaaccctgtatatacctacattgacccaagaaatatttacgcaatccctagcagaacattgtttctgaggaggcatatgtgagattgatttgttggttcatgccaagtgtgttccacaggttgactttgaatgtggacctctgagcatccacgcaggatggctctcaggtcccagtcacagacgtcgcttcctgggattccagcacgatgcctccatagttgaaagactacacaaaaagccacaatcattgcccggcctcctgagtcaccttctatctatactttgcttaaaagctatcccagatactcccccttgaggagctcatgcccttccttcctctttattcgagcatactggcaatgcattggaaaacagacagctcccactaagatcacgttctggtatttctgaggttaacacttgatttagcccctacatatctttccatatatcctattatttctgaatatatgtcctcaaaatccccataaatatccatcccttcctagatggcattaactttcattttagattttaggtgactcataattcccattcacttagcctatcagaaaagtcattggcagacatatatgtccttgaaccttttttatttgtgtggattctgctcatcactgtctctgttagacttattttgtagtggctgcatcacatatttttcacttgaatttttttggaaatagctgaatgtaaatagcagggaggaagaagcaagcaaagtgagagcttttcttcatccagaattgccctctgggctcctttggtaacagatggagctccttcctagctagggagaccttatgagaagtggatggtaggaggagtcactaatgtttcaatctctatttctgtaatcttgggcaataatgcataggagttcttgataccccttcattgattactgtgtatcagttctttgttaggcatgaacgtctttattaatccatcattcttttcttcattcaacaaatatgtattgaacacctcctatatgccaggcactgtgctaggtgctgggaataccactgatgagacagacaaggtccctactcttgtggagtttacttctggtggaggagacagatgataagtaaacaaataaataatgtagtttgagatagtgattaagtgctatgaagaaaataaactagggtgatgattttagtggtggggtggggtgggggtggggtgacattagctagtggtcagggaggcctttccgcggtgggatgttgagctgaggccggaggagaagtagcagtcgctggcagagcacacaggctgctctgggggatgagctggtgcgtttaaggaacaggccagcactggcattcgcaagcagtggggaaggggagagatgccgaggtggtcagtatcctgactttcagaggcctttttttgtttgttttaatttttgctagattgatattaaaaactcatgtggaggaactcaaggaatgtttagaagaccaaaagtccccaatgacaggaacaaaagcaaccaatttttaactttctcttctcattcctgttttcattgatttcccacatgtagtccttttgctcaggaagtctttggggaaattaaggatctttgaagctctgaaataggtgatcaggttagtggtgtctgtcagctgtctaagaggttggaaaatgaactactcaagatagtcacgaaaatactgaaagtttgatttttctttccatatttgaattaattttttctgtttgactggaaggggtttttgtataactaaaacctcagcgcataaaggagatttaaaaggagcacatgatttagtgggtgggccatgaaactagagatgggatttgggggtgaatttgtcaatatctggattttaatccagacatctctgctaacaagcctttggtaagtcacttcagatacttttcctcctttttacaaagagagggctggcttagttatttgccaaagccccttccaggcctgaattccacaagtacgatttactgtagtgtcttatcactctttcatgtcacaatagcgtggagcattagagaaaagcctagacttttagttgatagccagttgaaatatcattgatagaattttagttttaggaaaaattggtttgatttctagctttattactattaggtatgtgagcttgggcaaatcgcttaatctttgagtctagttttctctcaaaatgagaacattaggctaaatgatttccgagtttccagctagtcctagagttctatatttctacatagttgaattattttatcatgctgttgctggggaatatgactaacccttttgaagctactaattttatgtcgagctttaaagtccataattgttatcttcagaaaatattatttgacctacagtatgtccaaatcaatttaataaaatcgctttataacaggg

SEQ ID NO: 243465 - DNA, 5108 bp, Artificial Sequence
  derived and/or modified sequence
ggaggcgggcggtgggggcgcgggccgggtggccgcgcatgcgtgcggcccccgctcccccggggcttccccggcctcgtgcgtgcgcacgcgcgctgtcccccggaggcgtctgggtgtgcggagcgcgcgcgcgcgcggctcggaggcgcacctgtgaggtgtccctgaggagagggaggtgggtgcgcggcgcccgcggcctggggcgctgactcccctcacttggagtgagttctcggcggccgggctgcagtctttctttctttcccggagggaggcgggggccgggggccagggagcgggctgggggtgggaaggaggtggagtggcttaaagaaaagaaaaacaacccatcccggaggatgggcctcgggatggcggggaaggtcagagcggctccgcgcagcctggcgggtcccgggctgagaagccgcccctcgggcctcgggcggtcggccgcgggcccgcagtgcgggggagcggggccggggggcgcagatggcggccggtgcgagcgagggctgggcagcgggcagggcgaggccgggcgaggcccctcgggagccggactcccgagccaggctccattgttgttggagccgagggaagggggagcgctgccgccctcgtcgcccgtggagccgcgtcttggagcccttccaggcgggtcccgggagaggcggtcatggccgcgccaggggaccggggagccgggcggctgcggaggagccggctgcatggggtgctgtgtgtttttcagggcgccctgcgtccggcagaggaggcgagcatcccgctcaggtgatgaggaacccctcgcgcacccagcgcagaaggctgctgccgccggacgcctccattgtttgaccacaacaagggccggattctcacccagcaggatcctaaggcctttgtagtccttcagccactgtgggccctgcctctgcctgttcttctggaatgtcttgggggttttgatcctgtcactgtgagtcttgctctgtcgcccaggctggagtgcagtggcacgatctcagctcattgcaacctctgtctcccaggttcaagcgattctcctgcctcagcctctggagtagctgggattacagatgggaccacctagttgcaggaaaacaagctcagggctcccactgattctacattatgacctgcaaatccaagagacacatctttggaagataagagagcttcttcaagaccaaaaaaggagacggcatgatacccatgtagggaattccccaaagcagggcttgccatacctggaccccgaggagcctgcttgctggaaaggctttcctgtctgatgtgcaggaggcagaatgccaaactgactcttcaaggggcaactgcaggggctcgagaccagccagcagtatctcatccttcgatacaggggatatactgtacagtcctttttctagaagtgagacatacaagattactctacaagaggaagattccaggggctcaaaaacgcaaaggtttgcactttgagagccccttggaatgttgacaactcaggatctaaaacaaagttctgtgttaatgagttacagaattcacgtggaagtcaatgtcactttataatcgataataatactgagtgaggaacactatgcaggaagaaaccttccgtagaaagacaggcagggaaaagcttaggctgaccttaaacttacctaatagagcaagcctgagatagactgccaaaatggccaaataagagactctatgaaataacagtcttgtaactgtagtaatcataaggaaattttctccttgaaatcacgataccaaataggaaaaatgatctacaagtgccccatgtgtagggaatttttctctgagagagcagatctttttatgcatcagaaaattcacacagctgagaagccccataaatgtgacaagtgtgataagggtttctttcatatatcagaacttcatattcattggagagaccatacaggagagaaggtctataaatgtgatgattgtggtaaggattttagcactacaacaaaacttaatagacataagaaaatccacacagtggagaagccctataaatgttacgagtgtggcaaagccttcaattggagctcccatcttcaaattcatatgagagttcatacaggtgagaaaccgtatgtctgtagtgagtgtggaaggggctttagtaatagttcaaacctttgcatgcatcagagagtccacaccggagagaagccctttaaatgtgaagagtgtgggaaggccttcaggcacacctccagcctctgcatgcatcaaagagtccacacaggagagaaaccctataaatgttatgagtgtgggaaggcgttcagtcagagttcgagcctctgcatccaccagagagtccacactggagagaaaccctatagatgttgtggatgtgggaaggccttcagtcagagttcgagcctgtgcatccaccagagagtccacacaggagagaaacctttcaaatgtgatgagtgcggaaaggccttcagtcagagtacgagcctctgcatccaccagagagtccacacaaaggagagaaaccatctcaaaatatcagttatataaaacgttttgctaagagtttaaaatcttaaaacccataagtgccactaggaaggaaaccctgtatatacctacattgacccaagaaatatttacgcaatccctagcagaacattgtttctgaggaggcatatgtgagattgatttgttggttcatgccaagtgtgttccacaggttgactttgaatgtggacctctgagcatccacgcaggatggctctcaggtcccagtcacagacgtcgcttcctgggattccagcacgatgcctccatagttgaaagactacacaaaaagccacaatcattgcccggcctcctgagtcaccttctatctatactttgcttaaaagctatcccagatactcccccttgaggagctcatgcccttccttcctctttattcgagcatactggcaatgcattggaaaacagacagctcccactaagatcacgttctggtatttctgaggttaacacttgatttagcccctacatatctttccatatatcctattatttctgaatatatgtcctcaaaatccccataaatatccatcccttcctagatggcattaactttcattttagattttaggtgactcataattcccattcacttagcctatcagaaaagtcattggcagacatatatgtccttgaaccttttttatttgtgtggattctgctcatcactgtctctgttagacttattttgtagtggctgcatcacatatttttcacttgaatttttttggaaatagctgaatgtaaatagcagggaggaagaagcaagcaaagtgagagcttttcttcatccagaattgccctctgggctcctttggtaacagatggagctccttcctagctagggagaccttatgagaagtggatggtaggaggagtcactaatgtttcaatctctatttctgtaatcttgggcaataatgcataggagttcttgataccccttcattgattactgtgtatcagttctttgttaggcatgaacgtctttattaatccatcattcttttcttcattcaacaaatatgtattgaacacctcctatatgccaggcactgtgctaggtgctgggaataccactgatgagacagacaaggtccctactcttgtggagtttacttctggtggaggagacagatgataagtaaacaaataaataatgtagtttgagatagtgattaagtgctatgaagaaaataaactagggtgatgattttagtggtggggtggggtgggggtggggtgacattagctagtggtcagggaggcctttccgcggtgggatgttgagctgaggccggaggagaagtagcagtcgctggcagagcacacaggctgctctgggggatgagctggtgcgtttaaggaacaggccagcactggcattcgcaagcagtggggaaggggagagatgccgaggtggtcagtatcctgactttcagaggcctttttttgtttgttttaatttttgctagattgatattaaaaactcatgtggaggaactcaaggaatgtttagaagaccaaaagtccccaatgacaggaacaaaagcaaccaatttttaactttctcttctcattcctgttttcattgatttcccacatgtagtccttttgctcaggaagtctttggggaaattaaggatctttgaagctctgaaataggtgatcaggttagtggtgtctgtcagctgtctaagaggttggaaaatgaactactcaagatagtcacgaaaatactgaaagtttgatttttctttccatatttgaattaattttttctgtttgactggaaggggtttttgtataactaaaacctcagcgcataaaggagatttaaaaggagcacatgatttagtgggtgggccatgaaactagagatgggatttgggggtgaatttgtcaatatctggattttaatccagacatctctgctaacaagcctttggtaagtcacttcagatacttttcctcctttttacaaagagagggctggcttagttatttgccaaagccccttccaggcctgaattccacaagtacgatttactgtagtgtcttatcactctttcatgtcacaatagcgtggagcattagagaaaagcctagacttttagttgatagccagttgaaatatcattgatagaattttagttttaggaaaaattggtttgatttctagctttattactattaggtatgtgagcttgggcaaatcgcttaatctttgagtctagttttctctcaaaatgagaacattaggctaaatgatttccgagtttccagctagtcctagagttctatatttctacatagttgaattattttatcatgctgttgctggggaatatgactaacccttttgaagctactaattttatgtcgagctttaaagtccataattgttatcttcagaaaatattatttgacctacagtatgtccaaatcaatttaataaaatcgctttataa

SEQ ID NO: 243466 - DNA, 1671 bp, Artificial Sequence
  derived and/or modified sequence
gaggaggagcccctgtggcagggctgcagcgccggcctgccctggctgcccgccgagaagaagaagggcgccgaggaggagaagcccaagagaagaagacaggagaagcaggccgcctgccccttctacaaccacgagcagatgggcctgctgagagacgaggccctggccgaggtgaaggacatggagcagctgctggccctgggcaaggaggccagagcctgcccctactacggcagcagactggccatccccgccgcccagctggtggtgctgccctaccagatgctgctgcacgccgccaccagacaggccgccggcatcagactgcaggaccaggtggtgatcatcgacgaggcccacaacctgatcgacaccatcaccggcatgcacagcgtggaggtgagcggcagccagctgtgccaggcccacagccagctgctgcagtacgtggagagatacggcaagagactgaaggccaagaacctgatgtacctgaagcagatcctgtacctgctggagaagttcgtggccgtgctgggcggcaacatcaagcagaaccccaacacccagagcctgagccagaccggcaccgagctgaagaccatcaacgacttcctgttccagagccagatcgacaacatcaacctgttcaaggtgcagagatactgcgagaagagcatgatcagcagaaagctgttcggcttcaccgagagatacggcgccgtgttcagcagcagagagcagcccaagctggccggcttccagcagttcctgcagagcctgcagcccagaaccaccgaggccctggccgcccccgccgacgagagccaggccagcaccctgagacccgccagccccctgatgcacatccagggcttcctggccgccctgaccaccgccaaccaggacggcagagtgatcctgagcagacagggcagcctgagccagagcaccctgaagttcctgctgctgaaccccgccgtgcacttcgcccaggtggtgaaggagtgcagagccgtggtgatcgccggcggcaccatgcagcccgtgagcgacttcagacagcagctgctggcctgcgccggcgtggaggccgagagagtggtggagttcagctgcggccacgtgatcccccccgacaacatcctgcccctggtgatctgcagcggcatcagcaaccagcccctggagttcaccttccagaagagagagctgccccagatgatggacgaggtgggcagaatcctgtgcaacctgtgcggcgtggtgcccggcggcgtggtgtgcttcttccccagctacgagtacctgagacaggtgcacgcccactgggagaagggcggcctgctgggcagactggccgccagaaagaagatcttccaggagcccaagagcgcccaccaggtggagcaggtgctgctggcctacagcagatgcatccaggcctgcggccaggagagaggccaggtgaccggcgccctgctgctgagcgtggtgggcggcaagatgagcgagggcatcaacttcagcgacaacctgggcagatgcgtggtgatggtgggcatgcccttccccaacatcagaagcgccgagctgcaggagaagatggcctacctggaccagaccctggccggccccagcggcaccagaagaatcctgcccgcctag

SEQ ID NO: 243467 - DNA, 2913 bp, Artificial Sequence
  derived and/or modified sequence
atggccaacgagacccagaaggtgggcgccatccacttccccttccccttcaccccctacagcatccaggaggacttcatggccgagctgtacagagtgctggaggccggcaagatcggcatcttcgagagccccaccggcaccggcaagagcctgagcctgatctgcggcgccctgagctggctgagagacttcgagcagaagaagagagaggaggaggccagactgctggagaccggcaccggccccctgcacgacgagaaggacgagagcctgtgcctgagcagcagctgcgagggcgccgccggcacccccagacccgccggcgagcccgcctgggtgacccagttcgtgcagaagaaggaggagagagacctggtggacagactgaaggccgagcaggccagaagaaagcagagagaggagagactgcagcagctgcagcacagagtgcagctgaagtacgccgccaagagactgagacaggaggaggaggagagagagaacctgctgagactgagcagagagatgctggagaccggccccgaggccgagagactggagcagctggagagcggcgaggaggagctggtgctggccgagtacgagagcgacgaggagaagaaggtggccagcagagtggacgaggacgaggacgacctggaggaggagcacatcaccaagatctactactgcagcagaacccacagccagctggcccagttcgtgcacgaggtgaagaagagccccttcggcaaggacgtgagactggtgagcctgggcagcagacagaacctgtgcgtgaacgaggacgtgaagagcctgggcagcgtgcagctgatcaacgacagatgcgtggacatgcagagaagcagacacgagaagaagaagggcgccgaggaggagaagcccaagagaagaagacaggagaagcaggccgcctgccccttctacaaccacgagcagatgggcctgctgagagacgaggccctggccgaggtgaaggacatggagcagctgctggccctgggcaaggaggccagagcctgcccctactacggcagcagactggccatccccgccgcccagctggtggtgctgccctaccagatgctgctgcacgccgccaccagacaggccgccggcatcagactgcaggaccaggtggtgatcatcgacgaggcccacaacctgatcgacaccatcaccggcatgcacagcgtggaggtgagcggcagccagctgtgccaggcccacagccagctgctgcagtacgtggagagatacggcaagagactgaaggccaagaacctgatgtacctgaagcagatcctgtacctgctggagaagttcgtggccgtgctgggcggcaacatcaagcagaaccccaacacccagagcctgagccagaccggcaccgagctgaagaccatcaacgacttcctgttccagagccagatcgacaacatcaacctgttcaaggtgcagagatactgcgagaagagcatgatcagcagaaagctgttcggcttcaccgagagatacggcgccgtgttcagcagcagagagcagcccaagctggccggcttccagcagttcctgcagagcctgcagcccagaaccaccgaggccctggccgcccccgccgacgagagccaggccagcaccctgagacccgccagccccctgatgcacatccagggcttcctggccgccctgaccaccgccaaccaggacggcagagtgatcctgagcagacagggcagcctgagccagagcaccctgaagttcctgctgctgaaccccgccgtgcacttcgcccaggtggtgaaggagtgcagagccgtggtgatcgccggcggcaccatgcagcccgtgagcgacttcagacagcagctgctggcctgcgccggcgtggaggccgagagagtggtggagttcagctgcggccacgtgatcccccccgacaacatcctgcccctggtgatctgcagcggcatcagcaaccagcccctggagttcaccttccagaagagagagctgccccagatgatggacgaggtgggcagaatcctgtgcaacctgtgcggcgtggtgcccggcggcgtggtgtgcttcttccccagctacgagtacctgagacaggtgcacgcccactgggagaagggcggcctgctgggcagactggccgccagaaagaagatcttccaggagcccaagagcgcccaccaggtggagcaggtgctgctggcctacagcagatgcatccaggcctgcggccaggagagaggccaggtgaccggcgccctgctgctgagcgtggtgggcggcaagatgagcgagggcatcaacttcagcgacaacctgggcagatgcgtggtgatggtgggcatgcccttccccaacatcagaagcgccgagctgcaggagaagatggcctacctggaccagaccctgagccccagacccggcacccccagagagggcagcggcggcgagcccgtgcacgagggcagacagcccgtgcacagacagggccaccaggcccccgagggcttctgccagagaagcgcccccggccccgccatctgccccgccccctgccccggccaggccgccggcctggaccccagcccctgcggcggccagagctacctgtggcccagacactgctgctgcgccgaggtgagccccggcgaggtgggcctgttcctgatgggcaaccacaccaccgcctggagaagagccctgcccctgagctgccccctggagaccgtgttcgtggtgggcgtggtgtgcggcgaccccgtgaccaaggtgaagcccagaagaagagtgtggagccccgagtgctgccaggaccccggcaccggcgtgagcagcagaagaagaaagtggggcaaccccgagtag

SEQ ID NO: 243468 - DNA, 3760 bp, Artificial Sequence
  derived and/or modified sequence
tgcgcagcggcgggggttgttccggctgcctttcactgaggggacccgccagtttctaactcagtggcgtttgccctgattcccggggcctggctttcagcgtagcaattctgccggcgaagaaggtgagcgcagtgctgtgtggcagcagagctccttaggacgaggagcagcgggacgaggaagggcagactggtgaaatcgcaaactgggcgtctgttccggcgccggacccctatttgcaaaggtccatggctaatgaaacacagaaggttggtgccatccattttccttttcccttcacaccctattccatccaggaagacttcatggcagagctgtaccgggttttggaggctggcaagattgggatatttgagagtccaactggcactgggaagtccttaagtcttatttgtggggccctctcttggctccgtgactttgaacagaagaagcgtgaagaagaggcacgactccttgaaactggaactggccccttacatgatgagaaagatgaatccctgtgtctgtcttcttcctgcgaaggggctgcaggcaccccgaggcctgctggagaaccggcctgggttactcagtttgtgcagaagaaagaagagagggacctggtggaccgactaaaggcggagcaggccaggaggaagcagcgagaagaacgcctgcagcagctgcagcacagggtgcagctcaagtatgcagccaagcgcctgaggcaggaagaagaagaaagagagaatctcctccgcctcagcagggagatgctagagacaggcccggaggctgagcggctggagcagctggagtctggggaggaggagctggtcctcgccgaatacgagagtgatgaggagaaaaaggtggcgagcagagtggatgaggatgaggatgacctggaggaagaacacataactaagatttattactgtagtcggacacactcccagctggcccagtttgtgcatgaggtgaagaagagcccctttggcaaggatgttcggctggtctcccttggctcccggcagagaagaagaaaggagctgaggaggagaagccaaagaggaggaggcaggagaagcaggcagcctgccccttctacaaccacgagcagatgggccttctccgggatgaggccctggcagaggtgaaggacatggagcagctgctggcccttgggaaggaggcccgggcctgtccctattacgggagccgccttgccatccctgcagcccagctggtggtgctgccctatcagatgctgctgcatgcggccactcggcaggccgcgggcatccggctgcaggaccaggtggtgatcatcgacgaggcgcacaacctgatcgacaccatcacgggcatgcacagcgtggaggtcagcggctcccagctctgccaggcccattcccagctgctgcagtacgtggagcgatacgggaagcgtttgaaggccaagaacctgatgtacctgaagcagatcctgtatttgctggagaaattcgtggctgtgctaggggggaacattaagcaaaatcccaatacacagagtctgtcacagacagggacggagctgaagaccatcaacgactttctcttccagagccagatcgacaacatcaacctgttcaaggtgcagcgatactgtgagaagagcatgatcagcagaaagctctttggattcactgaacggtacggagcagtgttctcatcccgggagcagcccaaactggctgggtttcagcaattcctgcagagcctgcagcccaggacgactgaagctcttgcagcccctgcagacgagagtcaggccagcaccctgcgaccagcttctccactgatgcacatccaaggcttcctggcagctctcactacggccaaccaggacggcagggtcatcctgagccgccaaggcagcctcagtcagagcaccctgaagtttttgctcctgaatccagctgtgcactttgcccaagtggtgaaggaatgccgggcagtggtcattgcggggggtaccatgcagccggtgtctgacttccggcagcagctgctggcctgtgccggggtggaagctgagcgcgtggtggagttttcctgtggtcacgtgatccctccagacaacatcctgcccctcgtcatctgcagcgggatctccaaccagccgctggaattcacgttccagaaaagagagctgcctcagatgatggacgaggtgggtcgcattctctgtaacctgtgcggtgtggttcctggaggggtggtctgtttcttcccctcctacgagtacctgcgccaggtccatgcccactgggagaagggtggcctgctgggccgtctggctgccaggaagaagatattccaggaacctaagagcgcacaccaggtggagcaggtgctgctggcatattccaggtgcatccaggcctgtggccaggagagaggccaggtgacaggggccctgctcctctctgtggttggaggaaagatgagtgaagggatcaacttctctgacaacctaggccggtgtgtggtgatggtgggcatgcccttccccaacatcaggtctgcagagctgcaggagaagatggcctacttggatcaaaccctcgcagggccatcaggcaccagaaggattttgccagcgtagtgctcctggaccagcgatatgcccggccccctgtcctggccaagctgccggcctggatccgagcccgtgtggaggtcaaagctacctttggccccgccattgctgctgtgcagaagtttcaccgggagaagtcggcctcttcctgatgggcaaccacaccactgcctggcgccgtgcccttcctttgtcctgcccgctggagacagtgtttgtcgtgggcgtggtctgcggggatcctgttacaaaggtgaaacccaggaggagagtgtggagtccagagtgctgccaggacccaggcacaggcgttagctcccgtaggagaaaatgggggaatcctgaatgaacagtgggtcctggctgtccttggggcgttccagggcagctcccctcctggaatagaatctttctttccatcctgcatggctgagagccaggcttccttcctggtctccgcaggaggctgtggcagctgtggcatccactgtggcatctccgtcctgcccaccttcttaagaggcgagatggagcaggcccatctgcctctgccctttctagccaaggttatagctgccctggactgctcactctctggtctcaatttaaaatgatccatggccacagggctcctgcccaggggcttgtcaccttcccctcctccttcctgagtcactccttcagtagaaggccctgctccctatcctgtcccacagccctgcctggatttgtatccttggcttcgtgccagttcctccaagtctatggcacctccctccctctcaaccacttgagcaaactccaagacaccttctaccccaacaccagcaattatgccaagggccgttaggctctcaacatgactatagagaccccgtgtcatcacggagacctttgttcctgtgggaaaatatccctcccacctgcaacagctgcccctgctgactgcgcctgtcttctccctctgaccccagagaaaggggctgtggtcagctgggatcttctgccaccatcagggacaaacgggggcaggaggaaagtcactgatgcccagatgtttgcatcctgcacagctataggtccttaaataaaagtgtgctgttggtt

SEQ ID NO: 243469 - DNA, 1671 bp, Artificial Sequence
  derived and/or modified sequence
gaagaagagccgttatggcagggctgtagcgccggcctgccatggctgcccgctgaaaaaaaaaagggagccgaggaggaaaagccaaaaagacgacgtcaggaaaaacaggcagcatgcccattctataatcatgagcagatgggccttctacgcgatgaagcgctggcggaggtgaaggacatggagcagctcctggccttaggaaaggaagcacgagcatgcccatactacggctcccgcttagccattccggcagctcagttggtggtgttgccctaccaaatgctcctacacgctgctacgaggcaggctgcgggcatcagacttcaggatcaggtcgtcatcatcgacgaggctcacaacctgatagacacgatcactggcatgcactctgttgaagtaagtggctctcaactatgccaggctcattctcagttgctgcagtatgtggagagatacggaaagcgactgaaggcaaagaacctaatgtaccttaaacagattttatatcttctggaaaagttcgtcgcagtattgggaggcaacattaaacagaaccctaatactcaaagcttgtctcagaccgggacagaactgaaaaccataaatgactttctgttccaaagtcagattgataacataaacctctttaaagtgcagcgttactgtgagaagagcatgatcagcagaaagttgttcggctttacggaacgctatggtgcagttttctcctcgcgagagcagcctaagttggccggattccagcaattcttgcaaagcctgcagcccagaacaactgaagctctcgcagccccagcagatgagagccaggctagcacccttcgcccagcgtccccactgatgcacatacagggtttcttagccgcactgaccaccgccaaccaggacggcagggtaattctgagcaggcagggctctctgtcacaaagcaccctgaaattcctcctgctgaaccccgcagtgcatttcgcacaagttgtcaaagagtgcagggctgtagttatagcaggtggtactatgcagccagtgagcgacttccgccagcagctcctggcctgcgccggcgtcgaagccgagcgggtagtcgaatttagctgcggacacgtgatcccaccagacaacatacttcctcttgtgatctgttctggtatctctaatcagccattagaatttactttccagaagagagagcttccacagatgatggacgaggtagggaggatcttgtgcaacctgtgtggtgtggtgcctggtggagtagtatgtttttttcccagttatgaatacctcagacaggtgcatgcccactgggaaaaaggagggctgctcggtagactcgcagcccggaaaaagatctttcaggaacctaaatcggctcaccaggttgagcaggtgctgctggcatacagtaggtgtatacaggcatgcggtcaagagcgggggcaggtgacgggcgccctcttattgtcggtggtgggcgggaaaatgtcggaagggattaattttagtgataacctcggaagatgcgtcgtgatggttggaatgcccttcccaaacatacgatctgcagaactacaggaaaaaatggcctatctggaccagaccctggccgggcccagtgggacccgcaggatactacccgcatag

SEQ ID NO: 243470 - DNA, 2913 bp, Artificial Sequence
  derived and/or modified sequence
atggcgaacgagacccagaaagtgggcgcaattcattttccgtttcctttcaccccatactccatacaagaagattttatggccgagctctaccgagttctggaggccggcaagattggaatattcgagagccctaccggcaccggaaaatctctgagtttgatatgtggcgcactgtcgtggctgcgagattttgaacaaaagaaaagggaagaagaggccaggctccttgagactggtaccgggccactgcacgacgagaaggacgagtccctatgcctcagctcatcgtgcgagggtgcagctggcactcctaggcctgccggagagcctgcttgggtgacgcagtttgtacaaaagaaggaagagcgagacctcgtggaccggttaaaggccgagcaggccagacggaagcagagggaagagcgactacagcagctgcagcacagggtccagcttaagtacgccgctaaacgattgaggcaggaggaagaggagcgtgagaaccttctacgactttcgagggaaatgttggagaccggcccagaggccgagcgtctggaacagctagagtcgggcgaggaggagctggtcctggccgagtatgaatccgacgaggagaagaaggtggcaagccgagtcgacgaagatgaggacgatctggaggaagaacatatcactaaaatttactactgtagtagaacccactcccagcttgcccagttcgtgcacgaagtaaagaagtctccgttcggcaaggatgtgagactggtaagcctgggcagccggcagaacctctgcgtcaatgaggacgttaagtcactgggcagtgtccagctgataaatgataggtgtgttgacatgcagagatcaaggcatgaaaagaaaaaaggcgccgaggaggaaaaaccaaagaggcgtaggcaggaaaagcaggcggcctgtccattttataatcacgagcagatgggtttgctccgggacgaggccctcgcggaagtcaaggacatggaacagctgcttgcactcggtaaggaagcgcgagcatgcccttactacggcagccgccttgccatccccgctgcccaactcgtggtgcttccgtatcagatgctactgcatgccgcgacgagacaagcagccgggattcgacttcaggatcaggtggtcatcatagatgaggctcataacctgatagataccatcacaggtatgcactcagtcgaggtcagcgggtcccagctttgtcaggcccactcccagctccttcagtacgtggaacgctacggcaagcgcctgaaggcgaagaacctaatgtatctgaagcagattctctatctccttgagaagttcgtggccgtactgggtgggaatattaagcagaacccgaacacacagagcctcagccaaaccgggacggagttgaagaccatcaacgattttctcttccagagtcagatcgataatataaatcttttcaaggtgcaaaggtactgcgagaaatcgatgatttccagaaagctgtttggtttcacagaaaggtatggggcggtttttagctctcgtgagcagccaaagctggctggtttccagcagttcctccagagcctgcagccacgtactactgaagcgctcgcggctcctgccgatgaaagccaggcgagtacgctaagaccagcctccccactgatgcacatacaaggtttcctggccgcattgactaccgctaatcaggatggacgcgtcatcttaagtcgccagggctctttaagccagtcaacattgaagttcctcctgcttaatcctgctgtgcatttcgcccaggtggtcaaagagtgtcgagcagtggtaatcgccggaggcactatgcagcccgtgagtgacttcaggcaacagttgttagcgtgcgccggtgtcgaagctgaaagggtggtggagtttagttgcgggcatgtgatcccgcccgacaacatactgcctctggtgatctgttcaggcatttctaaccaaccactagaattcacgttccagaaacgggaattaccacagatgatggatgaagtgggcaggattctgtgcaacctatgcggggtcgtgccaggaggcgtggtttgcttctttccttcttacgagtacctgcgccaggttcacgctcattgggagaaggggggtcttttaggcaggctcgcagccaggaagaagatcttccaggagcccaagtctgctcatcaggtggaacaggttctcctggcttacagcagatgcatacaggcctgcgggcaggagagaggacaggtgaccggcgcgctactcctttccgtggtgggggggaaaatgtccgaaggaatcaattttagcgacaacttgggcagatgcgtggtaatggtcggaatgcccttccctaatatcaggagtgcagagcttcaggaaaaaatggcctatttagaccagactctgagtccaagacctggcacccctcgcgagggcagcgggggtgagcctgtccacgagggaagacagcctgtgcacaggcaagggcatcaggccccagagggattttgccagagaagcgcacccggtccggcgatctgcccggcgccatgcccggggcaggcagccggtttggaccctagcccgtgtggaggacagtcttatctgtggccacgccactgttgttgcgctgaagtgtcccccggagaggtgggcctgttcctaatgggcaaccacactactgcctggagacgagccctgccgttaagttgccctctggagactgtctttgtggtaggcgttgtctgcggagaccccgtgactaaagtcaaaccacgccgcagagtttggtctccagaatgttgccaggatcctggaactggagtgtcatcccggcggcgtaagtggggtaatccagaatag

SEQ ID NO: 243471 - DNA, 2913 bp, Artificial Sequence
  derived and/or modified sequence
atggcgaacgaaactcagaaagtcggagccattcactttccttttccatttaccccctactctattcaggaggacttcatggcagagctgtaccgcgtgctagaagccggaaaaatcggaatcttcgagagccctaccggtactggaaagagcctgagcctaatatgtggcgctctgtcctggctcagggattttgaacagaaaaaaagagaggaagaagccaggctccttgagaccgggacaggtccgctgcatgacgaaaaggatgaatcactgtgcctctcatccagctgtgagggcgctgccggaacaccgaggccggctggggagccagcatgggttactcagtttgtgcagaagaaggaagaaagagatctggtggatcgcttgaaggccgagcaggcaagaagaaagcagagggaagagcggctgcagcaactgcagcatcgggttcagctgaagtatgcagccaagaggctgcgccaggaagaggaagaacgggagaacctgctgcgtctgtcacgtgagatgctagaaaccgggcccgaggcagaaaggctggagcagctggaaagcggcgaagaggaacttgtgttggcggagtacgaatccgacgaggagaagaaagtcgctagcagggtggacgaagacgaggatgatttagaagaggaacacatcacaaaaatctattactgctcaagaacccactcccagctggcccagttcgtccatgaggtcaagaagtcgcctttcgggaaggatgtgagattggtctcactgggtagcagacagaacttgtgcgtgaatgaagatgtgaagtctcttggaagcgtgcagctgattaatgacagatgtgtggacatgcagagatcaagacacgaaaaaaagaaaggggccgaagaggagaaacctaagcggagaagacaagagaaacaggctgcatgcccgttctacaatcacgaacagatggggctgctcagggatgaggcccttgccgaagttaaagacatggagcagctgctggcccttgggaaggaggctcgcgcgtgtccttattacgggtctagactggccattccagccgcgcaactggttgtgcttccctatcagatgctcctccacgccgccacgagacaggcggcgggcattcgcttacaggaccaggtggtgattatcgacgaagcacacaacctcatcgatactatcactgggatgcactcagttgaggtgtcaggaagccagctgtgccaagcccacagccagcttctgcagtacgtggagaggtacggtaagaggctcaaggccaagaatcttatgtacctgaagcagattctgtatttgctcgagaagttcgtggctgttctcggcggtaacatcaaacaaaatcctaacacacagagtctgagccagactgggacagaactgaagacaatcaacgacttcctcttccagtcccaaatcgacaatattaacctctttaaggttcagcggtattgcgagaaatcaatgatctcgaggaagctgtttgggttcacagaaaggtatggcgcagtgttctcaagcagggagcagcccaaactggctggattccagcagttcctccagtcgctgcagcctagaactaccgaagcattggctgcccccgctgacgaaagccaggctagcacactccggcccgcttctccattgatgcatatccaggggttcctagcagccctaacgacggcgaaccaggatggtcgagtcattttgtctagacaaggtagtctgtctcagtctacgctgaaatttctcctgctgaaccccgccgtgcattttgcccaggtcgtgaaagagtgtagagctgtagttatcgccggaggcactatgcagccagtgtctgactttcgccagcaactgttagcctgcgcaggcgtcgaagccgaacgggtggtggagttcagctgcggccatgtgatccctcccgataatatcctgccgctcgtcatctgcagtggcatttctaaccagcctttggaatttacattccagaaacgagagttaccccaaatgatggatgaagtcggcagaatactctgcaacctgtgcggtgtggtaccaggcggagtcgtctgcttcttccccagctacgaatacctacgccaggtgcacgcgcactgggagaagggaggcctgctagggagactggccgcccggaagaaaatatttcaggagcctaagtctgcgcaccaggtggagcaggtgcttctggcctattctcgctgcattcaggcctgcgggcaagagcgcggtcaagtcacaggcgccctcctcctgagtgtggtgggaggcaagatgagtgagggcataaattttagcgacaatctggggcggtgcgtggtcatggtgggaatgccatttcctaacatcaggagtgctgaattgcaagaaaaaatggcatacctggatcaaacattgagccctcgacctgggactccccgggaagggtccggaggggagcctgtccacgaaggacgccaacctgtacaccggcaaggccaccaggctcctgagggattttgccaaaggagcgcacctgggccagctatatgtccggccccatgccctgggcaggccgccgggctcgatcccagtccctgcggaggtcagtcatacctgtggccccgccattgctgctgcgcagaagtaagcccaggtgaggtagggctgttcctaatgggtaaccacactacagcgtggcgccgcgcactccccttaagctgtcccctggagacggtcttcgtggtcggagtagtctgcggcgatccagtcactaaagtgaaaccaagacgaagggtttggtcaccagagtgttgccaggatccaggcacgggagtgtccagccgacgacggaagtggggcaatccagagtag

SEQ ID NO: 243472 - DNA, 1671 bp, Artificial Sequence
  derived and/or modified sequence
gaggaggagcccctgtggcagggctgcagcgctggcctgccctggctgcctgctgagaagaagaagggagctgaggaggagaagcccaagagaagacggcaggagaagcaggccgcctgccccttctacaaccacgagcagatgggcctgctgagagatgaggccctggccgaggtgaaggacatggagcagctgctggccctgggcaaggaggcccgggcctgcccctactacggcagccggctggccatcccagctgcccagctggtggtgctgccctaccagatgctgctgcacgccgccacccggcaggccgccggcatccggctgcaggaccaggtggtgatcattgatgaggcccacaacctgattgacaccatcaccggcatgcacagcgtggaggtgtctggcagccagctgtgccaggcccacagccagctgctgcagtatgtggagagatatggcaagaggctgaaggccaagaacctgatgtacctgaagcagatcctgtacctgctggagaagtttgtggccgtgctgggcggcaacatcaagcagaaccccaacacccagagcctgagccagacaggaacagagctgaagaccatcaatgacttcctgttccagagccagattgacaacatcaacctcttcaaggtgcagcgctactgtgagaagtccatgatcagcaggaagctgtttggcttcacagagcgctacggggctgtgttcagcagccgggagcagcccaagctggccggcttccagcagttcctgcagagcctgcagcccaggaccacagaggccctggccgccccagcagatgagagccaggccagcaccctgcggcctgccagccccctgatgcacatccagggcttcctggccgccctgaccacagccaaccaggacggccgggtcatcctgagccggcagggcagcctgagccagagcaccctgaagttcctgctgctgaacccagctgtgcactttgcccaggtggtgaaggaatgtagagctgtggtgattgctgggggcaccatgcagcctgtgtctgacttccggcagcagctgctggcctgtgccggcgtggaggccgagcgggtggtggagttcagctgtggccacgtgattcctccagacaacatcctgcccctggtgatctgcagcggcatcagcaaccagcccctggagttcaccttccagaagcgggagctgccccagatgatggatgaggtgggccgcatcctgtgcaacctgtgtggggtggtgcctggaggagtggtgtgcttcttccccagctatgagtacctgcggcaggtgcacgcccactgggagaagggcggcctgctgggccgcctggccgccaggaagaagatcttccaggagcccaagagcgcccaccaggtggagcaggtgctgctggcctacagccgctgcatccaggcctgtggccaggagcggggccaggtgactggagccctgctgctgtctgtggtgggcggcaagatgtctgagggcatcaacttcagtgacaacctgggccgctgtgtggtgatggtgggcatgcccttccccaacatccgctctgctgagctgcaggagaagatggcctacctggaccagaccctggccggccccagcggcacccggcgcatcctgcctgcctag

SEQ ID NO: 243473 - DNA, 2913 bp, Artificial Sequence
  derived and/or modified sequence
atggccaatgagacccagaaggtgggcgccatccacttccccttccccttcaccccctacagcatccaggaggacttcatggccgagctgtacagagtgctggaggccggcaagattggcatctttgagagccccaccggcaccgggaagagcctgagcctcatctgtggggccctgtcctggctgcgggactttgagcagaagaagcgggaggaggaggcccggctgctggagactggaacaggccccctgcatgatgagaaggatgagagcctgtgcctgagcagcagctgtgagggcgccgccggcacccccaggcctgctggggagcccgcctgggtgacccagtttgtgcagaagaaggaggagcgggacctggtggaccggctgaaggccgagcaggcccggaggaagcagcgggaggagcggctgcagcagctgcagcaccgggtgcagctgaagtatgctgccaagaggctgcggcaggaggaggaggagcgggagaacctgctgcggctgagccgggagatgctggagaccggccctgaggccgagcggctggagcagctggagagcggggaggaggagctggtgctggccgagtatgaaagtgatgaggagaagaaggtggccagccgggtggatgaagatgaagatgacctggaggaggagcacatcaccaagatctactactgcagcaggacccacagccagctggcccagtttgtgcatgaggtgaagaagagcccctttgggaaggatgtgcggctggtgtccctgggcagccggcagaacctgtgtgtgaatgaagatgtgaagagcctgggctctgtgcagctgatcaatgacagatgtgtggacatgcagaggagcagacatgagaagaagaagggagctgaggaggagaagcccaagagaagacggcaggagaagcaggccgcctgccccttctacaaccacgagcagatgggcctgctgagagatgaggccctggccgaggtgaaggacatggagcagctgctggccctgggcaaggaggcccgggcctgcccctactacggcagccggctggccatcccagctgcccagctggtggtgctgccctaccagatgctgctgcatgctgccacccggcaggccgccggcatccggctgcaggaccaggtggtgatcattgatgaggcccacaacctgattgacaccatcaccggcatgcacagcgtggaggtgtctggcagccagctgtgccaggcccacagccagctgctgcagtatgtggagagatatggcaagaggctgaaggccaagaacctgatgtacctgaagcagatcctgtacctgctggagaagtttgtggccgtgctgggcggcaacatcaagcagaaccccaacacccagagcctgagccagacaggaacagagctgaagaccatcaatgacttcctgttccagagccagattgacaacatcaacctcttcaaggtgcagcgctactgtgagaagtccatgatcagcaggaagctgtttggcttcacagaaagatatggagctgtgttcagcagccgggagcagcccaagctggccggcttccagcagttcctgcagagcctgcagcccaggaccacagaggccctggccgccccagcagatgagagccaggccagcaccctgcggcctgccagccccctgatgcacatccagggcttcctggccgccctgaccacagccaaccaggacggccgggtcatcctgagccggcagggcagcctgagccagagcaccctgaagttcctgctgctgaacccagctgtgcactttgcccaggtggtgaaggagtgcagagctgtggtgattgctgggggcaccatgcagcctgtgtctgacttccggcagcagctgctggcctgtgccggcgtggaggccgagcgggtggtggagttcagctgtggccacgtgatccccccagacaacatcctgcccctggtgatctgcagcggcatcagcaaccagcccctggagttcaccttccagaagcgggagctgccccagatgatggatgaggtgggccgcatcctgtgcaacctgtgtggggtggtgcctgggggcgtggtgtgcttcttccccagctatgagtacctgcggcaggtgcacgcccactgggagaagggcggcctgctgggccgcctggccgccaggaagaagatcttccaggagcccaagagcgcccaccaggtggagcaggtgctgctggcctacagccgctgcatccaggcctgtggccaggagcggggccaggtgactggagccctgctgctgtctgtggtgggcggcaagatgtctgagggcatcaacttcagtgacaacctgggccgctgtgtggtgatggtgggcatgcccttccccaacatccgctctgctgagctgcaggagaagatggcctacctggaccagaccctgagccccaggcctggcaccccccgggagggcagcggcggggagcctgtgcatgagggccggcagcctgtgcaccggcagggccaccaggcccctgagggcttctgccagaggtctgcccctggccctgccatctgcccagccccctgccccggccaggccgccggcctggaccccagcccctgtggcggccagagctacctgtggcccaggcactgctgctgtgccgaggtgtccccaggagaggtgggcctcttcctgatgggcaaccacaccacagcctggaggcgggccctgcccctgagctgccccctggagaccgtgtttgtggtgggcgtggtgtgtggggaccctgtgaccaaggtgaagccccggcggcgggtgtggagccctgagtgctgccaggaccccggcactggagtgagcagcagaagaaggaagtggggcaaccctgagtag

SEQ ID NO: 243474 - DNA, 1671 bp, Artificial Sequence
  derived and/or modified sequence
gaggaggagcccctgtggcagggctgcagcgccggcctgccctggttgccagccgagaaaaagaagggcgcagaagaagagaaaccgaaacggcggcgacaggaaaagcaagcagcttgtccattctacaaccacgagcagatgggtctactgagagatgaggcactcgctgaagtcaaagatatggaacaactcctggcactgggcaaggaagccagggcttgcccatactatggctcgaggctggccatacctgccgcccaactcgtggttctgccctatcagatgctcctgcatgccgctacacgacaggccgcgggaatcagactccaggaccaggtcgtcatcattgacgaagctcataatttgatcgatacgatcaccgggatgcactccgttgaagtgtctggaagccagctatgtcaggcccatagtcagttgctgcaatatgttgagcgctacggcaaaagactgaaagccaagaaccttatgtatttaaagcaaatcctgtacttgttagaaaagtttgtggctgtccttggcggaaacatcaagcagaaccccaatacgcagagcctgagccagactggcacggagctcaagactattaacgacttcctgttccaatcacagatagacaacataaatctctttaaggtacaacgctattgtgagaagagcatgatatctaggaagctgtttggtttcacagaacgatatggtgctgtgttctccagccgggagcagccaaagctcgcaggattccagcagtttctgcagtcactccagcctcgaaccacggaagccctggccgcgcccgctgatgaatctcaggcttccactctcaggccggcctctccattaatgcacattcagggcttcttagccgcgcttaccacagcaaaccaggacgggagagtgatcctctctcgtcaaggttcactgtcccagtcaactctaaaatttttactactgaatccagctgtgcacttcgcacaagtggttaaagagtgtcgggcagttgtgattgccggcggcaccatgcagccagtctctgattttaggcagcagctcctcgcctgcgcaggcgtggaggccgaacgtgttgtggagttctcatgtggacatgtcatccccccagacaacatcctccccctcgtgatttgctcaggcatcagtaatcaaccattggagtttacctttcagaaaagagagctgcctcagatgatggatgaggtagggaggatcctgtgcaacctgtgcggggtggtgcccggcggcgtggtctgttttttcccttcatatgagtatctcaggcaagttcacgctcactgggaaaaaggaggactgctggggagactggcagcccgaaaaaaaatctttcaggaaccaaaatcagcacatcaggtggagcaagtgctgcttgcctacagtcgctgcatccaagcttgcggtcaggagcgaggtcaggttacaggcgcgttactgttgagcgtcgttggcgggaaaatgtcagagggtattaacttctcagataacctggggcgttgcgtggttatggtaggaatgccattcccaaacattagatcagcagagctgcaagaaaagatggcctacctggaccaaactctggctggcccaagtggtacacggcggatccttccggcttag

SEQ ID NO: 243475 - DNA, 2913 bp, Artificial Sequence
  derived and/or modified sequence
atggccaacgagacccagaaggtgggcgccatccacttccccttcccattcaccccgtactcaattcaggaggacttcatggcggaattatacagggtacttgaggcaggaaaaattggaattttcgaatcccccacagggacaggtaaatctctctcattgatttgcggcgctttatcatggttgcgcgattttgagcaaaagaaacgggaagaagaggcccgcctgctggagactggtacaggacctctccatgatgagaaggacgagtccctgtgtctgtctagcagttgtgagggcgcggccgggactccaagacctgctggtgaacctgcctgggtgacccagttcgtacaaaagaaggaagaacgcgatctggtggatcgccttaaagcggagcaagcacgccggaagcagcgagaagaacggctccagcagctccaacacagggtccagctgaagtatgccgctaaacgcctccgccaggaagaggaggaacgtgaaaacttgctgagactttcgcgtgagatgctggaaaccggccccgaagcggagagactggaacagcttgagtccggcgaggaagaattggtcctggcagagtacgaatctgacgaggagaagaaggtggccagcagagtcgacgaggatgaggatgacctggaagaggaacatatcaccaagatatactactgtagtcgcactcactcacagctcgctcagtttgtgcatgaagtgaagaaatcccccttcggcaaggacgtccggcttgtgagtttagggtccagacagaatctgtgtgttaatgaggatgtcaagtctctggggagtgtgcagttgatcaatgataggtgtgtggatatgcagcgctccagacatgaaaagaaaaagggcgccgaggaggagaaacccaagcgacgccgccaggagaagcaggcggcttgcccgttctataaccacgagcagatgggtctgcttagggacgaggcactggctgaggtcaaagatatggagcagctcctggcgttgggcaaggaggccagagcctgtccttattacggatctcggctcgctatcccagccgctcagctcgtcgtgctcccgtaccagatgctcctgcacgcagcaacacgccaggcggccgggatccggcttcaagatcaggttgttatcatagacgaggcgcataatctcatcgacaccattaccggcatgcactccgtggaagtgagtggctctcagctgtgccaggcccactcccagttgcttcagtatgtagagaggtacggtaaaaggcttaaagccaagaatctgatgtacctcaagcaaatactgtaccttttagagaagttcgtggcagtcctcggcggcaacattaagcaaaatcctaacacgcagtcactgtcacagaccggcactgagctgaagaccattaacgacttcctgtttcagagccaaatagacaacatcaacctctttaaggtgcagcggtactgtgagaaatcaatgatcagccgtaagctcttcggatttactgagagatacggagctgtcttctcttcaagggagcaaccgaagctcgctggatttcaacagttcctgcaatcactgcaaccacgcaccactgaggcactggccgcacccgccgacgaaagccaggcgagcacactgagacctgccagcccactcatgcatatccagggctttctggccgcgctcacgactgcaaatcaggatgggcgtgtcattctcagccgccagggctcactgtcacagagcactctaaagttcctgttgcttaaccccgcggtacacttcgctcaggtggtgaaagagtgtcgagcagttgtgatcgccggggggactatgcagcccgtgtctgattttcgacagcagttgcttgcttgtgctggtgtcgaggccgagagggtagtggagttctcttgtgggcacgttatccctccggacaacattctccccctcgtgatttgcagcggaattagtaatcaaccgttggagtttactttccagaaaagggagctgccccaaatgatggacgaggtaggtcggatactctgtaatctctgtggcgtcgtgcccggcggcgtagtttgctttttcccgagttatgagtatcttcggcaggtccacgcccattgggaaaagggcggcctcctcggaagactagctgcacggaagaaaatattccaggaacctaagagtgctcaccaagtggaacaagtcctcctcgcgtattcccggtgcatccaagcctgtggacaggagagagggcaagttactggtgccctgctgctgagtgtggtcgggggcaagatgtctgagggcatcaatttttctgataacttgggcaggtgtgttgtcatggtgggcatgcctttcccaaacattcggtcagcggaacttcaagagaagatggcctacctggatcagaccctcagtccccgccctggcactcctagggaaggctctggaggagagcctgtacatgagggtcgccaacccgtgcacaggcagggccaccaggcccccgagggtttttgccaaagatctgcccccggacccgccatttgccctgccccttgccctggccaggccgccggcctggacccttccccttgcggcgggcagtcgtacctctggccacgccattgttgctgcgctgaagtgtctcctggcgaggtgggcctctttctcatgggaaatcatactacagcgtggcgtcgggctctgcccctgtcgtgtcccttggaaactgtctttgttgttggagtggtgtgcggcgaccccgtgactaaggtgaagccgcggaggagggtctggagcccagagtgctgtcaagaccccggaactggcgtgagcagccgcaggcgaaagtggggcaaccctgagtag

SEQ ID NO: 243476 - DNA, 2913 bp, Artificial Sequence
  derived and/or modified sequence
atggccaacgagacccagaaggtgggcgccatccacttccccttcccattcaccccctattcaatccaggaggacttcatggctgaactctacagagtgctggaggcgggaaaaattgggattttcgaatctccaaccgggaccggcaaaagccttagcctgatctgcggagcattaagctggctgcgtgattttgagcagaaaaaacgggaagaagaggcccgcctgctcgagacaggaactgggccacttcacgatgaaaaagatgagagtctttgtctgagcagttcctgcgaaggtgccgccggcaccccgaggccagccggagagcccgcttgggtgacccagtttgtccaaaagaaagaggaaagagatctggtcgataggctcaaagctgagcaggcgagaaggaaacaacgcgaagagcggcttcaacaactgcagcaccgcgtccagttgaagtacgcggccaagaggctccggcaggaggaagaagaaagggagaacctgttgaggttaagtcgggagatgttggaaactggccctgaggccgaaagactagagcagctagaatcaggcgaagaggagctggtcctcgccgagtacgagagtgatgaggagaaaaaggtcgccagccgggtggacgaggatgaggatgacctggaggaagagcacataaccaagatttactactgctctcgtacccactcccaactggctcaatttgtgcacgaagttaagaaaagcccttttggcaaagatgtaagactggtgtcccttggaagccgccagaatctgtgtgtgaatgaggacgtgaaaagtctgggttcagtgcagctgatcaatgatcgctgtgtggacatgcagcggtcgcgccatgagaaaaaaaaaggtgctgaggaggagaaacccaaacggcgccggcaggaaaaacaagccgcatgccccttctataatcacgaacagatggggctgttgagagatgaagctctggctgaggttaaagatatggaacagctactggcactaggaaaggaagcgcgcgcttgcccttattacggctcacgcctggctatccccgctgcacagctggtggtactcccctaccagatgctccttcacgctgccactcggcaggcagcagggatcaggttacaggaccaggtggtcattattgatgaagcacacaaccttatcgatacaatcacggggatgcactctgtcgaggttagcggcagtcagttgtgtcaggcacatagtcagcttttacagtacgtagaacggtacggaaaacggctgaaagctaaaaatctgatgtatctgaagcagattctgtacctcctggagaagttcgttgctgtccttggcggtaacatcaaacagaatcctaatacacagtctctgtcacagactgggacggagctgaagaccatcaacgacttcctgttccagagtcagattgataacatcaacctgttcaaggtgcagaggtactgtgagaaaagtatgatttcacgtaaactgtttggctttaccgaacgatatggtgccgtgttcagctcgcgggaacagcccaagttagccggattccagcagtttttacagtcgctccagcctcgcacaacagaagctctcgccgctcctgctgatgaaagccaggcctccactttgcgccctgcttctcctcttatgcatatccaaggtttcctcgccgccctaacgactgccaatcaggatggccgagtgatattgagccggcaaggctccctgtcacagtctactctgaagttcttactcctgaatccagccgttcatttcgcacaggtcgtgaaggagtgtcgggcagtcgtgatcgccggcggcactatgcagccggtgtccgactttagacagcaacttctggcatgtgccggagtcgaggcggagagagtggtggagttctcttgtggccacgtaattccacctgataatatcctgcctctggtgatctgctctggtatcagtaaccagcccttggagtttactttccagaagcgcgaacttcctcagatgatggacgaagtaggtaggattctctgtaatctgtgcggtgtggtgccaggcggtgtggtctgtttctttccctcttacgagtatctgcgccaagtgcacgcacactgggagaaaggggggctgttggggaggctagctgctaggaaaaagattttccaggaacctaagtcagctcaccaagtggagcaggtactgctcgcctattcccgctgcatccaggcctgtggtcaggagcgaggacaggtaacgggagcactgctcttgagcgtggttggcggaaagatgtctgagggaatcaacttttccgataatctaggtagatgcgttgttatggtgggcatgcccttccccaacatcagatcggctgagctgcaggaaaaaatggcatatctggaccagactctctctccacgacccgggacccctcgcgagggctccgggggcgagcccgtccacgaggggaggcagcctgtccaccggcaaggtcaccaagctcctgagggattttgtcagcggagcgccccgggcccagctatctgtccggctccctgccctggtcaagctgcggggctcgacccgagcccttgtggggggcagtcttatctctggccccgccattgctgttgtgcagaagtgagccccggggaggttggcctcttcctcatggggaaccataccaccgcctggcgccgcgcccttcctctgtcttgtccactggagacagtgtttgtggtgggggttgtgtgcggggacccagtgacaaaggtgaagcctaggcgacgggtctggtcacctgaatgttgtcaggaccctggtactggagtatccagtagacgacgaaagtggggcaacccggagtag

SEQ ID NO: 243477 - DNA, 1671 bp, Artificial Sequence
  derived and/or modified sequence
gaggaagaacctctgtggcagggctgcagcgccggactcccatggttaccagcagagaaaaagaaaggggctgaggaggagaaaccaaaaagaagaagacaggagaaacaggctgcctgccctttctacaaccacgagcagatgggtttattgcgagatgaagctctggctgaagtaaaggacatggagcaactcctggcgctgggaaaagaggcacgggcttgcccatactatgggagccggctagcaattcccgctgcgcagttggtcgtattaccataccagatgctcctgcacgccgcaactcggcaggcagctggaattagattacaagaccaagtcgtgatcattgacgaggcccataacctgatcgatactatcacaggtatgcatagcgtcgaggtgtctgggtcccagctatgccaggcacactcccagctcctccagtacgtagagaggtacggcaaacggctgaaggccaagaatctcatgtatctcaagcagatcctgtatctcctggagaagttcgtggccgtgctcgggggtaacatcaaacaaaatcctaatacccagtccctttcccaaacagggaccgagttaaagaccattaatgatttcttattccagtcacagattgacaacataaatctgttcaaagtccagcgttactgtgagaaaagtatgatctctaggaaactcttcggtttcaccgagcggtacggagccgtcttctcctctcgtgagcagccgaaactcgccggattccaacagttccttcaatctcttcaacctcgaactacagaggcattggctgctccagcagatgagagtcaggcatccacgctgcgccctgcatcccccctgatgcacattcaggggtttctggctgctctcaccacggccaaccaggatggacgtgtgattctgtctaggcaggggtccctcagccagtcaacacttaaatttctgttactgaacccagcagtgcattttgcacaggtcgtcaaggagtgtcgagccgtggtgatcgccggaggaacaatgcagccagtgagtgacttccgccaacaacttttggcctgcgcgggtgtggaggctgaaagggtggttgaattcagctgtggacatgttatacctccagataatattctcccactagtgatttgtagtgggatcagcaaccagcccctggagtttacatttcaaaagagagaattgccccaaatgatggacgaggtcggtcggattctgtgcaatctttgcggggtggttccaggaggcgtggtgtgcttttttccttcttatgagtacttgagacaggtgcacgcccactgggaaaaaggaggcctgctgggccgactagccgctcgcaaaaaaatcttccaggagcccaaatcagcccatcaagtggagcaggttttgctcgcctactcccgatgtatacaggcctgcgggcaggaacgagggcaggtgactggagctctcctcttgagcgttgtaggaggtaaaatgagcgaaggcatcaacttttcagataacctgggtcgatgtgtcgtcatggtcggcatgcccttccctaacatcagatccgctgagttacaggagaaaatggcttatcttgaccagaccctcgctggaccctccggcacaaggaggattctgcccgcttag

SEQ ID NO: 243478 - DNA, 2913 bp, Artificial Sequence
  derived and/or modified sequence
atggccaacgagacccagaaggttggggctattcactttccttttccctttacaccctattccatccaggaggattttatggccgagctgtatagagtactcgaggctggcaagatcggtatattcgagagccctaccggcaccggaaaatcactgtctctcatctgtggcgcactcagttggctcagagacttcgagcagaagaagagggaagaggaggccagattgctcgagacaggaactggcccactgcacgacgagaaggatgagtcgctttgcctgagctcatcgtgtgagggtgccgctggcacgccccgacccgctggtgagcctgcatgggtgacgcagttcgttcaaaaaaaggaagagcgagacttggtcgatagactgaaggctgagcaggcaaggcgtaagcagagagaggagagactgcaacagctgcagcacagagtccagctgaaatatgcggctaaaagacttagacaggaggaggaggaacgagagaatcttttgcggctgtctcgtgagatgctggagaccggccctgaggcagagcgcctggagcaattagagtccggcgaggaagagctggtcctcgcggagtacgagagcgacgaggaaaaaaaggtggcaagtagagtggacgaggatgaagacgacttggaagaagaacacattacaaagatatactactgctccaggacacactcccagctggcccaattcgtgcatgaggtgaagaaaagtccttttggaaaggacgtaaggctggtaagtcttggcagccggcagaacctctgcgttaatgaggacgtcaaatctctcggatctgtccagcttataaacgataggtgcgtggacatgcagcgttctcggcacgaaaaaaaaaagggagccgaggaggagaagcctaaacgcagacgacaggaaaagcaggctgcctgccctttttacaatcatgagcaaatgggcttgctccgcgatgaggctctggctgaagtgaaggacatggagcagcttctcgcattgggcaaggaagctagagcttgtccatattacgggtcccgactggccatccccgctgcccaactagtggtactgccttaccagatgttactccatgcagccactaggcaggcggcaggcattcgtctgcaagatcaggtggtgataatagatgaagcacataacctcatcgacaccataactggtatgcatagtgtggaagtttccggcagccaactgtgtcaggctcactcgcagcttctgcagtacgtcgaacgatatggtaagagactgaaagctaagaatctgatgtacctgaaacagatcctttacttacttgagaaatttgttgcagtgctgggtggaaacattaaacagaatccaaacacccaatccctcagtcaaacaggcactgagttgaagaccatcaatgatttcctgtttcagagccagatagataatatcaatctgtttaaggtgcaaaggtattgcgaaaaatccatgatcagccgcaagctcttcggcttcaccgagaggtacggcgctgtcttcagcagtcgagaacaacctaagcttgccggatttcagcagtttctccagtcactgcagcctagaacaaccgaggccctggctgcgccagccgacgagtctcaggcgagcacgctgcgccctgcgagccctctcatgcacattcaggggtttctcgctgccctcaccacggctaatcaagacgggagagtgatcctgtcacggcagggatccctgtctcagagcaccctgaagttcctgctgttgaacccagccgtccatttcgctcaggtggtgaaagagtgccgagcggttgtgatcgctggtgggacaatgcagccagtcagcgacttcaggcagcagctgctggcctgtgctggggtggaggccgaacgtgtagttgagttcagctgcggccatgtgatccctccagacaatatcctgcccttggtcatctgctcaggtatctcgaaccagcctctggaatttactttccagaaacgggaactgccacagatgatggacgaggtgggcagaatcctttgtaacctctgcggtgttgttccaggaggggtggtgtgtttttttccttcctacgaatatctccgacaagtgcacgcacactgggagaagggcggactgttgggcagactggcggcaaggaaaaagattttccaagaacccaaatcggcacaccaagtcgagcaggtgctgctggcctattccaggtgtatccaggcctgtggccaggagcgtggacaggtcaccggtgctctgctcctgagcgttgttgggggaaagatgtccgagggcatcaatttttctgacaacctaggtagatgtgttgtaatggtcgggatgccttttcccaacatacgctccgccgaattgcaggagaaaatggcatatttagaccagactctgtcacccagacctgggaccccacgagagggttccggaggtgaaccagtgcacgaggggaggcagccggtacaccgtcagggtcatcaggctcctgaagggttctgccagcggagtgcacccggtccagctatctgcccggcaccttgcccaggacaggctgccggattggacccttccccatgtggtgggcagtcatacctctggccacgacactgttgttgtgcggaggtctcccccggagaggttgggctttttctgatggggaatcacactacagcctggcgtagggctcttcccctgtcctgccccctagaaaccgtctttgtggtcggcgtggtctgtggtgaccctgttacaaaagtgaagccaagacggagggtgtggagtcctgaatgctgccaggaccccggaaccggggtgtccagccgtagacgcaagtgggggaacccagagtag

SEQ ID NO: 243479 - DNA, 2913 bp, Artificial Sequence
  derived and/or modified sequence
atggccaatgagactcagaaagtgggcgcaatccacttcccgtttcccttcacaccctactcaattcaggaagatttcatggcagaattatatcgggttctcgaggctggcaaaattggaatattcgaatctcctaccgggactggcaagtcactgtctcttatctgtggggctctctcctggttaagggattttgagcagaagaaaagagaagaggaagctaggctgctggagaccggcactggtccgttgcacgacgagaaagacgaaagcttgtgcctgagctcttcctgtgagggcgcagccggaacacctagacctgcaggagagccagcgtgggtcacccagtttgtgcaaaagaaggaggaacgcgaccttgtggacaggcttaaggcagaacaggcacgaagaaagcagcgcgaggagcgcttgcagcagctccaacatcgggtgcagctgaaatacgcagcgaagcgcctgagacaggaggaggaagaaagagaaaatctcttgagattgagcagggagatgctagagacaggacctgaggctgaacgactggaacagctcgagtccggagaggaggaactggttctggctgaatacgaatctgatgaggagaagaaagtggcatcccgtgtcgacgaagatgaggatgacctagaggaagaacatattaccaagatttactactgcagtagaacacactcccaactcgctcagtttgtccacgaagtgaaaaaaagcccttttggaaaggacgtcaggctggtgtctctgggttcccgacagaacctttgcgtaaacgaggatgttaaatctctgggttccgtgcagctgattaatgacaggtgtgtggacatgcagcgatctcgacatgagaaaaagaagggggctgaggaggagaagccaaagcgtcgccgacaggagaagcaagccgcttgcccattctataatcatgagcagatgggtctcctgcgcgacgaagccctggctgaggtgaaagacatggaacagttgctcgccctgggcaaagaggcaagggcctgtccttattacggaagcagactggcaattcccgctgctcagctggtagttctcccctatcagatgctcctgcacgctgcaactcgccaagcagctggaatacgccttcaggatcaagttgtcatcatcgacgaggcccacaatctgatagacaccattacgggaatgcactccgtggaggtatcgggctcccaactgtgccaagctcactctcagttactgcagtatgtcgagaggtacggtaaacgcttgaaggccaaaaatctgatgtacctgaaacagattctgtatcttttggagaaatttgttgcagtgctgggcggaaatataaagcaaaaccctaatacccagtcactgagtcaaacaggcacggaactgaagacgattaacgacttcctgttccagtcccagatcgataatatcaatcttttcaaagtgcagagatactgcgagaaatcgatgattagccggaagctctttggcttcacagaaaggtatggagctgtcttctcatctcgagagcagcctaagctagcgggttttcagcagttccttcagagcctacagccgaggacgacggaggcattagccgcaccagcagatgaatcacaggcttcgacattacgaccagcttctcctctcatgcacattcagggcttcctggccgcattgacgacggcaaaccaggatggcagagttattctgagccgacagggcagtctgtctcagagcacacttaagttcctcctgttgaatccagccgtccacttcgctcaggttgtcaaggagtgtagggctgtggtcatcgccggtggtactatgcagcccgttagtgacttccggcagcagttgctggcctgcgcaggagtcgaggcagaacgcgtggtggagttctcgtgcggtcacgtgatcccccctgacaacatcctgccactggtgatctgttctggcatcagcaatcagcctttggagtttacattccagaagagggagctgcctcagatgatggacgaagttggcagaatactttgtaacctgtgtggcgtcgtgcctggcggagtggtgtgctttttcccctcttacgagtatttgcgccaggtccatgcccactgggagaaagggggtctcctcggccgtctcgcagcgcgaaagaagatcttccaggaacccaagtcagctcaccaggtggagcaagttttgctggcgtattctaggtgtattcaggcctgtggtcaggaacgcggacaggtcacaggggctttgctgctgagcgtcgttggtggaaagatgtccgaggggattaatttctcagacaacttgggcagatgcgtagtgatggttggcatgccttttccaaatatccgctcggctgaactccaagagaaaatggcctacctcgaccagaccctgagcccacgccctgggacccctcgcgaaggctcaggcggtgaacccgtacatgaaggccgacagccagtccatcggcagggccatcaagccccagaggggttttgtcagaggtctgcccctggacctgcaatctgtccggcaccatgcccgggtcaagccgctgggctggatcctagtccctgcggaggccagtcttacctgtggcctaggcattgctgttgcgcagaggtgtcaccaggagaggttggcctctttctgatgggcaatcacaccaccgcctggcgcagagctttgcctctcagttgtcctctcgaaactgttttcgtggtgggtgtggtctgcggggatccggtgactaaggtgaaacctaggcgcagggtttggtctcccgagtgctgccaggatcctgggactggggtgtcatcccggaggcgaaagtgggggaaccccgagtag

SEQ ID NO: 243480 - DNA, 2593 bp, Artificial Sequence
  derived and/or modified sequence
ccggaagtgcgaggccgaggagagccacgtgggtcgagctggggcgcagctcgcatgggggagtctatcccgctggccgccccggtcccggtggaacaggcggtgctggagacgttcttctctcacctgggtatcttctcttacgacaaggctaaggacaatgtggagaaggaacgagaggccaacaagagcgcggggggcagctggctgtcgctgctggcggccttggcgcacctggccgcggccgagaaggtctatcacagcctcacctacctggggcagaaactagggggccagtctttcttcagcaggaaggattccatccgcaccatctatacttcattgcataatgagctgaagaaggtggtgactggccgtggtgccctgggtgggactgctcctcacgtggaagaactcctttcccacctgtcagagcagctctgcttctttgttcaggctcggatggagatggcagacttctatgagaagatgtacaccctcagcacacagaagttcatcaatgctgaagagctcgttggccttttggatgccatcatgaaaaaatacagctccagatttcaccacccaatcctcagtcctttggaaagcagtttccagctggaagttgacgtcctgtgtcatctcctgaaagcccaggcccaggtctcagagtggaagttcctcccatctctggttaatttacacagtgcgcacaccaaactgcagacgtggggccagatctttgagaaacagcgggagaccaagaaacatctgtttggagggcagtctcagaaggccgtgcagcctccacaccttttcctttggctgatgaaactcaaaaacatgcttcttgccaagtttagcttttactttcatgaggctctgagccgacaaacgactgcttcagaaatgaaaacgttgacagcaaaagctaacccagacttttttggaaagatttccagcttcatcagaaaatatgatgctgccaatgtgtccttaatttttgacaacagaggttctgagagttttcagggtcatggttatcaccacccccattcctacagagaggcccccaagggtgtggaccagtatccagctgtagtgtctctgcccagcgacaggccagtcatgcactggcccaatgtcatcatgatcatgacggaccgcacatctgatctgaacagcttggagaaagtggtccacttctatgatgacaaagttcagagtacctacttcctaacccgcccggaacctcactttaccattgtcatcatttttgagtcaaagaaatctgagagagactcccactttatttccttcctcaatgaggtctcacttgcccttaagaaccccaaagtgtttgcaagtctgaaacctggagccaaaggttagcaggtgatttgcgtggaggggtttcaagactagaaactgttcttaattgccctaatgatctacggtggtctgtgaatagagtttacatccattcatgcctctttcagaactaaattaaagacaaatcctccctgtgttgcacactttataagcaattaaggccaattgaattaagtttccaaagagtaatctaggaagtggtcatgggctaccatgtgtctccatggtacagcaaagtagtttcagtattttcccctattttgctatatttcttgtagattgaatatttattgggcttttttttttcccatatgtttttctgttgttctaaacattgtgttctactgcaattccaaacagcctctctgtttccctccttcttggaagagtaatagggatgagatattaaatggcctttttagaattaagaactatatgttttctgtctcataaattagcaaatgaatatggagttagtagatttatgattctgatctacaaattaacatttttgatgccaaaattagggtcttggtaagaaatttctatcagttattgaaactgaaagtgagtcagattggtagcatgacgtaaggttttaacagttcagaagatcctcatggcagctttaatagccatgggttcttttggggtaatgtacacacctaactgcatttgttttgacttctttaatgtttgaatgtttcactctgttgtaaagtcagcataagccatcatgtgggctttcttcattcttcagcatattatccgcttcgctttctgtttatcacttttctgctgaaatgtacatgtttggctctactccttggttatttttaggcttaaaagcatgcagtcggtttttcagccacttttagatactcatgcaacatagcctacttttataaaatcaaaatgaaggtcttcatacgctgtacttgctaaaaatcaactgtgcgcttgaaagacctcttcatagttgagtaatcacctcagtacttaagcacttctgaacttgggtttcatgcctgccccccacaaattatgtttagaagcagcactgcatcttagcacatgctgccttatttctttccttcggcaggtgttcatgggaagtaggtggatcagtgaaggcataatgggctgtggagaccttcacttctagattattgattcaaaataaaaagaagccacaaagagt

SEQ ID NO: 243481 - DNA, 1338 bp, Artificial Sequence
  derived and/or modified sequence
atgggcgagagcatccccctggccgcccccgtgcccgtggagcaggccgtgctggagaccttcttcagccacctgggcatcttcagctacgacaaggccaaggacaacgtggagaaggagagagaggccaacaagagcgccggcggcagctggctgagcctgctggccgccctggcccacctggccgccgccgagaaggtgtaccacagcctgacctacctgggccagaagctgggcggccagagcttcttcagcagaaaggacagcatcagaaccatctacaccagcctgcacaacgagctgaagaaggtggtgaccggcagaggcgccctgggcggcaccgccccccacgtggaggagctgctgagccacctgagcgagcagctgtgcttcttcgtgcaggccagaatggagatggccgacttctacgagaagatgtacaccctgagcacccagaagttcatcaacgccgaggagctggtgggcctgctggacgccatcatgaagaagtacagcagcagattccaccaccccatcctgagccccctggagagcagcttccagctggaggtggacgtgctgtgccacctgctgaaggcccaggcccaggtgagcgagtggaagttcctgcccagcctggtgaacctgcacagcgcccacaccaagctgcagacctggggccagatcttcgagaagcagagagagaccaagaagcacctgttcggcggccagagccagaaggccgtgcagcccccccacctgttcctgtggctgatgaagctgaagaacatgctgctggccaagttcagcttctacttccacgaggccctgagcagacagaccaccgccagcgagatgaagaccctgaccgccaaggccaaccccgacttcttcggcaagatcagcagcttcatcagaaagtacgacgccgccaacgtgagcctgatcttcgacaacagaggcagcgagagcttccagggccacggctaccaccacccccacagctacagagaggcccccaagggcgtggaccagtaccccgccgtggtgagcctgcccagcgacagacccgtgatgcactggcccaacgtgatcatgatcatgaccgacagaaccagcgacctgaacagcctggagaaggtggtgcacttctacgacgacaaggtgcagagcacctacttcctgaccagacccgagccccacttcaccatcgtgatcatcttcgagagcaagaagagcgagagagacagccacttcatcagcttcctgaacgaggtgagcctggccctgaagaaccccaaggtgttcgccagcctgaagcccggcgccaagggctag

SEQ ID NO: 243482 - DNA, 1338 bp, Artificial Sequence
  derived and/or modified sequence
atgggtgagtccattcccttagctgcgcctgtgcccgtggaacaggccgtgctggagacgttctttagtcaccttggaatcttctcctacgataaggccaaggacaacgtggaaaaagaacgtgaggcaaacaagtctgctgggggcagctggctttccctgttggctgctctcgcccacctggcggccgccgaaaaggtttatcactcgctcacctacctcgggcagaaactgggggggcagtcattcttcagtcggaaggacagcattagaactatttacacgagcctccataatgagctaaagaaggtggtcacaggaagaggtgctctcggaggcacagcaccccatgttgaggaactgctgagccatctcagcgaacaattatgcttctttgttcaggcaagaatggaaatggctgacttctacgagaagatgtacacattgagcacacagaaattcattaatgccgaagaactcgttgggctgctggacgcaatcatgaagaagtacagtagcagattccatcaccctattttgtcccctctagagtccagttttcagctggaggtcgacgtcctgtgtcaccttctaaaagcccaggcccaggtttctgagtggaaatttctgccttctctcgtaaatttgcactccgcacatacaaaactccaaacctggggacaaatctttgaaaaacagcgcgagacaaagaaacaccttttcggtgggcagagccagaaagcagttcagccccctcacttatttctttggctcatgaaattgaaaaacatgttgctggccaaatttagcttctactttcacgaggctctctcaaggcagacgacagcatcagagatgaagaccttgacagccaaggctaaccctgacttctttggcaaaattagtagttttatccggaaatacgatgccgctaatgtatctctcatttttgataaccgaggcagtgagtcattccagggtcacggctaccaccaccctcactcatatagggaagcccccaaaggagtggatcagtatcccgccgtcgtctctttgccatcagaccgtccagttatgcactggcctaacgtgattatgatcatgacggatcgtacttcggatctgaattccctggagaaggtcgtgcatttctatgacgataaggtgcagtccacttacttcttgacccgccccgaaccacatttcacgatcgtgataatatttgaatccaaaaagagcgagagagactctcatttcatctccttccttaatgaggtgtcacttgctttgaagaatccaaaggtctttgccagcttaaagcccggcgcgaagggatag

SEQ ID NO: 243483 - DNA, 1338 bp, Artificial Sequence
  derived and/or modified sequence
atgggagagagcatccccctggccgcccctgtgcctgtggagcaggccgtgctggagaccttcttcagccacctgggcatcttctcctatgacaaggccaaggacaacgtggagaaggagcgggaggccaacaagtctgctgggggctcctggctgagcctgctggccgccctggcccacctggccgctgctgagaaggtgtaccacagcctgacctacctgggccagaagctgggcggccagagcttcttcagcaggaaggacagcatccgcaccatctacaccagcctgcacaatgagctgaagaaggtggtgacaggccgcggggccctgggcggcacagcccctcatgtggaggagctgctgagccacctgtctgagcagctgtgcttctttgtgcaggccaggatggagatggctgacttctatgagaagatgtacaccctgagcacccagaagttcatcaatgctgaggagctggtgggcctgctggatgccatcatgaagaagtacagcagccgcttccaccaccccatcctgagccccctggagagcagcttccagctggaggtggatgtgctgtgccacctgctgaaggcccaggcccaggtgtctgagtggaagttcctgcccagcctggtgaacctgcacagcgcccacaccaagctgcagacctggggccagatctttgagaagcagcgggagaccaagaagcacctgtttggaggccagagccagaaggctgtgcagcccccccacctgttcctgtggctgatgaagctgaagaacatgctgctggccaagttctccttctacttccacgaggccctgagccggcagaccacagccagcgagatgaagaccctgacagccaaggccaacccagacttcttcggcaagatcagcagcttcatcagaaaatatgatgctgccaacgtgtccctcatctttgacaacagaggcagcgagagcttccagggccacggctaccaccacccccacagctaccgggaggcccccaagggcgtggaccagtacccagctgtggtgtccctgcccagcgacaggcctgtgatgcactggcccaacgtcatcatgatcatgacagacaggaccagtgacctgaacagcctggagaaggtggtgcacttctatgatgacaaggtgcagagcacctacttcctgaccaggcctgagccccacttcaccatcgtcatcatctttgagagcaagaagtctgagcgggacagccacttcatctccttcctgaatgaggtgtccctggccctgaagaaccccaaggtgtttgccagcctgaagccaggggccaagggctag

SEQ ID NO: 243484 - DNA, 1338 bp, Artificial Sequence
  derived and/or modified sequence
atgggcgagagcatccccctggccgcccccgtgcccgtggagcaggcagtgttggagacgttcttcagccacctcggaatcttcagttatgataaggccaaggataacgtggagaaggagagagaggccaacaagagcgctggtggtagctggctgtcattgctcgcagctctggctcacctggcagccgctgaaaaggtgtatcactccctgacatatctgggccagaagctcgggggccagtcctttttctcgagaaaggactccatcagaactatttacacatccctgcacaatgaattgaagaaggtcgtgactggcaggggcgcattaggggggacagccccgcatgtggaggagttgctctcccacctctccgagcagctatgtttcttcgtgcaggccagaatggaaatggctgatttctacgaaaagatgtacacactgtctacacagaagttcatcaatgccgaagagcttgtaggccttctggatgcgattatgaaaaaatatagcagtcgcttccatcatcctattctatccccactcgaatcttcttttcaactggaggtggacgtgttgtgccaccttctcaaggcccaggcccaggtgtccgaatggaagtttcttccctctttggtcaacttacacagcgcgcacacaaaactacagacatggggccagattttcgagaagcagagagagacaaaaaagcacttattcggcggacagagccagaaggcagtacagccaccacacctttttctgtggctaatgaaacttaaaaacatgctgctggctaagttttctttttatttccatgaggccctatctcgccagacgactgcttccgaaatgaaaactttgaccgccaaagcaaacccagacttttttggtaagatttcctcgttcatccggaaatacgatgcagcgaacgtttctctcattttcgacaatcgaggaagcgaaagtttccagggtcatggttaccaccacccccacagttatcgcgaggctcctaaaggggtcgaccagtaccctgccgtggtctcactaccttccgatagaccagtgatgcattggcccaacgttatcatgattatgactgataggacatccgatctcaattcattagagaaagtggtgcacttctacgacgacaaggtacagtctacctacttcctgacgcggcctgagccgcatttcaccatcgttataatattcgaatccaaaaagagtgaacgggatagccatttcatcagctttttgaacgaggtgtccctggctcttaagaaccctaaggtcttcgcctcgttgaaacccggagctaagggctag

SEQ ID NO: 243485 - DNA, 1338 bp, Artificial Sequence
  derived and/or modified sequence
atgggcgaatccatccccttggcagcaccagtgcccgtggagcaggccgtgctggagacattcttttctcatctcggcattttttcctatgataaggccaaggataacgtggagaaggagagggaggcaaataagtctgccggaggcagctggctgtctctcctggctgctctcgcccatctggcagccgcagagaaagtctaccacagtttgacttacctgggccagaaactgggaggtcagtcgttttttagtcggaaagactctatcaggaccatctataccagtctccataacgaacttaaaaaggtggtgactggtaggggcgcactaggcggaacggcccctcatgtggaggagttgctgtctcacctgagtgaacagctgtgcttctttgtgcaagctcggatggagatggctgatttttacgaaaagatgtacacgctgtcaactcaaaaattcatcaacgctgaggaactggtgggcctgttggatgccattatgaagaaatactcttctagattccaccaccctattctctctccactcgagtccagttttcagttggaagtagatgtgttatgccatctgttaaaggcgcaggctcaggtaagtgaatggaagtttcttccctctttagtcaatctgcatagcgcgcacacaaagctgcagacatggggtcagatttttgagaaacagcgagaaaccaagaagcacttgttcggcggtcagtcgcaaaaggccgtccaaccgcctcatcttttcctttggctcatgaagctcaaaaatatgctcttggccaagttcagcttttactttcacgaagccctgtctcgccagacaacggccagcgagatgaagaccctgacagctaaagcaaaccctgacttttttgggaaaattagctccttcattagaaaatatgatgccgctaatgtctctctgatatttgataacaggggtagcgagtctttccagggtcacgggtatcaccacccccactcctatcgagaagcccctaaaggtgtggatcagtatccagcagtggtttcactcccttctgaccgtccagtgatgcactggcccaatgtaatcatgatcatgacggacagaacctcggacctgaattctttagaaaaagtggtccacttctatgatgacaaagtgcagtccacgtacttcctgaccaggcctgaaccgcacttcacaatcgttataatttttgagtccaaaaagtctgagcgagatagccattttataagcttcctgaacgaagtgagcctcgctttaaagaatcctaaggtctttgccagtttaaagccgggagctaagggatag

SEQ ID NO: 243486 - protein, 429 aa, Artificial Sequence
  derived and/or modified sequence
MAAMLKCVMSGSQVKVFGKAVQALSRISDEFWLDPSKKGLALRCVNSSRSAYGCVLFSPVFFQHYQWSALVKMSENELDTTLHLKCKLGMKSILPIFRCLNSLERNIEKCRIFTRSDKCKVVIQFFYRHGIKRTHNICFQESQPLQVIFDKNVCTNTLMIQPRLLADAIVLFTSSQEEVTLAVTPLNFCLKSSNEESMDLSNAVHSEMFVGSDEFDFFQIGMDTEITFCFKELKGILTFSEATHAPISIYFDFPGKPLALSIDDMLVEANFILATLADEQSRASSPQSLCLSQKRKRSDLIEKKAGKNVTGQALECISKKAAPRRLYPKETLTNISALENCGSPAMKRVDGDVSEVSESSVSNTEEVPGSLCLRKFSCMFFGAVSSDQQEHFNHPFDSLARASDSEEDMNNVCCRKEFNGSDAKYFCII

SEQ ID NO: 243487 - DNA, 1290 bp, Artificial Sequence
  derived and/or modified sequence
atggccgcaatgcttaagtgtgtgatgtccgggagccaagtaaaagtgttcggcaaggccgtgcaagccctgtcccggatttcagacgagttttggctcgaccccagcaagaagggcctcgccctccgctgtgtgaattcaagtcgctctgcatatgggtgcgttttgttttcaccagttttcttccagcattatcagtggtccgctctcgtgaaaatgagtgaaaatgaactggatactacactgcacttgaagtgcaagttaggcatgaaatcgattttgcccatattcagatgcctgaactcactagagaggaacatcgagaagtgtaggatctttaccaggtcggataagtgcaaggtcgttattcaatttttctataggcatggcatcaaaaggactcacaacatttgtttccaggaaagccagccactgcaggtgatctttgacaaaaacgtgtgcacgaatacactgatgatacagcccagattacttgccgatgccatcgtgctctttacaagctctcaggaggaagtgacactggccgtgactccactcaatttttgccttaagagcagtaacgaggaatccatggatctctctaacgccgtccactccgagatgttcgtgggctctgacgagttcgacttttttcagattggcatggacactgaaattaccttctgttttaaggagctgaaggggatcttaaccttcagtgaagccactcacgcccccatcagcatttattttgatttccctgggaagcccctggctctgtctattgatgatatgctcgtggaggccaacttcatcttagccactctggccgatgagcagagccgggcaagcagtccacagtccctgtgcttaagccagaaaaggaagagatcagacctaatagagaagaaggccggaaaaaatgtgaccgggcaggccctggaatgtatcagcaagaaggctgcaccgaggcggttgtaccccaaggagacactcactaacattagcgcccttgagaattgcggcagcccggctatgaaacgcgtcgacggagacgtttcagaagtgtccgagtcctccgtatccaatactgaggaagtgcccggctccttgtgtttgcgcaaattctcttgcatgttcttcggcgcagtgtcctctgaccagcaggaacattttaaccatcctttcgatagcctggcaagggcaagcgattcggaggaggatatgaacaatgtgtgctgtagaaaggaatttaacgggtctgatgccaagtacttttgcattatttag

SEQ ID NO: 243488 - DNA, 1290 bp, Artificial Sequence
  derived and/or modified sequence
atggccgccatgctgaagtgtgtgatgagcggcagccaggtgaaggtgtttgggaaggctgtgcaggccctgagccgcatcagtgatgagttctggctggaccccagcaagaagggcctggccctgcgctgtgtgaacagcagccgcagcgcctacggctgtgtgctcttcagccctgtgttcttccagcactaccagtggagcgccctggtgaagatgtctgaaaatgagctggacaccaccctgcacctgaagtgcaagctgggcatgaagagcatcctgcccatcttccgctgcctgaacagcctggagagaaatattgaaaaatgtcgcatcttcaccaggagtgacaagtgcaaggtggtgatccagttcttctacagacatggcatcaagaggacccacaacatctgcttccaggagagccagcccctgcaggtgatctttgacaagaatgtgtgcaccaacaccctgatgatccagccccggctgctggctgatgccatcgtgctcttcaccagcagccaggaggaggtgaccctggccgtgacccccctgaacttctgcctgaagagcagcaatgaggagagcatggacctgagcaatgctgtgcacagcgagatgtttgtgggcagtgatgaatttgacttcttccagatcggcatggacacagagatcaccttctgcttcaaggagctgaagggcatcctgaccttcagcgaggccacccacgcccccatcagcatctactttgacttccctgggaagcccctggccctgagcattgatgacatgctggtggaggccaacttcatcctggccaccctggctgatgagcagagccgggccagcagcccccagagcctgtgcctgagccagaagaggaagagaagtgacctgattgagaagaaggccggcaagaatgtgacaggccaggccctggagtgcatcagcaagaaggccgccccccggcggctgtaccccaaggagaccctgaccaacatcagcgccctggagaactgtggcagccctgccatgaagagggtggatggagatgtgtctgaggtgtctgagagctctgtgagcaacacagaggaggtgcccggcagcctgtgcctgaggaagttcagctgcatgttctttggagctgtgtccagtgaccagcaggagcacttcaaccacccctttgacagcctggcccgggccagtgacagcgaggaggacatgaacaacgtgtgctgcaggaaggagttcaatggaagtgatgccaagtacttctgcatcatctag

SEQ ID NO: 243489 - DNA, 1290 bp, Artificial Sequence
  derived and/or modified sequence
atggccgccatgctgaagtgcgtgatgagcggcagccaggtgaaggtttttggaaaagctgtgcaggctctgagtcgcatctccgatgagttctggctcgaccccagcaagaagggtcttgcattgaggtgcgtcaactccagccgatccgcctatggatgcgtgttattctcacccgtcttctttcagcactatcagtggtctgctctcgtgaagatgtctgagaatgaacttgatacaaccctccacttgaagtgcaagcttggcatgaagtctatcctgccgatctttcgatgcttgaattccctcgagaggaacattgagaagtgtagaatctttacaagatcagacaaatgcaaggtggtgatccagtttttctataggcacgggatcaagaggacacataatatctgtttccaggagagtcagcccctgcaggtaatctttgacaaaaacgtttgtacgaacactttgatgatccagccgcgactcttggcagatgccatcgtcttgttcacatcctcccaagaggaggttactttggccgttactcccctgaatttttgcctgaaatccagtaatgaagagtctatggacttgtccaatgccgttcattccgagatgttcgtgggaagcgacgagttcgattttttccagattggaatggacaccgagatcactttttgcttcaaggaactgaaaggcatactgacgttctctgaagccactcacgctccaatcagcatttattttgactttccaggaaagcccttggcactttctatcgatgatatgttggtcgaggcaaactttatccttgccaccttggcagacgagcagtcacgtgcgtcctcgccacaatccctctgcctgtcacagaagcgcaagcgatcagacctgattgagaaaaaagctggtaagaatgttactggtcaagcccttgaatgtatttccaagaaggctgcaccgcggaggctgtacccaaaggagaccctgaccaacatttccgccctagagaactgtggaagtcccgctatgaaaagagtggacggcgatgtctccgaagtctcagaaagctccgtctccaacacggaagaggtgccgggtagcctgtgccttcggaagttcagctgtatgtttttcggagctgtgtcgagcgaccagcaggagcacttcaatcacccattcgactctctggcaagggctagcgactctgaggaggatatgaataacgtctgttgcaggaaggaatttaacggaagtgacgcaaagtatttctgcataatctag

SEQ ID NO: 243490 - DNA, 1290 bp, Artificial Sequence
  derived and/or modified sequence
atggcggcaatgctgaagtgcgtgatgagcggtagtcaggttaaagtgttcggcaaggccgtgcaggctctgtctcggatatcagatgaattttggcttgacccatctaagaaaggcttggctcttaggtgtgtgaactctagtagatccgcctacggatgtgtgcttttttctccggtcttctttcagcattaccagtggagcgccttggtcaaaatgtcggagaatgagcttgacacgaccctgcatctaaaatgcaaattaggaatgaagagcattctgcccatttttaggtgcctcaacagtcttgagcgcaatattgagaagtgcaggattttcacacgcagcgacaaatgcaaggttgtcattcagttcttctatagacatggcatcaaacgcactcataatatctgtttccaggagagccagcctctgcaggtaatcttcgataaaaatgtgtgtacgaacacccttatgattcagccccgacttctcgccgatgcaatcgttctttttacgagctcacaggaggaagtgaccttggcagttactcctcttaacttttgcctcaagtctagcaatgaagaaagcatggacctttccaacgccgtgcacagcgagatgtttgtgggctctgacgagtttgacttcttccagattggcatggatacagagattactttttgcttcaaggagctgaagggcattctgacattcagcgaggctacccacgctcccattagtatctattttgactttccgggaaaacctcttgccctatccatcgatgacatgcttgttgaggccaacttcatcctggcgacattggcggacgagcagagtcgggcatcttctcctcagagcttgtgtctctcccagaaacggaagcggtctgatctcattgaaaagaaggcaggcaaaaatgtgacaggtcaggcactggaatgcatctctaaaaaggccgctcccagacggttatatcctaaggagaccttgacaaacattagtgcactcgagaactgtgggagtccagcaatgaaaagagttgacggagacgtaagcgaggtgagcgaaagcagcgttagtaatactgaagaggtcccaggcagcctgtgcctgcgcaaattttcctgcatgttcttcggggcagtgtccagcgaccagcaggagcattttaatcatccttttgactccctggccagagctagcgatagtgaagaggatatgaataacgtctgctgtagaaaagagttcaatgggagcgacgctaagtacttctgtattatctag

SEQ ID NO: 243491 - DNA, 1846 bp, Artificial Sequence
  derived and/or modified sequence
gcagagacgagatcgcgaagctttgaaaagcgcgggcaacatccgggcacctgggccgtcgagctgaggcgcgccttccgagcctgctttttagggcggatggcagccatgctgaagtgcgtgatgagcggcagtcaggtgaaagtatttgggaaagcagttcaagctctatcacgaattagtgacgagttctggctagacccatctaaaaaaggtcttgctctaagatgtgtgaattcttctcggtcagcatatggatgtgtcctgttctctcctgtgttttttcagcattatcaatggtcagctttagtgaaaatgagtgaaaatgaacttgacacaacactgcatttaaaatgcaaattgggaatgaagtcaattttgcccatctttagatgtctgaattcccttgaaagaaatatagagaagtgcagaatattcaccagatctgataaatgcaaagtagttattcaattcttctacagacatggtattaaaagaactcataatatatgttttcaagaaagtcagcctttgcaagttatttttgacaagaatgtttgtactaatacgctaatgattcaaccaagattgcttgctgatgccattgttctttttacatcaagtcaagaggaagttactcttgctgttactccactgaatttttgcctcaagagttctaatgaggaatcaatggatttgagcaatgctgtacacagtgagatgtttgttggctcagatgagtttgacttctttcaaattggaatggacactgagataacattttgtttcaaagaattgaagggaatactgacattttcagaagctacacatgctcctatatccatttattttgatttccctgggaaacctctggctttgagtattgatgatatgttagtggaagctaactttattttggccacattagctgatgaacaaagtagagcatcttcaccacagtcactgtgtctttcacagaaacgaaaaaggtcagatctgattgaaaaaaaggctggcaaaaatgtaactggccaggccctggaatgtatttcaaaaaaagcagcaccaagaaggctttatcctaaggagactctcacaaacatatctgcattggaaaactgtggcagccctgcaatgaaaagagtggatggagatgtcagtgaagtatcagaaagcagtgtcagcaacacagaggaagtgccagggtctctgtgtctcagaaagttttcttgcatgttctttggagcagtttcttctgaccagcaagaacacttcaaccaccctttcgacagtctggcaagagcaagtgacagtgaagaggacatgaataatgtgtgctgcaggaaagaatttaatggaagtgatgccaaatatttctgtattatctgacatagaacagtatcctccactgccaagacagcctgagtttggagtggaataaggtggaagacaaatgtctctgttctttggccctttaagagttagctttttacctgcacaaatggactaaaaaatctggcacaaaacattgttatgtaatgtcttatgatgtgtgcctctccctcccccaaacctgtttacagtcaattataacctgacaaacgagacttttgtaacatattattgttacatctttctgaaaccttcaaaccgtaaggaagtgttaactggcaagcagttgtactttagactttgtgagaaattcataaaggtggctgagtggatttgcatgctttagaactgtgaatagagttctaactgaaaccagaattaatttggctcttgtagcttagtaatgagtcatagctacccacaataacctaataaaaactcaagttcatcccaa

SEQ ID NO: 243492 - DNA, 1290 bp, Artificial Sequence
  derived and/or modified sequence
atggccgccatgctgaagtgcgtgatgagcggcagccaggtgaaggtgttcggcaaggccgtgcaggccctgagcagaatcagcgacgagttctggctggaccccagcaagaagggcctggccctgagatgcgtgaacagcagcagaagcgcctacggctgcgtgctgttcagccccgtgttcttccagcactaccagtggagcgccctggtgaagatgagcgagaacgagctggacaccaccctgcacctgaagtgcaagctgggcatgaagagcatcctgcccatcttcagatgcctgaacagcctggagagaaacatcgagaagtgcagaatcttcaccagaagcgacaagtgcaaggtggtgatccagttcttctacagacacggcatcaagagaacccacaacatctgcttccaggagagccagcccctgcaggtgatcttcgacaagaacgtgtgcaccaacaccctgatgatccagcccagactgctggccgacgccatcgtgctgttcaccagcagccaggaggaggtgaccctggccgtgacccccctgaacttctgcctgaagagcagcaacgaggagagcatggacctgagcaacgccgtgcacagcgagatgttcgtgggcagcgacgagttcgacttcttccagatcggcatggacaccgagatcaccttctgcttcaaggagctgaagggcatcctgaccttcagcgaggccacccacgcccccatcagcatctacttcgacttccccggcaagcccctggccctgagcatcgacgacatgctggtggaggccaacttcatcctggccaccctggccgacgagcagagcagagccagcagcccccagagcctgtgcctgagccagaagagaaagagaagcgacctgatcgagaagaaggccggcaagaacgtgaccggccaggccctggagtgcatcagcaagaaggccgcccccagaagactgtaccccaaggagaccctgaccaacatcagcgccctggagaactgcggcagccccgccatgaagagagtggacggcgacgtgagcgaggtgagcgagagcagcgtgagcaacaccgaggaggtgcccggcagcctgtgcctgagaaagttcagctgcatgttcttcggcgccgtgagcagcgaccagcaggagcacttcaaccaccccttcgacagcctggccagagccagcgacagcgaggaggacatgaacaacgtgtgctgcagaaaggagttcaacggcagcgacgccaagtacttctgcatcatctag

SEQ ID NO: 243493 - protein, 316 aa, Artificial Sequence
  derived and/or modified sequence
MLVTLGLLTSFFSFLYMVAPSIRKFFAGGVCRTNVQLPGKVVVITGANTGIGKETARELASRGARVYIACRDVLKGESAASEIRVDTKNSQVLVRKLDLSDTKSIRAFAEGFLAEEKQLHILINNAGVMMCPYSKTADGFETHLGVNHLGHFLLTYLLLERLKVSAPARVVNVSSVAHHIGKIPFHDLQSEKRYSRGFAYCHSKLANVLFTRELAKRLQGTGVTTYAVHPGVVRSELVRHSSLLCLLWRLFSPFVKTAREGAQTSLHCALAEGLEPLSGKYFSDCKRTWVSPRARNNKTAERLWNVSCELLGIRWE

SEQ ID NO: 243494 - DNA, 951 bp, Artificial Sequence
  derived and/or modified sequence
atgcttgtgaccctaggcctcctcacttccttcttcagctttctttacatggtagcgccctccattcgcaagttctttgctgggggcgtgtgtagaaccaacgtgcagctgcccggcaaggtggttgtgatcactggggccaacacgggaattggcaaagaaacggctagagagctcgcctctcgaggcgctcgagtctatatcgcatgccgagacgtcctcaagggagagtctgctgcatcagaaatcagggtagataccaagaatagccaggtgctggtgcgcaagctggatctgtcagacaccaaatctatccgtgcatttgcagagggtttcttggctgaggaaaagcagcttcacattttgattaacaacgcgggagtgatgatgtgcccttactctaagacagctgatggatttgagacgcacttaggagttaatcatctcggccattttctgctcacctatctgctcctcgagagacttaaagtctcagctcctgcgcgtgtcgttaatgttagctccgtggcccatcacattggcaagattccatttcacgacctacagtctgagaaacgctacagtaggggcttcgcgtactgtcacagcaaactggcaaacgtgctgtttactcgcgaactggccaagcgcctgcaggggaccggcgttacaacttacgcggtccaccctggtgtggtgcggtccgagcttgttcgccactcatccctgttgtgcctactgtggcggctgttctcaccgtttgtgaaaacagcaagagaaggggcgcaaacatcactgcactgtgcattggcagagggtttagaaccgctcagcggcaagtacttcagcgactgcaagaggacatgggttagtccacgcgctcggaataataagacagctgaacggctttggaatgtgtcctgtgagcttctgggaattcgctgggagtag

SEQ ID NO: 243495 - DNA, 951 bp, Artificial Sequence
  derived and/or modified sequence
atgttagtgacattgggcctgctgacgtcttttttttcctttctgtacatggtcgctccttccatcaggaagttctttgcaggcggcgtgtgccgcactaacgttcaactgcctggcaaggtggtggtgatcactggcgctaatacaggaatcgggaaggaaacggcccgagagctggcctctaggggagcgagggtctatatcgcctgccgagatgtactgaaaggtgagtccgccgcttctgagatccgggtggatacaaagaactctcaggtactggtcaggaagctggacttgtccgatactaagtccatacgggcatttgctgagggctttctagcggaagaaaagcagctccacatcctcatcaacaatgctggcgtgatgatgtgtccctacagcaaaacagctgatgggttcgaaacccacctgggtgtcaaccatcttggacacttcctcttgacctacctccttttggagagactcaaggtatcggctcctgctcgagtcgtgaacgtatcaagcgtcgcacatcacataggaaagatcccattccacgacctccagagcgagaaaagatactcccgagggttcgcatactgtcacagtaagctcgccaatgtcctttttacaagggagctcgcgaagagattacaggggactggagtgaccacatacgctgtacacccaggtgtcgtaagaagcgagctcgtgaggcacagctctctgctgtgcctgctgtggcgtctcttttcccccttcgtcaaaaccgctagggaaggggcccagaccagccttcactgcgccctcgccgagggactggagccactctcgggcaaatactttagcgattgtaagcgaacttgggtgagcccccgagcaaggaataataaaacagctgagcgtctgtggaatgtcagttgcgaattgctggggattcgctgggaatag

SEQ ID NO: 243496 - DNA, 951 bp, Artificial Sequence
  derived and/or modified sequence
atgctggtgactctcggtttactaactagctttttttcgtttttgtacatggttgccccctccattcggaaattttttgcgggaggtgtatgccggaccaacgtgcagctgcctggtaaagttgtcgttattactggcgccaacaccggcataggaaaggagacggcccgcgaactcgcgagccggggagccagagtatacattgcttgtcgcgatgttctgaagggagagtctgcggcctccgaaatccgcgtggacactaaaaactcacaagttctcgtccgtaagctcgacctgtcagatacaaagtcaatccgggctttcgccgagggcttcctagcagaggagaagcaactccatattttgattaacaatgccggagtgatgatgtgtccatacagtaaaactgccgacggttttgaaactcatctcggcgtgaatcacctggggcactttttgttgacttatctcctgctcgagaggctgaaggtgtctgcgccggcgcgggtggtgaacgtgagctctgtcgcccaccacattggaaaaatcccatttcacgacctgcagtccgagaagcgctacagccgtgggtttgcctattgtcacagtaaactggccaacgtgctattcactcgtgagttagcgaagcgcttgcagggaaccggagtgactacctatgctgtccaccccggggttgtccgcagcgaattagtgcggcattcttccttgctctgccttctttggcggctcttttcaccgttcgtcaaaacagccagagagggagcacagacctccctgcactgtgcgctggccgaaggattggagccattaagtggaaaatacttttctgactgcaagcgtacatgggtgtctcctagggcaagaaataataagactgcggagagactgtggaacgtaagctgtgagttgttaggtatacgttgggagtag

SEQ ID NO: 243497 - DNA, 951 bp, Artificial Sequence
  derived and/or modified sequence
atgctggtgaccctgggcctgctgaccagcttcttctccttcctgtacatggtggcccccagcatcaggaagttctttgctggaggagtgtgcaggaccaacgtgcagctgcccgggaaggtggtggtgatcactggagccaacacaggaattggcaaggagacagcccgggagctggccagcagaggagcccgggtgtacatcgcctgcagagatgtgctgaagggggagagcgctgccagcgagatccgggtggacaccaagaacagccaggtgctggtgaggaagctggacctgagtgacaccaagagcatccgggcctttgctgagggcttcctggccgaggagaagcagctgcacatcctgatcaacaatgctggggtgatgatgtgcccctacagcaagacagcagatggctttgagacccacctgggcgtgaaccacctgggccacttcctgctgacctacctgctgctggagcggctgaaggtgtctgccccagcccgggtggtgaatgtgtcctctgtggcccaccacatcggcaagatccccttccatgacctgcagagcgagaagcgctacagccggggctttgcctactgccacagcaagctggccaacgtgctcttcacccgggagctggccaagaggctgcagggcactggagtgaccacctatgctgtgcaccctggggtggtgcgctctgagctggtgcgccacagcagcctgctgtgcctgctgtggaggctcttcagcccctttgtgaagacagcccgggagggcgcccagaccagcctgcactgtgccctggccgagggcctggagcccctgagcggcaagtacttcagtgactgcaagaggacctgggtgagcccccgggccaggaacaacaagacagctgagcggctgtggaatgtgtcctgtgagctgctgggcatccgctgggagtag

SEQ ID NO: 243498 - DNA, 951 bp, Artificial Sequence
  derived and/or modified sequence
atgctggtgaccctgggcctgctgaccagcttcttcagcttcctgtacatggtggcccccagcatacggaaattcttcgccgggggggtctgccggactaacgttcaacttcctgggaaggtcgtggtgattaccggcgcaaacaccggaatcggaaaagagacagcacgggagttagctagccgcggcgccagagtatatatagcgtgcagagatgtgttgaaaggggaaagcgccgcctctgaaatccgggtggacaccaaaaatagccaggtactagtcagaaagctagacctgtccgataccaagagtatccgggcattcgccgagggattcctggctgaggaaaagcagttgcatattttgattaacaacgctggggtgatgatgtgtccttacagcaagaccgctgatggtttcgagacacacttaggagtaaaccatcttgggcactttctactgacgtatctgctcttggagcgcctgaaagtctcggcaccggcaagagtggttaatgtgagcagtgttgctcaccacatcgggaaaatacccttccatgatcttcaatcggagaaaaggtacagcagggggtttgcatattgtcactcaaagctagccaatgtactttttactcgggaactggctaaacggcttcagggaactggcgtcaccacgtatgccgtacatcctggcgtggtccggtcggaacttgtacggcactcatctcttctctgtctattgtggcgcttgttttcgcccttcgtcaagacagcccgcgagggcgcacagacttctcttcattgcgccctcgcagaaggcctggagcctctgagcggcaagtatttcagtgactgtaagagaacatgggtttctcccagggccagaaacaataaaactgcagagcggctgtggaacgtatcttgcgaactacttggaatacggtgggaatag

SEQ ID NO: 243499 - DNA, 951 bp, Artificial Sequence
  derived and/or modified sequence
atgctggtgaccctgggcctgctgaccagcttcttcagcttcctgtacatggttgctccctccatacgaaagttttttgcgggaggtgtgtgccgcactaatgtgcaactaccaggcaaggtggtggtgatcacaggcgccaatactggcatcgggaaagaaactgctagagaactggctagccggggggctcgtgtctacattgcctgtcgtgatgtcctcaagggggagagcgcagcctctgagatacgggttgacaccaaaaacagccaggttctggtgcggaaactcgatctgtcagacacaaagagcattcgcgctttcgcggagggctttcttgctgaagagaagcagctccacatcctcattaataacgcaggtgttatgatgtgtccttactctaagacggcagacggttttgagacacacctgggcgtgaatcaccttgggcatttccttctgacttacctcctgctggagcggttaaaggtcagcgctcccgctcgggtggtcaacgtctcatctgtcgcccatcatatcgggaaaattcccttccacgatctccagagtgagaaacgttacagtcgcggcttcgcctactgtcattctaagcttgccaacgtactgttcacccgagagttggcaaagagactacagggtacaggtgtgaccacgtacgcagtccatcctggtgtggtgcggagtgagctggtgagacactcatctctactgtgcctgctgtggagactgttctctccttttgttaagaccgctcgagagggcgcccagacgtccctgcactgtgctctcgcggaggggctggagcctctatccggaaagtatttttctgactgcaagcggacctgggtgagtcctcgcgcccggaataacaagacagcggagcgattatggaacgtgagttgtgagctgttaggcatccgatgggagtag

SEQ ID NO: 243500 - DNA, 951 bp, Artificial Sequence
  derived and/or modified sequence
atgctggtgaccctgggcctgctgaccagcttcttcagcttcctgtatatggtcgctccctccattcgcaagttcttcgccggcggcgtctgccggacaaatgtccagctgccaggcaaggtggtggtcatcacaggagccaatactggcatcggcaaggagacagcgagggaattggcctcacgcggcgctcgggtctacatcgcatgccgtgatgtgctcaaaggtgaatccgcagcatccgaaatcagagtggacacgaaaaacagccaagtactggtacggaagttggacctgtccgataccaagtccattcgggccttcgcagaggggttccttgctgaggagaagcagctccacatactgattaataatgccggcgtcatgatgtgtccatattcaaaaacggccgatggtttcgagacccatctcggtgtgaatcacctgggccacttcctactgacctatctgctcctcgagaggttaaaggtgtccgcaccagctcgcgttgtcaacgtcagcagtgtggcccatcacattgggaagatcccattccacgacttgcagtctgaaaaacgatattcaagagggtttgcctactgccacagtaagctggcgaacgttttgtttaccagagaactggctaagaggctgcagggaactggagtcacgacatacgccgtccaccccggtgtggtgcgctctgagctggtgcggcattcttccctcctttgcctgctgtggcggctgttttccccttttgtgaagacagcccgagaaggggcccagacctctctgcattgtgcactggccgaagggctggaaccactcagcggcaagtactttagcgattgcaagaggacatgggtgagcccacgtgcacgcaacaacaagaccgcagaaaggttgtggaacgtgtcttgcgagttgctcgggatcaggtgggagtag

SEQ ID NO: 243501 - DNA, 951 bp, Artificial Sequence
  derived and/or modified sequence
atgctggttacacttgggctgctgaccagctttttctcatttctttatatggttgctccaagcattagaaagtttttcgccggaggtgtctgtcgcaccaatgttcagctgccgggtaaagtggtggtgatcacgggtgctaacaccgggatcggaaaggagactgcgcgtgagctggcttcccgcggagcccgagtatatatagcttgtcgagacgttttaaagggagagtcagccgcttccgagattcgcgttgacactaaaaacagccaagtgctggtcagaaaactcgacctgtctgacacaaaaagcatcagggcctttgcagagggcttcctggcagaggaaaaacagctccacattctcattaataacgctggcgtgatgatgtgtccctattcaaaaacagccgacggttttgagacccacctcggggtgaaccacttgggacatttcctcttgacgtacttgctccttgaaagactgaaggtgtccgcccctgcgcgtgtcgtgaacgtgtcctcagtagcacaccacatcggcaagatcccatttcatgacctccagtccgaaaagaggtattcacggggtttcgcctattgccactccaaattagcaaacgtgctgttcactcgcgagcttgctaaacgcctccaaggcaccggcgtcaccacatatgccgtgcaccccggagtggtgcgctcggagctggtgcgccattcttctctgctgtgtttgctctggcgcctgttcagccccttcgtcaagactgccagggagggagctcagacatcactacattgtgcgttagctgaagggctcgaaccgctcagtggtaagtacttttccgactgtaagcgcacctgggtttctccacgggctcggaacaacaaaactgccgaaagactttggaacgtctcctgcgaactgctggggattaggtgggagtag

SEQ ID NO: 243502 - DNA, 951 bp, Artificial Sequence
  derived and/or modified sequence
atgttggtaaccctgggcctgctgacctctttttttagttttctgtacatggtagccccatcgatacgtaagttctttgctgggggtgtttgccggaccaatgttcaattgccagggaaggttgtagtgatcacgggcgctaatactggcattgggaaagaaacggccagagaattagcatccagaggagcaagggtctatatagcttgcagagacgttctgaagggcgaaagcgcggcatctgagatcagggtggacactaaaaactcccaggtgctcgtacggaaactcgatctttctgatacaaaaagtataagagcattcgcagaaggattcctcgcagaggagaaacagttgcacattctgatcaacaacgccggagtgatgatgtgtccttattcgaagacggccgatggttttgagacacatctcggagttaaccatcttggtcatttccttctgacgtatttacttctcgaacgcttaaaagtgagcgcccctgccagagtcgtcaacgtctctagcgtagcccatcacatcgggaaaatcccatttcacgatttgcagtccgaaaagcggtattctcgtggttttgcatactgtcacagtaagctggcaaacgtgctcttcacacgggagctggctaagcgcctgcagggaaccggtgtcactacgtacgcagtccaccctggagtggtcaggagtgaactggtgaggcacagctctctgttgtgcctgttgtggcgtctattctctcccttcgtgaagaccgcccgagaaggcgcacagacttcgttgcattgcgcactggccgaagggcttgagcccctgtctggtaagtattttagcgactgcaaacggacctgggttagcccaagagccaggaataacaagactgccgaacgactctggaatgtgtcctgtgaactactaggcataagatgggaatag

SEQ ID NO: 243503 - DNA, 951 bp, Artificial Sequence
  derived and/or modified sequence
atgctggttactctgggactgctgacttcctttttcagcttcctatatatggtggcccctagtatacgaaagtttttcgccggtggcgtatgccgaactaacgtgcagctgccgggtaaggtcgtggtaataaccggggctaacaccgggataggtaaggaaacggcgagagaattagcatctcgcggagccagagtgtatatcgcctgccgcgacgtactgaaaggcgagtctgcagcatcggagatcagggttgacaccaaaaacagtcaagtgctcgtcaggaagttagatctgagcgacactaaaagtatccgggcatttgctgaggggttcctggcggaagaaaaacagcttcacattttgatcaataacgccggagtcatgatgtgcccgtatagcaagactgccgacggctttgaaacacatctcggggtgaatcacttgggacacttcttgcttacttacctccttctcgagaggctcaaggtctcggctccagccagggtcgttaatgttagcagtgtagcgcaccatatcgggaaaattccgtttcatgacctccagtctgagaaacgctactcgcggggttttgcgtactgtcactctaagctcgcgaatgtcctattcaccagagagttagccaagagacttcagggcacgggcgttacaacgtacgctgtgcatccaggcgtagtcaggagtgagctggttaggcactcatctctgctctgtctgctgtggcggctgttttccccctttgtcaagactgctagggaaggcgcacagacttccctgcactgcgctctggctgaaggattggaacccctgtctggcaagtacttttcggactgcaagcggacctgggtgagccccagagccagaaacaacaagaccgcagagcgattgtggaacgtttcatgtgaactgcttggcataagatgggaatag

SEQ ID NO: 243504 - DNA, 1833 bp, Artificial Sequence
  derived and/or modified sequence
ctccagaggactgtatgctgttcttaaggactctctgcttcctggacaagctcaagctaaggactacatctcccagcaggctgtgctctgacagctcttggatttaaataggattctgggctctgctcagagtcaggctgctgctcagcacccaggacggagaggagcagagaagcagcagaagcagccaagagctggagccagaccaggaacctgagccagagctggggttgaagctggagcagcagcaaaagcaacagcagctacagaagttggaacgatgctggtcaccttgggactgctcacctccttcttctcgttcctgtatatggtagctccatccatcaggaagttctttgctggtggagtgtgtagaacaaatgtgcagcttcctggcaaggtagtggtgatcactggcgccaacacgggcattggcaaggagacggccagagagctcgctagccgaggagcccgagtctatattgcctgcagagatgtactgaagggggagtctgctgccagtgaaatccgagtggatacaaagaactcccaggtgctggtgcggaaattggacctatccgacaccaaatctatccgagcctttgctgagggctttctggcagaggaaaagcagctccatattctgatcaacaatgcgggagtaatgatgtgtccatattccaagacagctgatggctttgaaacccacctgggagtcaaccacctgggccacttcctcctcacctacctgctcctggagcggctaaaggtgtctgcccctgcacgggtggttaatgtgtcctcggtggctcaccacattggcaagattcccttccacgacctccagagcgagaagcgctacagcaggggttttgcctattgccacagcaagctggccaatgtgctttttactcgtgagctggccaagaggctccaaggcaccggggtcaccacctacgcagtgcacccaggcgtcgtccgctctgagctggtccggcactcctccctgctctgcctgctctggcggctcttctccccctttgtcaagacggcacgggagggggcgcagaccagcctgcactgcgccctggctgagggcctggagcccctgagtggcaagtacttcagtgactgcaagaggacctgggtgtctccaagggcccgaaataacaaaacagctgagcgcctatggaatgtcagctgtgagcttctaggaatccggtgggagtagctggtggaagagctgcagctttatcaggcccaatccatgccataatgaacagggaccaaggagaaggccaaccctaaaggattgtcctcttggccagctggtgctgcgaatcctgcctgctctgatcctcttgacccttctgggaatgtttgcacacctgacactcttgtgagactggcttatggcatgagttgtggacacctatagagtgttcttctctaagacctggaaagtcagcaaccctctgggggcagcaggactgggcagatcccaggctgggcatgggggtggcagaagagcccgagaaattgggtcagttccctcatcagcaccagaggctcagctgaggcaagaagagcaccatcactgcctatttctaggggctatacactccaactcttggttgatctctttctttttaaaaatatttgccaccaccctggagtctagaccaacacacaaagatcctggctaaccctggcctatttagattccttcctctcacctggaccttcccatttcaatcatgcagatggtttctttttgtaaagagttccgtttgcctttcaatttttagagaaaataaagactgcattcatctc

SEQ ID NO: 243505 - DNA, 1723 bp, Artificial Sequence
  derived and/or modified sequence
ggattctgggctctgctcagagtcaggctgctgctcagcacccaggacggagaggagcagagaagcagcagaagcagccaagagctggagccagaccaggaacctgagccagagctggggttgaagctggagcagcagcaaaagcaacagcagctacagaagttggaacgatgctggtcaccttgggactgctcacctccttcttctcgttcctgtatatggtagctccatccatcaggaagttctttgctggtggagtgtgtagaacaaatgtgcagcttcctggcaaggtagtggtgatcactggcgccaacacgggcattggcaaggagacggccagagagctcgctagccgaggagcccgagtctatattgcctgcagagatgtactgaagggggagtctgctgccagtgaaatccgagtggatacaaagaactcccaggtgctggtgcggaaattggacctatccgacaccaaatctatccgagcctttgctgagggctttctggcagaggaaaagcagctccatattctgatcaacaatgcgggagtaatgatgtgtccatattccaagacagctgatggctttgaaacccacctgggagtcaaccacctgggccacttcctcctcacctacctgctcctggagcggctaaaggtgtctgcccctgcacgggtggttaatgtgtcctcggtggctcaccacattggcaagattcccttccacgacctccagagcgagaagcgctacagcaggggttttgcctattgccacagcaagctggccaatgtgctttttactcgtgagctggccaagaggctccaaggcaccggggtcaccacctacgcagtgcacccaggcgtcgtccgctctgagctggtccggcactcctccctgctctgcctgctctggcggctcttctccccctttgtcaagacggcacgggagggggcgcagaccagcctgcactgcgccctggctgagggcctggagcccctgagtggcaagtacttcagtgactgcaagaggacctgggtgtctccaagggcccgaaataacaaaacagctgagcgcctatggaatgtcagctgtgagcttctaggaatccggtgggagtagctggtggaagagctgcagctttatcaggcccaatccatgccataatgaacagggaccaaggagaaggccaaccctaaaggattgtcctcttggccagctggtgctgcgaatcctgcctgctctgatcctcttgacccttctgggaatgtttgcacacctgacactcttgtgagactggcttatggcatgagttgtggacacctatagagtgttcttctctaagacctggaaagtcagcaaccctctgggggcagcaggactgggcagatcccaggctgggcatgggggtggcagaagagcccgagaaattgggtcagttccctcatcagcaccagaggctcagctgaggcaagaagagcaccatcactgcctatttctaggggctatacactccaactcttggttgatctctttctttttaaaaatatttgccaccaccctggagtctagaccaacacacaaagatcctggctaaccctggcctatttagattccttcctctcacctggaccttcccatttcaatcatgcagatggtttctttttgtaaagagttccgtttgcctttcaatttttagagaaaataaagactgcattcatctc

SEQ ID NO: 243506 - DNA, 1879 bp, Artificial Sequence
  derived and/or modified sequence
gggcacaagcaatcctcccttctcagcttcctgagtggccaggactacagaggactgtatgctgttcttaaggactctctgcttcctggacaagctcaagctaaggactacatctcccagcaggctgtgctctgacagctcttggatttaaataggattctgggctctgctcagagtcaggctgctgctcagcacccaggacggagaggagcagagaagcagcagaagcagccaagagctggagccagaccaggaacctgagccagagctggggttgaagctggagcagcagcaaaagcaacagcagctacagaagttggaacgatgctggtcaccttgggactgctcacctccttcttctcgttcctgtatatggtagctccatccatcaggaagttctttgctggtggagtgtgtagaacaaatgtgcagcttcctggcaaggtagtggtgatcactggcgccaacacgggcattggcaaggagacggccagagagctcgctagccgaggagcccgagtctatattgcctgcagagatgtactgaagggggagtctgctgccagtgaaatccgagtggatacaaagaactcccaggtgctggtgcggaaattggacctatccgacaccaaatctatccgagcctttgctgagggctttctggcagaggaaaagcagctccatattctgatcaacaatgcgggagtaatgatgtgtccatattccaagacagctgatggctttgaaacccacctgggagtcaaccacctgggccacttcctcctcacctacctgctcctggagcggctaaaggtgtctgcccctgcacgggtggttaatgtgtcctcggtggctcaccacattggcaagattcccttccacgacctccagagcgagaagcgctacagcaggggttttgcctattgccacagcaagctggccaatgtgctttttactcgtgagctggccaagaggctccaaggcaccggggtcaccacctacgcagtgcacccaggcgtcgtccgctctgagctggtccggcactcctccctgctctgcctgctctggcggctcttctccccctttgtcaagacggcacgggagggggcgcagaccagcctgcactgcgccctggctgagggcctggagcccctgagtggcaagtacttcagtgactgcaagaggacctgggtgtctccaagggcccgaaataacaaaacagctgagcgcctatggaatgtcagctgtgagcttctaggaatccggtgggagtagctggtggaagagctgcagctttatcaggcccaatccatgccataatgaacagggaccaaggagaaggccaaccctaaaggattgtcctcttggccagctggtgctgcgaatcctgcctgctctgatcctcttgacccttctgggaatgtttgcacacctgacactcttgtgagactggcttatggcatgagttgtggacacctatagagtgttcttctctaagacctggaaagtcagcaaccctctgggggcagcaggactgggcagatcccaggctgggcatgggggtggcagaagagcccgagaaattgggtcagttccctcatcagcaccagaggctcagctgaggcaagaagagcaccatcactgcctatttctaggggctatacactccaactcttggttgatctctttctttttaaaaatatttgccaccaccctggagtctagaccaacacacaaagatcctggctaaccctggcctatttagattccttcctctcacctggaccttcccatttcaatcatgcagatggtttctttttgtaaagagttccgtttgcctttcaatttttagagaaaataaagactgcattcatctcat

SEQ ID NO: 243507 - DNA, 951 bp, Artificial Sequence
  derived and/or modified sequence
atgctggtgaccctgggcctgctgaccagcttcttcagcttcctgtacatggtggcccccagcatcagaaagttcttcgccggcggcgtgtgcagaaccaacgtgcagctgcccggcaaggtggtggtgatcaccggcgccaacaccggcatcggcaaggagaccgccagagagctggccagcagaggcgccagagtgtacatcgcctgcagagacgtgctgaagggcgagagcgccgccagcgagatcagagtggacaccaagaacagccaggtgctggtgagaaagctggacctgagcgacaccaagagcatcagagccttcgccgagggcttcctggccgaggagaagcagctgcacatcctgatcaacaacgccggcgtgatgatgtgcccctacagcaagaccgccgacggcttcgagacccacctgggcgtgaaccacctgggccacttcctgctgacctacctgctgctggagagactgaaggtgagcgcccccgccagagtggtgaacgtgagcagcgtggcccaccacatcggcaagatccccttccacgacctgcagagcgagaagagatacagcagaggcttcgcctactgccacagcaagctggccaacgtgctgttcaccagagagctggccaagagactgcagggcaccggcgtgaccacctacgccgtgcaccccggcgtggtgagaagcgagctggtgagacacagcagcctgctgtgcctgctgtggagactgttcagccccttcgtgaagaccgccagagagggcgcccagaccagcctgcactgcgccctggccgagggcctggagcccctgagcggcaagtacttcagcgactgcaagagaacctgggtgagccccagagccagaaacaacaagaccgccgagagactgtggaacgtgagctgcgagctgctgggcatcagatgggagtag

SEQ ID NO: 243508 - protein, 719 aa, Artificial Sequence
  derived and/or modified sequence
MEKILFYLFLIGIAVKAQICPKRCVCQILSPNLATLCAKKGLLFVPPNIDRRTVELRLADNFVTNIKRKDFANMTSLVDLTLSRNTISFITPHAFADLRNLRALHLNSNRLTKITNDMFSGLSNLHHLILNNNQLTLISSTAFDDVFALEELDLSYNNLETIPWDAVEKMVSLHTLSLDHNMIDNIPKGTFSHLHKMTRLDVTSNKLQKLPPDPLFQRAQVLATSGIISPSTFALSFGGNPLHCNCELLWLRRLSREDDLETCASPPLLTGRYFWSIPEEEFLCEPPLITRHTHEMRVLEGQRATLRCKARGDPEPAIHWISPEGKLISNATRSLVYDNGTLDILITTVKDTGAFTCIASNPAGEATQIVDLHIIKLPHLLNSTNHIHEPDPGSSDISTSTKSGSNTSSSNGDTKLSQDKIVVAEATSSTALLKFNFQRNIPGIRMFQIQYNGTYDDTLVYRMIPPTSKTFLVNNLAAGTMYDLCVLAIYDDGITSLTATRVVGCIQFTTEQDYVRCHFMQSQFLGGTMIIIIGGIIVASVLVFIIILMIRYKVCNNNGQHKVTKVSNVYSQTNGAQIQGCSVTLPQSVSKQAVGHEENAQCCKATSDNVIQSSETCSSQDSSTTTSALPPSWTSSTSVSQKQKRKTGTKPSTEPQNEAVTNVESQNTNRNNSTALQLASRPPDSVTEGPTSKRAHIKPNALLTNVDQIVQETQRLELI

SEQ ID NO: 243509 - DNA, 2160 bp, Artificial Sequence
  derived and/or modified sequence
atggaaaaaattttgttctatctgtttctgattggaatcgcagttaaagctcagatttgtcccaagagatgcgtctgccagatcctctctcctaacctcgcaaccctatgcgcaaagaagggtctcctatttgtgccccctaatatagatcggcgcacagtcgaactgcgcctggctgacaacttcgtgaccaatatcaaaaggaaagattttgcaaatatgacctcccttgtcgacctgaccttgtcgcgcaatactatttcgttcataactcctcacgctttcgccgatcttcgcaacctgcgtgccttgcatttgaacagcaaccgtttgacaaagattacgaacgatatgtttagcggattatcgaatcttcaccacctcattcttaacaacaaccagctcacactcatttctagcactgcattcgacgatgtgtttgccctggaggaattggatttatcatacaataacctcgagactattccctgggatgcggtcgagaagatggtgtcactccacacactttctcttgatcataacatgatcgataatattccgaaggggacattctctcacttacataagatgactcggctggacgtgacttccaacaagttacagaagctgccccctgatcccctctttcagcgagcacaagtgttggctacaagtggtatcatcagccctagtacatttgccctgagctttgggggaaatccgctgcattgcaattgtgagctcctctggctccgcagactttctagggaagacgatctggaaacatgtgcgagccctcccctattgactgggaggtacttttggagcattcccgaggaagaattcttatgcgagcccccgctgattaccagacacacgcacgagatgcgagtcctagaaggccagagggccacccttcgctgtaaggcgcgcggagatccggagccagcgatacactggatttcgcctgaagggaagcttattagcaatgctaccaggtcactcgtctatgataatggcactcttgacattctgattacgaccgtgaaagacacaggagcattcacttgtatcgcaagcaaccctgctggggaagcaacccagatagtcgacctacacatcattaaactcccacacctactgaactctactaatcatattcacgagcctgatcctggcagctctgacatttctacttctaccaagagcggtagtaacacatcttctagcaacggagacactaagctgagtcaagataaaattgtggtggccgaggccactagctctacggctcttcttaaatttaacttccagcgcaacattcctggcatcaggatgttccagattcaatacaatggaacatacgatgatacgctggtgtacaggatgattcctcctacatcgaaaaccttcttggtaaataacttggcagcaggcaccatgtacgatctgtgcgtcctggcgatttatgacgatgggatcacctccctaaccgccactcgcgtcgttggctgcatccagttcactaccgaacaggattatgtgcgttgccactttatgcagtcgcagtttttggggggtaccatgatcatcataattgggggtatcattgtcgccagtgtcctggtgttcatcatcatactaatgattcggtataaagtgtgtaataacaacggacaacataaggttactaaagtgtcaaatgtgtactcccagaccaatggcgcccagatccaggggtgctcagtgacacttccacagagcgtttctaagcaggctgtgggacacgaggaaaacgctcagtgttgcaaggccactagtgataatgtgattcagagttcggaaacctgcagcagccaggactcttcgacaactacttccgccctcccaccttcctggacaagctctacaagcgtatctcagaagcagaaacggaagacaggaacgaagccatccaccgagccacagaacgaggcagtgaccaatgtcgagagccagaataccaatagaaacaatagcactgcactgcagctggcgtcccgacccccagattccgtaaccgaaggcccaacaagcaagcgagcccatattaagcctaatgcactcctcactaatgtagaccagatcgtgcaggaaactcagcggctcgagctaatctag

SEQ ID NO: 243510 - DNA, 2160 bp, Artificial Sequence
  derived and/or modified sequence
atggagaagatcctcttctacctgttcctgattggaattgctgtgaaggcccagatctgccccaagagatgtgtgtgccagatcctgagccccaacctggccaccctgtgtgccaagaagggcctgctgtttgtgccccccaacatcgacagaagaacagtggagctgcggctggccgacaactttgtgaccaacatcaagaggaaggactttgccaacatgaccagcctggtggacctgaccctgagcaggaacaccatctccttcatcacccctcatgcctttgctgacctgaggaacctgcgggccctgcacctgaacagcaaccggctgaccaagatcaccaatgacatgttcagcggcctgagcaacctgcaccacctgatcctgaacaacaaccagctgaccctcatcagcagcacagcctttgatgatgtgtttgccctggaggagctggacctgagctacaacaacctggagaccatcccctgggatgctgtggagaagatggtgtccctgcacaccctgagcctggaccacaacatgattgacaacatccccaagggcaccttcagccacctgcacaagatgacccggctggatgtgaccagcaacaagctgcagaagctgcccccagaccccctcttccagagggcccaggtgctggccaccagcggcatcatcagccccagcacctttgccctgagctttggaggcaaccccctgcactgcaactgtgagctgctgtggctgcggcggctgagcagagaagatgacctggagacctgtgccagcccccccctgctgaccggccgctacttctggagcatccctgaggaggagttcctgtgtgagcccccactcatcaccaggcacacccatgagatgagggtgctggagggccagagggccaccctgcgctgcaaggcccggggggaccctgagcccgccatccactggatcagccctgagggcaagctgatcagcaatgccaccaggagcctggtgtatgacaatggcaccctggacatcctgatcaccaccgtgaaggacaccggggccttcacctgcatcgccagcaacccagctggggaggccacccagatcgtggacctgcacatcatcaagctgccccacctgctgaacagcaccaaccacatccacgagccagaccccggcagcagtgacatcagcaccagcaccaagagcggcagcaacaccagcagcagcaatggagacaccaagctgagccaggacaagatcgtggtggccgaggccaccagcagcacagccctgctgaagttcaacttccagaggaacatccctggcatccgcatgttccagatccagtacaacggcacctatgatgacaccctggtgtacaggatgatcccccccaccagcaagaccttcctggtgaacaacctggccgccggcaccatgtatgacctgtgtgtgctggccatctatgatgatggcatcaccagcctgacagccaccagggtggtgggctgcatccagttcaccacagagcaggactatgtgcgctgccacttcatgcagagccagttcctgggcggcaccatgatcatcatcattggaggcatcatcgtggcctctgtgctggtgttcatcatcatcctgatgatccgctacaaggtgtgcaacaacaacggccagcacaaggtgaccaaggtgtccaatgtgtacagccagaccaacggggcccagatccagggctgcagcgtgaccctgccccagagcgtgtccaagcaggccgtgggccacgaggagaatgcccagtgctgcaaggccaccagtgacaacgtcatccagagcagcgagacctgcagcagccaggacagcagcaccaccaccagcgccctgccccccagctggaccagcagcacctctgtgtcccagaagcagaagaggaagacaggcaccaagcccagcacagagccccagaatgaagctgtgaccaacgtggagagccagaacaccaacagaaacaacagcacagccctgcagctggccagccggcccccagattctgtgacagagggccccaccagcaagagggcccacatcaagcccaatgccctgctgaccaacgtggaccagatcgtgcaggagacccagaggctggagctgatctag

SEQ ID NO: 243511 - DNA, 3723 bp, Artificial Sequence
  derived and/or modified sequence
atttgactgtcttttatccaactgcccagaagcaaatgtgttaactcggcgatgccccttcatgcccgggttcttgcagagctctgaggacgcccagacccattttcctggctggatttggagcggctgctgggctgtggacccaggtgtgtggatcgctttacccagaagcttggaaagcgccaatattaacctgcttccaggtacatcacaaggtcaagagagtgtcttgcagccctcttgtttccgtgtatctacaccttcttctcttggccagaaggatatttacgttttggttcacagcatttgaagccaaaagttcagcccttcgaactggtttgctatacaaaacaaaacaaaacaaataaggtaatgaggattgcttattaaactgcttaacaaaatccccgactcttcctcagccctttctcggctccctcctccccaccaaaatgtcaccagctcttgaattacgtggattcgggttggaggagaacttgaaggaaacgtgattaaagggctatgcgagaacgctctctttgctgcccgcggtccggtgggcttcgaagccaatcgtgagaaggaccggttccctccgtgctgcttcctccccgtgcagtgctgggtgtgcgtgtgcgagtgtgagtgcaagtgcgcgcgcgcccgggtgcgagtgtgtgtgagtgtgagcgtgtgtctgtgtgtgcgtgcgcggccgccctgcctctgcccgctccccgggcgcggagccgcgggtttcatggggcgattgcagcgattcccccacccagagcgacctgcgggcagcggcggcagtggcaggagccgcctttccgattccctacgatgcgggtgctgagctatggcaaagggcagcgaagtgacgagcgagacccgcgtacgactgtgaaagccacctggagccaccttgccgggattgtacctgcaggcagaaagtcttcctacgaccgtcttttcccttagaggcaccagaatccctgtaaccattcatccaggtgttgagaagatatgtagcagccgagcacccatcttttgacaccgtcctctgaaatcagctttggagatgctttcactctgtccgtcttctgcagcagccaggcagagtgccgactccttcacagccgtgaggaactcttcaggctccagaagctcttaaacctgatctacaatggaaaaaattcttttttatctgtttctcattggcatagcagtgaaagctcagatctgtccaaagcgttgtgtctgtcagattttgtctcctaatcttgcaaccctttgtgccaagaaagggcttttatttgttccaccaaacattgacagaagaactgtggaactgcggttggcagacaattttgttacaaatattaaaaggaaagattttgccaatatgaccagcttggtggacctgactctatccaggaatacaataagttttattacacctcatgctttcgctgacctacgaaatttgagggctttgcatttgaatagcaacagattgactaaaattacaaatgatatgttcagtggtctttccaatcttcatcatttgatactgaacaacaatcagctgactttaatttcctctacagcgtttgatgatgtcttcgcccttgaggagctggatctgtcctataataatctagaaaccattccttgggatgctgttgagaagatggttagcttgcatacccttagtttggatcacaatatgattgataacattcctaaggggaccttctcccatttgcacaagatgactcggttagatgtgacatcaaataaattgcagaagctaccacctgaccctctctttcagcgagctcaggtactagcaacctcaggaatcataagcccatctacttttgcattaagttttggtggaaaccccttgcattgcaattgtgaattgttgtggttgaggcgtctgtccagagaagatgacttagagacctgtgcttctcctccacttttaactggccgctacttttggtcaattcctgaagaagagtttttgtgtgagcctcctctcattactcgtcatacacatgagatgagagtcctggagggacaaagggcaacactgaggtgcaaagccaggggagaccctgagcctgcaattcactggatttctcctgaagggaagcttatttcaaatgcaacaagatctctggtgtatgataacggaacacttgacattcttatcacaactgtaaaggatacaggtgcttttacctgcattgcttccaatcctgctggggaagcaacacaaatagtggatcttcatataattaagctccctcacttactaaatagtacaaaccatatccatgagcctgatcctggttcttcagatatctcaacttctaccaagtcaggttctaatacaagcagtagtaatggtgatactaaattgagtcaagataaaattgtggtggcagaagctacatcatcaacggcactacttaaatttaattttcaaagaaatatccctggaatacgtatgtttcaaatccagtacaatggtacttatgatgacacccttgtttacagaatgatacctcctacgagcaaaacttttctggtcaataatctggctgctggaactatgtatgacttgtgtgtcttggccatatatgatgatggcatcacttccctcactgccacaagagtcgtgggttgcatccagtttactacggaacaggattatgtgcgttgccatttcatgcagtctcagtttttgggaggcaccatgattattattattggtggaatcattgtagcatctgtgctggtattcatcattattctgatgatccggtataaggtttgcaacaataatgggcaacacaaggtcaccaaggttagcaatgtttattcccaaactaacggggctcaaatacaaggctgtagtgtaacgctgccccagtccgtgtccaaacaagctgtgggacacgaagagaatgcccagtgttgtaaagctaccagtgacaatgtgattcaatcttcagaaacttgttcgagtcaggactcctctaccactacctctgctttgcctccttcctggacttcaagcacttctgtgtcccaaaagcagaaaagaaagactggcacaaagccaagtacagaaccacagaatgaagccgtcacaaatgttgaatcccaaaacactaacaggaacaactcaactgccttgcagttagctagccgtcctcccgattctgtcacagaggggcccacgtctaaaagagcacatataaagccaaatgctttgctgactaatgttgaccagattgtccaggaaacacagaggctggagttaatctgaagagcaccacttctcctctctctcctgaaaaaatttgccactgatatttttactggataaaattcaaaaatgtttcaattcacaaaggctaattgttgaactggtgtcgtagaagaaattgtctacaggagccaaggtgaaagtctctgatgacggcggaactggctccattagaccatggttcatcctcttttaaaaccaaatttttttttcttctggcctacaagtattttttttttaaaaaagaaaaaaagcctacattggcatcaagttctgtatcaatccatcttacattgccatccatgatttaacagactgtagaatcttgaataatctatatcactttaacaaataaatgttttactatgacagaa

SEQ ID NO: 243512 - DNA, 2160 bp, Artificial Sequence
  derived and/or modified sequence
atggagaagatcctgttctacctgttcctgatcggcatcgccgtgaaggcgcaaatctgtcctaaaagatgtgtgtgccaaattcttagtcctaatttggccaccctctgtgcaaagaagggcttactctttgtccctccaaacatcgataggcgaactgtcgagctgaggctggccgacaactttgtgaccaatatcaaaaggaaagattttgccaatatgacatctctcgtggacttgactcttagcaggaacacaatctcctttatcacgccgcacgctttcgccgaccttaggaatttgagagccttgcatcttaatagcaaccgcctgacaaaaattactaatgatatgtttagtggtctcagcaacttgcatcacttaatcttgaataacaaccaacttaccctgatcagctccacagcatttgacgacgtgttcgcgcttgaggagcttgatttatcttacaataacctggaaaccattccgtgggatgccgtggaaaaaatggtgagcctccacactctcagcctggatcacaacatgatagacaatatcccgaaggggactttctcacacttgcataaaatgaccagactggatgtgacgagtaataagctgcaaaaactcccccccgacccactgttccaacgtgcgcaggtactcgcgaccagtgggatcatatccccctctaccttcgctctgtcttttggcgggaatccactgcactgtaattgtgaacttctgtggcttagacgactatctagggaggacgatctcgaaacttgcgcttcccctcccctacttacaggacgatatttttggtcaattcccgaggaggaatttctctgcgaacccccgctcatcacgaggcatacccatgaaatgagagtgctggagggccagagggcaacactccggtgcaaagcccgaggtgaccctgagcccgcaattcactggatcagccccgaaggtaagctgatctcaaacgccactaggtcattagtgtatgacaacggcaccttggacatcctgatcaccaccgtgaaagatacaggagctttcacatgcattgcatccaatccggccggggaagctactcaaatcgtggacttgcacattattaaactaccacatttgctgaactcaaccaatcatatccatgaacccgacccaggctcctctgatattagtaccagtacaaagagtggatccaacacatcgagcagtaacggagataccaagctttcccaggataagatcgtggttgcggaggctacatctagcacagcccttctgaaattcaattttcagaggaatataccaggaatccggatgtttcagatccagtataatggaacctatgatgacacattagtgtaccggatgatccctcccacttcaaaaactttcctggtaaataatctggctgccggaactatgtacgatctctgtgttctcgctatctatgatgacggtattacctctctcacagccactcgggtggtgggttgcatacaatttaccacggaacaggattatgtcagatgtcacttcatgcagtcccaatttctgggcggcaccatgattataataatagggggcatcatcgtggcctcagtgcttgtgtttatcatcatcctgatgattaggtacaaagtctgcaacaataatggccagcataaagttaccaaggtgtctaacgtttattcacagacaaacggcgcgcagattcaggggtgctctgtcacgttgccccagtcagtcagcaagcaagcagtgggacacgaagaaaatgcacagtgttgtaaggccacctctgataacgtgatccagagctctgagacctgcagttcacaagattctagtacgaccacatccgcactgccacccagttggacctccagtacctccgtatcccaaaagcagaagcggaaaaccgggaccaaacccagtaccgaaccacaaaatgaggccgtcactaatgtggaatctcagaataccaataggaacaactccacagcactgcagctcgcctccaggccaccagattcagtgaccgaaggcccaacttctaagagagcccacattaagccaaacgcactgctaacaaatgtggaccagatcgtccaggagacacaacggttagaactgatctag

SEQ ID NO: 243513 - DNA, 2160 bp, Artificial Sequence
  derived and/or modified sequence
atggaaaaaattttgttctacctttttctgattggcattgccgtaaaagcacagatttgccctaaacgatgcgtgtgccaaattctgtcccctaatttggccaccttatgtgctaagaagggcttactgttcgtgcctccgaatatcgatcgaaggactgtggagttgcggctggcagataacttcgtaaccaatattaaacgcaaagactttgccaatatgacctcgttggtcgacctgactctgagcaggaacaccatctcttttattaccccacacgcatttgcggatctgcggaacctcagagcacttcacctgaacagcaataggctcacaaaaatcaccaatgacatgttctccggactgagtaacctgcatcacttgatcctgaacaacaaccaactgacactgatctcatcaactgccttcgacgacgtgttcgcccttgaagaattggatctctcttacaacaacttagaaaccattccttgggacgccgtggaaaaaatggtcagcctgcacaccctttctctcgaccacaacatgatcgataacatacctaaaggcactttttcccatttacacaaaatgaccaggctggatgtcacaagcaataagctgcagaagctgcccccagacccactgtttcagcgggctcaagtgctggccactagcggtatcatatcacctagcactttcgccctgtcctttggcggtaacccactgcactgcaattgcgagcttctttggcttcgtcgcctgtcacgcgaggatgacctcgagacatgcgcatcccctcctttgctcacagggaggtatttttggtccatcccagaagaagagtttctgtgtgaaccgcctctgatcacccgccacacacatgaaatgagggtgctagaagggcagcgcgctaccctgcggtgtaaggcccgaggggatcccgaacctgccatccactggatctccccagaaggcaagctgatttctaatgcgacccgctccctcgtctatgacaacggtaccctggacattctcattactactgtgaaggacaccggcgctttcacttgtatcgcgtccaatcccgctggcgaggccacccaaattgtggacctgcatatcatcaaactgcctcatttgcttaactctactaaccacatccacgagcccgaccccggtagctccgacattagcacctccactaaatctggatccaacaccagtagcagcaatggggacacgaagctttcccaggataaaatcgtggtagccgaagctacctcatctacagcattgctaaaatttaactttcagcgcaatattcctggaattaggatgtttcagatccaatacaatggaacatatgacgacacactggtgtaccgcatgatacccccaacatccaagacattcctggtgaacaatctggcagccggaactatgtatgatttatgtgtgctggccatttatgatgacggaatcacctctttaaccgcaacgcgtgtggtaggatgcattcagtttaccacggagcaggactacgtgcgatgtcactttatgcagtctcagttcctcgggggaactatgataattatcatcggagggattatcgtcgcctcagtactggtctttatcattattctcatgatccgttacaaggtgtgtaacaacaacgggcagcacaaagtcactaaggtctcaaatgtttactcccagacaaatggcgcacagatccagggctgctccgttacccttccacaatccgtcagcaagcaggccgtgggtcacgaagagaacgctcaatgttgcaaggccacgtccgataatgtgatccagagctctgagacctgtagctctcaggatagtagcacgaccactagcgcactgccaccaagctggacgtcatctacaagcgtgagccagaagcagaagaggaagacaggaactaagccaagcacggaacctcaaaacgaagctgttactaacgtggagtcccagaataccaatagaaataattccactgctctgcaactggcctcacgacctccagacagcgtgaccgagggaccgacaagcaaacgcgctcatatcaagccaaacgccctattgaccaacgtggatcagatcgtccaagagacccagcggctagaactgatctag

SEQ ID NO: 243514 - DNA, 2160 bp, Artificial Sequence
  derived and/or modified sequence
atggagaagatcctgttctacctgttcctgatcggcatcgccgtgaaggcccagatctgccccaagagatgcgtgtgccagatcctgagccccaacctggccaccctgtgcgccaagaagggcctgctgttcgtgccccccaacatcgacagaagaaccgtggagctgagactggccgacaacttcgtgaccaacatcaagagaaaggacttcgccaacatgaccagcctggtggacctgaccctgagcagaaacaccatcagcttcatcaccccccacgccttcgccgacctgagaaacctgagagccctgcacctgaacagcaacagactgaccaagatcaccaacgacatgttcagcggcctgagcaacctgcaccacctgatcctgaacaacaaccagctgaccctgatcagcagcaccgccttcgacgacgtgttcgccctggaggagctggacctgagctacaacaacctggagaccatcccctgggacgccgtggagaagatggtgagcctgcacaccctgagcctggaccacaacatgatcgacaacatccccaagggcaccttcagccacctgcacaagatgaccagactggacgtgaccagcaacaagctgcagaagctgccccccgaccccctgttccagagagcccaggtgctggccaccagcggcatcatcagccccagcaccttcgccctgagcttcggcggcaaccccctgcactgcaactgcgagctgctgtggctgagaagactgagcagagaggacgacctggagacctgcgccagcccccccctgctgaccggcagatacttctggagcatccccgaggaggagttcctgtgcgagccccccctgatcaccagacacacccacgagatgagagtgctggagggccagagagccaccctgagatgcaaggccagaggcgaccccgagcccgccatccactggatcagccccgagggcaagctgatcagcaacgccaccagaagcctggtgtacgacaacggcaccctggacatcctgatcaccaccgtgaaggacaccggcgccttcacctgcatcgccagcaaccccgccggcgaggccacccagatcgtggacctgcacatcatcaagctgccccacctgctgaacagcaccaaccacatccacgagcccgaccccggcagcagcgacatcagcaccagcaccaagagcggcagcaacaccagcagcagcaacggcgacaccaagctgagccaggacaagatcgtggtggccgaggccaccagcagcaccgccctgctgaagttcaacttccagagaaacatccccggcatcagaatgttccagatccagtacaacggcacctacgacgacaccctggtgtacagaatgatcccccccaccagcaagaccttcctggtgaacaacctggccgccggcaccatgtacgacctgtgcgtgctggccatctacgacgacggcatcaccagcctgaccgccaccagagtggtgggctgcatccagttcaccaccgagcaggactacgtgagatgccacttcatgcagagccagttcctgggcggcaccatgatcatcatcatcggcggcatcatcgtggccagcgtgctggtgttcatcatcatcctgatgatcagatacaaggtgtgcaacaacaacggccagcacaaggtgaccaaggtgagcaacgtgtacagccagaccaacggcgcccagatccagggctgcagcgtgaccctgccccagagcgtgagcaagcaggccgtgggccacgaggagaacgcccagtgctgcaaggccaccagcgacaacgtgatccagagcagcgagacctgcagcagccaggacagcagcaccaccaccagcgccctgccccccagctggaccagcagcaccagcgtgagccagaagcagaagagaaagaccggcaccaagcccagcaccgagccccagaacgaggccgtgaccaacgtggagagccagaacaccaacagaaacaacagcaccgccctgcagctggccagcagaccccccgacagcgtgaccgagggccccaccagcaagagagcccacatcaagcccaacgccctgctgaccaacgtggaccagatcgtgcaggagacccagagactggagctgatctag

SEQ ID NO: 243515 - protein, 415 aa, Artificial Sequence
  derived and/or modified sequence
MLRSTSTVTLLSGGAARTPGAPSRRANVCRLRLTVPPESPVPEQCEKKIERKEQLLDLSNGEPTRKLPQGVVYGVVRRSDQNQQKEMVVYGWSTSQLKEEMNYIKDVSHAQQEYLENHIQTQSSALDRFNAMNSALASDSIGLQKTLVDVTLENSNIKDQIRNLQQTYEASMDKLREKQRQLEVAQVENQLLKMKVESSQEANAEVMREMTKKLYSQYEEKLQEEQRKHSAEKEALLEETNSFLKAIEEANKKMQAAEISLEEKDQRIGELDRLIERMEKERHQLQLQLLEHETEMSGELTDSDKERYQQLEEASASLRERIRHLDDMVHCQQKKVKQMVEENNELQSRLDYLTETQAKTEVETREIGVGCDLLPRQSRKFEKVLNEFVQLLPLPHHLLWAFGNVCWRRHFGLLQ

SEQ ID NO: 243516 - protein, 438 aa, Artificial Sequence
  derived and/or modified sequence
MLRSTSTVTLLSGGAARTPGAPSRRANVCRLRLTVPPESPVPEQCEKKIERKEQLLDLSNGEPTRKLPQGVVYGVVRRSDQNQQKEMVVYGWSTSQLKEEMNYIKDVRATLEKVRKRMYGDYDEMRQKIRQLTQELSVSHAQQEYLENHIQTQSSALDRFNAMNSALASDSIGLQKTLVDVTLENSNIKDQIRNLQQTYEASMDKLREKQRQLEVAQVENQLLKMKVESSQEANAEVMREMTKKLYSQYEEKLQEEQRKHSAEKEALLEETNSFLKAIEEANKKMQAAEISLEEKDQRIGELDRLIERMEKERHQLQLQLLEHETEMSGELTDSDKERYQQLEEASASLRERIRHLDDMVHCQQKKVKQMVEENNELQSRLDYLTETQAKTEVETREIGVGCDLLPSQTGRTREIVMPSRNYTPYTRVLELTMKKTLT

SEQ ID NO: 243517 - DNA, 1248 bp, Artificial Sequence
  derived and/or modified sequence
atgctccgttctaccagtaccgtgacacttctgtctggcggggcagcacgaactccaggagcaccttcgcgccgagccaacgtctgccggttgcgactgaccgtgcctcccgagtccccagtccctgaacaatgcgaaaaaaagattgagcggaaagagcaactgctagatctctctaacggtgagccaaccaggaaacttccccaaggggttgtgtatggtgtcgtgagacggagtgatcagaatcaacagaaggagatggttgtgtatggttggtcaactagccaacttaaagaagaaatgaactacattaaggatgtatctcacgctcagcaggaatacttagagaaccatattcagactcagtccagtgcactggaccgctttaacgccatgaactccgccctggcgtctgattccatagggctgcagaagactctagtggacgtgactctggagaatagtaacattaaggatcagatccggaatctccagcagacttacgaggcttccatggacaaactcagagaaaagcagcggcagctggaggtggcccaggtggaaaatcagctcttaaagatgaaagtggagtcctcccaggaagctaatgctgaggtgatgagagagatgacgaaaaagttatattcgcaatatgaggaaaagctgcaggaggagcagcgaaaacacagcgctgaaaaagaggccctattagaagagaccaacagcttccttaaggctatcgaggaggctaacaaaaagatgcaagctgccgagatttctctggaggagaaagaccagagaatcggagagctcgatagattaattgaacgcatggagaaagagcgtcaccagcttcaattacagttgctggaacacgagacagagatgtcaggagagctcaccgattctgataaggaaagatatcaacagctggaggaagcaagcgcatcgttgcgagaacgtattagacacctggatgatatggttcattgtcagcagaagaaggtgaaacagatggtggaagagaataatgaattacaaagtaggttagactatctcaccgagacccaggccaaaacagaagtggagactagggagatcggcgtaggttgtgacctcctgccccggcagtcaagaaagtttgagaaagttctcaacgaattcgtacagctcttgcctttgccccaccatctgctctgggctttcggcaacgtttgttggagacgccatttcgggcttctgcagtag

SEQ ID NO: 243518 - DNA, 1317 bp, Artificial Sequence
  derived and/or modified sequence
atgctgcgctccacttccacagtcaccttgctgagcggaggagctgcccggacacctggggcccctagcaggcgcgccaacgtgtgtcggctgcgactaacagtcccacctgagtcacccgttcccgagcaatgcgagaaaaaaattgagagaaaagagcagctgttggacctgtctaatggagagcctacccggaagctgcctcagggagtcgtatatggcgtggtgcggaggtctgaccaaaatcagcagaaagagatggtggtttacggctggagcacatcccagttaaaagaagagatgaattacataaaggacgtcagggctactctggagaaagtcaggaaacggatgtacggtgactatgacgaaatgcgccaaaaaattagacagctgactcaggagctgtccgtctctcatgcacagcaggaatatctcgaaaaccatattcaaacccagtcgtctgcactggaccgctttaacgctatgaattcagcactcgcctccgattctattgggcttcagaagacactggtcgatgtgactctcgagaatagcaatatcaaggaccaaattcgaaatctccaacagacttacgaggcctcaatggataagcttcgggagaagcaacgccagctggaagtggcccaagttgagaatcagctgcttaaaatgaaggtagagtctagccaggaagcaaacgctgaagtcatgcgcgagatgaccaaaaaactgtacagccagtatgaagagaaactccaggaagagcagcgcaaacactctgctgaaaaggaagctctgctcgaggagaccaattccttcctgaaagctatcgaagaggctaataaaaagatgcaggcagccgagattagcctggaagaaaaagatcagcgtattggggagctggacagattaatcgagcgcatggagaaggagcggcaccagctgcagctgcaactgctggagcacgagactgaaatgtccggggagctgactgactccgacaaggaacgatatcaacagttggaagaggcctccgccagcttaagggagcgaatccgccatctggatgacatggtacattgccagcagaagaaagtgaagcagatggttgaagaaaacaacgaactgcaaagtagactggactacttgaccgagactcaggcgaaaacagaggtagaaacacgcgaaatcggggttggttgcgatcttctgccatcacagacagggagaaccagagaaatagttatgccatctcgaaattataccccatatacgcgcgtcctggagcttaccatgaagaaaactttaacatag

SEQ ID NO: 243519 - DNA, 1317 bp, Artificial Sequence
  derived and/or modified sequence
atgctgcgctccaccagcaccgtgacactgctaagcggaggcgctgcccgcactcctggggcacctagccgccgggcaaacgtttgccgattgaggctcaccgtgcctcccgagtccccggtcccagagcagtgcgagaaaaagatcgagaggaaggaacaactcttagacctgagcaatggtgaaccaacaaggaagctcccacaaggggtcgtctacggagttgtccgacggtccgaccagaatcagcaaaaagaaatggtcgtgtatgggtggtcgacctctcagttaaaggaagagatgaactacataaaggatgtgcgtgcaacactcgagaaggtgaggaaacggatgtacggagattacgacgaaatgcggcagaaaataagacagctcacccaggaactgtctgtgagtcacgcgcagcaggagtacttggaaaaccacattcagacacagtctagcgcccttgatagattcaacgccatgaattcagccctggcatctgattctatcggcttgcagaagaccctcgtggacgtcactctggagaatagcaacatcaaagaccaaattcgaaatctccagcaaacttatgaagcctctatggacaagctgcgcgaaaagcagcggcagctggaagttgcccaggtagagaaccaactcctgaagatgaaggtcgagagcagtcaagaagccaacgccgaagtgatgagagagatgacgaaaaagctgtacagccagtacgaagaaaagctgcaagaagagcagcggaagcactccgccgagaaggaggcactcctggaggagaccaattcattcctgaaggcaatcgaggaggcaaataaaaagatgcaggccgccgaaattagcctagaagaaaaggaccagagaattggagaactggaccggctgatagagaggatggaaaaagaacggcatcagctgcaactccaacttctcgagcatgaaactgagatgtctggcgagctgacagactcagacaaagagcgctaccagcagctcgaagaggcttccgcctcactcagggaaaggataagacacctcgatgatatggtccactgtcagcagaaaaaagtcaaacagatggtggaagaaaacaacgagctgcagtctcggctcgactatctcacagagacccaggctaaaactgaggtcgagactcgcgagattggagtgggctgcgatttgctgccctcccagactggcagaaccagggagatcgtgatgccgagtcgtaactacacaccttatacgcgcgtgctggaattaaccatgaagaagactcttacttag

SEQ ID NO: 243520 - DNA, 1367 bp, Artificial Sequence
  derived and/or modified sequence
gctgaggctgcaagtagccggcgccgtcccgcgtcgcccccgcgcagggcgggccccgcacgcttattctgcccgggaggaacgccggcgtccagcccgctaccgaccgccgctgcgggatgctgcgctccacgtccacggtcaccctgctctcgggcggcgccgccaggacgcccggggcgcccagcaggagggcaaatgtttgcagactacggctgaccgtacctcctgagagtccagttcctgagcaatgtgaaaagaagattgagagaaaagagcagcttcttgacctgagcaatggagaacctaccaggaaacttcctcagggtgttgtttatggtgtggtgcgaagatcagatcaaaatcagcagaaagaaatggtggtgtatgggtggtccaccagtcagctgaaagaagagatgaactacatcaaagatgtttcccatgctcagcaggagtatctggagaatcacatccaaacccagtcgtctgccctggatcgttttaatgccatgaactcagccttggcatcagattccattggcctgcaaaaaaccctcgtggatgtgactttggaaaacagcaacattaaggatcaaatcagaaatctgcagcagacgtatgaagcatccatggacaagctgagggaaaagcagaggcagttggaggtagcgcaagttgaaaaccagctgctaaaaatgaaggtggaatcgtcccaagaagccaatgctgaggtgatgcgagagatgaccaagaagctgtacagccagtatgaggagaagctgcaggaagaacagaggaagcacagtgctgagaaggaggctcttttggaagaaaccaatagttttctgaaagcgattgaagaagccaataaaaagatgcaagcagcagagatcagcctagaggagaaagaccagaggatcggggagctggacaggctgattgagcgcatggaaaaggaacgtcatcaactgcaacttcaactcctagaacatgaaacagaaatgtctggggagttaactgattctgacaaggaaaggtatcagcagttggaggaggcatcagccagcctccgtgagcggatcagacacctagatgacatggtgcattgccagcagaagaaagtcaagcagatggtcgaggagaataatgaactacaaagcaggttggactatttaacagaaacccaggccaagactgaagtggaaaccagagagataggagtgggctgtgatcttctacccaggcaaagtagaaaattcgaaaaggtcctcaacgagtttgtacagctgctcccactccctcatcacctcttgtgggcctttggaaatgtatgttggaggagacattttggattgttgcaatga

SEQ ID NO: 243521 - DNA, 2181 bp, Artificial Sequence
  derived and/or modified sequence
ggatgctgcgctccacgtccacggtcaccctgctctcgggcggcgccgccaggacgcccggggcgcccagcaggagggcaaatgtttgcagactacggctgaccgtacctcctgagagtccagttcctgagcaatgtgaaaagaagattgagagaaaagagcagcttcttgacctgagcaatggagaacctaccaggaaacttcctcagggtgttgtttatggtgtggtgcgaagatcagatcaaaatcagcagaaagaaatggtggtgtatgggtggtccaccagtcagctgaaagaagagatgaactacatcaaagatgtgagagccactttggaaaaggtgagaaagcgaatgtatggagactatgatgagatgagacagaagattcgacagctcacccaggaactatcagtttcccatgctcagcaggagtatctggagaatcacatccaaacccagtcgtctgccctggatcgttttaatgccatgaactcagccttggcatcagattccattggcctgcaaaaaaccctcgtggatgtgactttggaaaacagcaacattaaggatcaaatcagaaatctgcagcagacgtatgaagcatccatggacaagctgagggaaaagcagaggcagttggaggtagcgcaagttgaaaaccagctgctaaaaatgaaggtggaatcgtcccaagaagccaatgctgaggtgatgcgagagatgaccaagaagctgtacagccagtatgaggagaagctgcaggaagaacagaggaagcacagtgctgagaaggaggctcttttggaagaaaccaatagttttctgaaagcgattgaagaagccaataaaaagatgcaagcagcagagatcagcctagaggagaaagaccagaggatcggggagctggacaggctgattgagcgcatggaaaaggaacgtcatcaactgcaacttcaactcctagaacatgaaacagaaatgtctggggagttaactgattctgacaaggaaaggtatcagcagttggaggaggcatcagccagcctccgtgagcggatcagacacctagatgacatggtgcattgccagcagaagaaagtcaagcagatggtcgaggagaataatgaactacaaagcaggttggactatttaacagaaacccaggccaagactgaagtggaaaccagagagataggagtgggctgtgatcttctacccagccaaacaggcaggactcgtgaaattgtgatgccttctaggaactacaccccatacacaagagtcctggagttaaccatgaagaaaactctgacttaggcactcagaggcatacactttttacagatggacaaaagctctggaaccctgtggcttcaaatcctttgggaagggtgactgttgtttcccctacacacagtgtaagccggaatgggaatcgctgaggctctgatccacttctaagacaggaaggaaagtgaaggcagagtgagcaggtaagagagggatatacaaggtcacatttcagacacccactcggcataccctgccgtactgcatcatcatttgttttctttgtagacactgaaatcctatcaggaggattccttcacaatgtattttatttgctagactttggttgggagggaaaaggacattaatttgaagtttcatgttattcatgccaggattgtttgatagagcatgaaggttttgtttacccataaaagtattagaggcagcgtttctctgatacagagaggcctgtccacaagaagcatgggcacccagccaaacttgaacctggaagggagggttcccggcctgcaggtgctctttcctcttggtcccaagcatctgtgcagggtcgtgggagccacactgagagacttgtgtgggccagacaagcttcattctgatgcgctagtcccttggtttaatttgtgccttatgctttcattggaccagctgaaatcactgtatttattcaactagtgatttttttttctttctcactttaacttaaagagaattttatatgtcttggaaatttaataatttagtgttctcagtatcaattggtgtttttgttaaacgaatgaatcatctgttcatgcatgctctactttgatattataacctatgtcacatgtgtttaataaataccatatattttgttcta

SEQ ID NO: 243522 - DNA, 2300 bp, Artificial Sequence
  derived and/or modified sequence
gctgaggctgcaagtagccggcgccgtcccgcgtcgcccccgcgcagggcgggccccgcacgcttattctgcccgggaggaacgccggcgtccagcccgctaccgaccgccgctgcgggatgctgcgctccacgtccacggtcaccctgctctcgggcggcgccgccaggacgcccggggcgcccagcaggagggcaaatgtttgcagactacggctgaccgtacctcctgagagtccagttcctgagcaatgtgaaaagaagattgagagaaaagagcagcttcttgacctgagcaatggagaacctaccaggaaacttcctcagggtgttgtttatggtgtggtgcgaagatcagatcaaaatcagcagaaagaaatggtggtgtatgggtggtccaccagtcagctgaaagaagagatgaactacatcaaagatgtgagagccactttggaaaaggtgagaaagcgaatgtatggagactatgatgagatgagacagaagattcgacagctcacccaggaactatcagtttcccatgctcagcaggagtatctggagaatcacatccaaacccagtcgtctgccctggatcgttttaatgccatgaactcagccttggcatcagattccattggcctgcaaaaaaccctcgtggatgtgactttggaaaacagcaacattaaggatcaaatcagaaatctgcagcagacgtatgaagcatccatggacaagctgagggaaaagcagaggcagttggaggtagcgcaagttgaaaaccagctgctaaaaatgaaggtggaatcgtcccaagaagccaatgctgaggtgatgcgagagatgaccaagaagctgtacagccagtatgaggagaagctgcaggaagaacagaggaagcacagtgctgagaaggaggctcttttggaagaaaccaatagttttctgaaagcgattgaagaagccaataaaaagatgcaagcagcagagatcagcctagaggagaaagaccagaggatcggggagctggacaggctgattgagcgcatggaaaaggaacgtcatcaactgcaacttcaactcctagaacatgaaacagaaatgtctggggagttaactgattctgacaaggaaaggtatcagcagttggaggaggcatcagccagcctccgtgagcggatcagacacctagatgacatggtgcattgccagcagaagaaagtcaagcagatggtcgaggagaataatgaactacaaagcaggttggactatttaacagaaacccaggccaagactgaagtggaaaccagagagataggagtgggctgtgatcttctacccagccaaacaggcaggactcgtgaaattgtgatgccttctaggaactacaccccatacacaagagtcctggagttaaccatgaagaaaactctgacttaggcactcagaggcatacactttttacagatggacaaaagctctggaaccctgtggcttcaaatcctttgggaagggtgactgttgtttcccctacacacagtgtaagccggaatgggaatcgctgaggctctgatccacttctaagacaggaaggaaagtgaaggcagagtgagcaggtaagagagggatatacaaggtcacatttcagacacccactcggcataccctgccgtactgcatcatcatttgttttctttgtagacactgaaatcctatcaggaggattccttcacaatgtattttatttgctagactttggttgggagggaaaaggacattaatttgaagtttcatgttattcatgccaggattgtttgatagagcatgaaggttttgtttacccataaaagtattagaggcagcgtttctctgatacagagaggcctgtccacaagaagcatgggcacccagccaaacttgaacctggaagggagggttcccggcctgcaggtgctctttcctcttggtcccaagcatctgtgcagggtcgtgggagccacactgagagacttgtgtgggccagacaagcttcattctgatgcgctagtcccttggtttaatttgtgccttatgctttcattggaccagctgaaatcactgtatttattcaactagtgatttttttttctttctcactttaacttaaagagaattttatatgtcttggaaatttaataatttagtgttctcagtatcaattggtgtttttgttaaacgaatgaatcatctgttcatgcatgctctactttgatattataacctatgtcacatgtgtttaataaataccatatattttgttctact

SEQ ID NO: 243523 - DNA, 1248 bp, Artificial Sequence
  derived and/or modified sequence
atgctgcggagcaccagcacagtgaccctgctgagcggcggggccgcccggacccctggggcccccagccggcgggccaacgtgtgccgcctgcggctgactgtgcccccagagagccctgtgcctgagcagtgtgagaagaagattgaaaggaaggagcagctgctggacctgagcaatggagagcccaccaggaagctgccccagggcgtggtgtatggagtggtgagaagaagtgaccagaaccagcagaaggagatggtggtgtatggctggagcaccagccagctgaaggaggagatgaactacatcaaggatgtgtcccatgcccagcaggagtacctggagaaccacatccagacccagagcagcgccctggaccgcttcaatgccatgaacagcgccctggccagtgacagcatcggcctgcagaagaccctggtggatgtgaccctggagaacagcaacatcaaggaccagatccggaacctgcagcagacctatgaggcctccatggacaagctgcgggagaagcagaggcagctggaggtggcccaggtggagaaccagctgctgaagatgaaggtggagagcagccaggaggccaatgctgaggtgatgagggagatgaccaagaagctgtacagccagtatgaggagaagctgcaggaggagcagaggaagcacagcgctgagaaggaggccctgctggaggagaccaacagcttcctgaaggccatcgaggaggccaacaagaagatgcaggccgctgagatcagcctggaggagaaggaccagagaattggagagctggaccggctgattgaaagaatggagaaggagcggcaccagctgcagctgcagctgctggagcacgagacagagatgtctggagagctgacagacagcgacaaggagcgctaccagcagctggaggaggccagcgccagcctgcgggagcgcatccgccacctggatgacatggtgcactgccagcagaagaaggtgaagcagatggtggaggagaacaatgagctgcagagccggctggactacctgacagagacccaggccaagacagaggtggagacccgggagattggagtgggctgtgacctgctgccccggcagagcaggaagtttgagaaggtgctgaatgaatttgtgcagctgctgcccctgccccaccacctgctgtgggcctttggaaatgtgtgctggaggaggcacttcggcctgctgcagtag

SEQ ID NO: 243524 - DNA, 1317 bp, Artificial Sequence
  derived and/or modified sequence
atgctgcggagcaccagcacagtgaccctgctgagcggcggggccgcccggacccctggggcccccagccggcgggccaacgtgtgccgcctgcggctgactgtgcccccagagagccctgtgcctgagcagtgtgagaagaagattgaaaggaaggagcagctgctggacctgagcaatggagagcccaccaggaagctgccccagggcgtggtgtatggagtggtgagaagaagtgaccagaaccagcagaaggagatggtggtgtatggctggagcaccagccagctgaaggaggagatgaactacatcaaggatgtgcgggccaccctggagaaggtgaggaagaggatgtatggagactatgatgagatgaggcagaagatccggcagctgacccaggagctgtctgtgagccacgcccagcaggagtacctggagaaccacatccagacccagagcagcgccctggaccgcttcaatgccatgaacagcgccctggccagtgacagcatcggcctgcagaagaccctggtggatgtgaccctggagaacagcaacatcaaggaccagatccggaacctgcagcagacctatgaggcctccatggacaagctgcgggagaagcagaggcagctggaggtggcccaggtggagaaccagctgctgaagatgaaggtggagagcagccaggaggccaatgctgaggtgatgagggagatgaccaagaagctgtacagccagtatgaggagaagctgcaggaggagcagaggaagcacagcgctgagaaggaggccctgctggaggagaccaacagcttcctgaaggccatcgaggaggccaacaagaagatgcaggccgctgagatcagcctggaggagaaggaccagagaattggagagctggacaggctcatcgagaggatggagaaggagcggcaccagctgcagctgcagctgctggagcatgaaacagagatgtctggagagctgacagacagcgacaaggagcgctaccagcagctggaggaggccagcgccagcctgcgggagcgcatccgccacctggatgacatggtgcactgccagcagaagaaggtgaagcagatggtggaggagaacaatgagctgcagagccggctggactacctgacagagacccaggccaagacagaggtggagacccgggagattggagtgggctgtgacctgctgcccagccagacaggccgcacccgggagatcgtgatgcccagcaggaactacaccccctacaccagggtgctggagctgaccatgaagaagaccctgacctag

SEQ ID NO: 243525 - DNA, 1248 bp, Artificial Sequence
  derived and/or modified sequence
atgctgcggagcaccagcaccgtgaccctgctgagcggcggcgccgcgagaacgcccggagcaccctcgcgtcgcgctaacgtgtgtcgcctacgcctgactgtgccccccgaatctcccgtcccagaacagtgcgaaaagaaaatcgaacgcaaagaacagcttttggatctttccaatggcgagccgacacggaaactgccccagggcgttgtttacggagtggtccgacggtctgatcaaaatcaacagaaagagatggtggtctacggatggagcacttcccagctgaaagaggagatgaactatatcaaagacgtgagccatgcccagcaagagtatctggaaaatcatatacagacgcagagttcagccttggatcgcttcaacgcaatgaactctgccctcgccagcgatagtatcggcctgcaaaagacgctcgttgatgtgactcttgaaaacagcaacatcaaggatcagattagaaatttacagcagacttacgaggcaagcatggacaaattacgcgaaaagcagagacaattagaggtcgctcaggttgaaaaccagcttctcaagatgaaggtcgaaagctctcaggaagcaaacgcagaggtcatgcgcgagatgactaaaaagctgtatagtcagtatgaagagaagctgcaggaggaacaacggaaacattcagctgagaaggaggccctgctagaagagacaaactcctttctcaaggctatagaagaggcgaacaagaagatgcaggctgcagagatttcgctcgaagagaaggaccagagaatcggagagctggatcgcctcatcgaaaggatggagaaagaacgccaccagctgcaattacagcttctggaacacgagacggaaatgtccggtgaactcaccgactccgacaaagaaagataccagcagttagaagaggcttctgcaagtctccgggagaggatccggcatctggacgatatggtgcactgccagcagaaaaaggtcaagcagatggttgaagagaataatgaactccagtcccgactggactatttgaccgaaacccaggcaaagacagaggtggagactcgtgagattggagtgggctgtgacctgttgccgcggcaaagtcgcaaattcgaaaaggtgctgaacgagtttgtgcagctcttgcccctcccacatcatttgctatgggcttttggtaacgtctgctggagacggcacttcgggcttttgcagtag

SEQ ID NO: 243526 - DNA, 1317 bp, Artificial Sequence
  derived and/or modified sequence
atgctgcggagcaccagcaccgtgaccctgctgagcggcggcgccgctaggacacctggagccccctctagacgcgccaacgtgtgccgactcaggctcacggttcctccggaaagtcctgtccctgagcagtgtgaaaagaagatcgaaagaaaggaacagctgttggacttatctaacggtgaacccactcgcaagcttcctcagggcgtggtctatggagtcgtgaggagatccgaccagaatcaacagaaggagatggtcgtgtatgggtggtccacttctcagctgaaggaggaaatgaattatataaaggatgtccgcgcgactctggagaaggtgagaaagaggatgtatggggactatgacgaaatgcggcaaaaaatcaggcagctcacccaggagctcagcgtctcccatgctcagcaagaatacctggagaaccacatccagacccaaagttctgccctggatagattcaacgcgatgaacagcgcgctcgcgtctgactccattgggttgcaaaagactctggtagacgtaacccttgaaaactctaatattaaggaccagatccgcaacctgcaacagacatacgaggcgtccatggacaaactccgcgagaagcagagacagcttgaggtagcacaagtggaaaatcagctgttaaagatgaaggtcgagtctagccaagaggccaatgctgaggtaatgagagagatgaccaaaaagctttacagccaatacgaggaaaagctacaggaggaacagcggaaacacagcgcggaaaaagaagcccttctggaagaaactaacagctttctgaaggccattgaagaggctaacaaaaagatgcaggccgccgagattagtctggaagaaaaagatcagagaattggcgagctggatcgcctgatcgagcggatggaaaaggagagacaccaactgcagcttcaactgttggaacacgaaacagagatgtctggtgaactcaccgatagtgacaaggagagataccaacagctggaggaagcaagtgcttctctgcgggaacggatacgtcatcttgacgacatggtgcactgccagcagaaaaaggtgaagcaaatggtcgaagagaataacgagctacagtctcggctcgactacctcactgagactcaggccaagacagaggtagagacacgggagatcggggtgggctgtgacctgctgccaagccagactggcagaacgagggagatagtgatgcctagcaggaactacacaccctatacccgcgtgttggagctgaccatgaaaaagacattgacttag

SEQ ID NO: 243527 - DNA, 1317 bp, Artificial Sequence
  derived and/or modified sequence
atgctgcggagcaccagcaccgtgaccctgctgagcggcggcgccgccagaaccccgggggcccctagccggagagcaaacgtgtgccggctccgactgacggtgccgccagaatcgcccgtcccagaacagtgtgagaaaaaaatcgagcgaaaagagcaactgctggatttaagcaacggagagccaacccgtaagttgccgcagggtgtagtctacggggtggtgcggaggtccgaccagaaccaacagaaagaaatggtcgtgtatgggtggtcaacatcccagttgaaggaagaaatgaattacatcaaggatgtaagagccacactggagaaggtccggaaaagaatgtacggcgactacgatgagatgaggcagaaaataagacagctgactcaggagttatcggtttctcacgcccagcaagaatacttggagaatcatatccagacacagagtagtgccctagacaggtttaacgctatgaatagcgcgctggccagcgatagcatcggcctccagaaaactcttgtggatgtaacactagagaatagcaatatcaaggaccagatcagaaacctgcagcagacctacgaagcaagcatggacaaactgcgggagaaacagcgacagctcgaggtggcgcaagtcgagaaccagctgctcaagatgaaggtggaatccagccaggaggccaatgcagaagttatgagagagatgacaaagaagctttactcgcaatacgaagagaagctgcaggaagaacagagaaagcattccgccgaaaaagaagctctgctcgaggaaacaaatagcttcctgaaagcaatcgaagaagccaataagaagatgcaggccgctgagatttctctcgaggagaaagaccagaggataggggaattggatcgactcattgagcggatggagaaggagcgccatcagctccaactccagctcttagaacacgaaaccgagatgtcaggcgagttgacagacagcgacaaagaacggtatcagcagctcgaagaagcctcagcttccctccgggaaagaattcgccatctggacgacatggtccactgtcagcagaagaaggtcaagcagatggtcgaggaaaataacgaattacaaagcaggctcgattacttgaccgagactcaggccaaaaccgaagttgagacgcgagaaattggggtcggctgcgacttgcttccctcccagaccggccgcacccgtgagatcgtcatgcccagccgaaactataccccgtacacccgggtactcgagctgaccatgaagaagacattgacatag

SEQ ID NO: 243528 - DNA, 1248 bp, Artificial Sequence
  derived and/or modified sequence
atgctgagaagcacgtctaccgtcactctgctgtccggcggtgccgctcggacacccggagctccatcaaggagagctaacgtgtgccgtctgcggttgacagtccctcctgaaagccctgtccctgaacagtgcgagaagaaaattgagcgcaaggagcagctgctggatctcagcaacggagagcctactagaaagcttccacagggcgtggtgtacggggttgtgcgcagatccgaccagaaccagcagaaagagatggtcgtgtacgggtggtcaacttcccagttaaaggaagagatgaattacattaaagacgtgagccatgcccagcaggagtacttggagaaccacattcaaactcagagcagtgccctcgacaggtttaatgccatgaatagcgcattagcctcagactctatcggccttcaaaaaaccctggtggacgttacactggaaaatagcaacataaaagaccaaatccggaatctccagcagacctatgaggcctcaatggataagcttagggagaagcaacggcagcttgaagttgcacaggtagagaaccagttactcaagatgaaggttgaatccagtcaggaggccaatgcagaggtcatgagggaaatgacaaagaagctttattcgcaatacgaggagaagttacaggaggaacagcgcaagcattctgctgagaaagaggcgctgttggaggaaactaactctttcctgaaggcaatcgaggaagccaacaaaaagatgcaagccgcagagatctcacttgaggagaaagaccaacgcatcggtgagctggatcgtctgatcgaaaggatggagaaagagcgccatcaactacagctacaactgctcgagcacgagacggagatgagcggtgagcttactgactcagataaggagcggtaccagcagctggaagaggccagcgcttcactgagggagaggatccggcatctcgatgacatggtccattgccagcaaaagaaggtgaagcagatggtcgaagaaaacaatgaactgcagtcacgtctagattacctaaccgaaactcaagccaagacagaagtcgaaacaagagaaatcggggtcggatgcgacctgctcccgcgacagtctaggaaatttgagaaggtcctgaatgagtttgtgcagttgttgccactgcctcaccacctgttgtgggctttcggcaatgtgtgttggcgtcggcatttcgggctgctacaatag

SEQ ID NO: 243529 - DNA, 1317 bp, Artificial Sequence
  derived and/or modified sequence
atgctgcgctctacctccacagtgacccttctctccggaggtgccgcacggacccctggagcaccctcgcggcgtgcgaatgtgtgtaggctgcgtttgacagtcccacccgaatccccggtgccagaacagtgtgaaaaaaagatcgagcgcaaagagcagctcttagatctcagcaatggagagcccactcgcaagctgccgcagggagttgtctacggtgtggtcaggcggtcggatcaaaaccagcagaaggagatggtcgtctatggttggtctacatcacaactgaaggaggaaatgaattatatcaaggatgttcgcgcaaccttagagaaagtccgaaaacgcatgtacggcgactatgacgagatgcggcaaaaaatccgtcagctaactcaagagctcagtgtctcacacgcccagcaggagtacctggaaaaccacattcaaacacagtctagcgcactcgacaggtttaacgcaatgaattctgcgctcgcatcggattcaatagggcttcaaaaaactctggtcgatgtcactttggagaactccaacatcaaagaccaaattcgaaatctacagcagacctacgaggcctcaatggacaaactgagagagaaacaaaggcaactagaggttgcacaggtggagaatcagctgctcaaaatgaaggtagaatcctctcaagaggcaaacgccgaagttatgagggagatgacaaagaagctgtattctcagtacgaagagaaattgcaggaggagcagagaaaacattccgctgagaaggaggcactcctggaggagacaaactccttcctgaaggccatcgaagaggccaataaaaaaatgcaagcagccgaaatctccctagaggagaaagatcaaaggattggtgaattggataggcttattgagcggatggaaaaggagcgacaccagctgcagttacaacttctcgagcatgagacagaaatgtcaggggaactgacagattcggacaaggaaaggtatcagcagctggaggaggcaagcgcatcacttagggagagaattcgccacctcgatgatatggtacattgccaacagaagaaggtgaaacagatggtcgaggaaaataatgagcttcagtctcgactggattacttgacagagacgcaggcaaaaactgaggtggaaaccagggagatcggagtgggttgcgatttactgccaagtcagaccggcaggacgagggagatcgtgatgccatcaaggaactacaccccatacacgcgggtgctggagctcacgatgaaaaagaccctaacctag

SEQ ID NO: 243530 - DNA, 1317 bp, Artificial Sequence
  derived and/or modified sequence
atgctgaggtctacttccaccgtcactcttttgtccggtggagcagctcggacgcctggagcccctagccggagagctaatgtctgcaggctgcggcttaccgtgccgccagaatctcctgtacccgaacagtgtgagaaaaagattgagcggaaagaacagctattggacttgtctaacggcgagccgactcggaaattgcctcagggcgtggtgtatggtgtggttcggaggtcggaccagaaccagcagaaggaaatggtggtgtatggatggtcaacctcccagctgaaggaggagatgaattacattaaggacgtgcgagctaccctggaaaaagtgaggaagcggatgtatggagactatgacgagatgagacagaagatcagacagctcacccaggaattatctgtctcacatgcgcaacaggaataccttgagaatcatatccagactcagtcaagcgctctagaccggtttaatgctatgaactcggccctggcgtccgatagtattggcctgcagaaaacccttgtggacgtgaccctcgaaaactctaacattaaggatcaaatcagaaatttgcagcagacctatgaggcatcgatggataagctgcgcgagaagcagcgacagctcgaggtggcgcaagttgagaatcaacttctgaagatgaaagtggaatctagccaggaggccaatgccgaagtcatgcgggaaatgaccaagaaactttactcccagtatgaagaaaagcttcaagaggaacagaggaagcacagcgcagagaaggaggcactcctcgaggagactaattcctttctgaaagcaattgaggaagcaaataagaagatgcaagcagcagaaatttcgctcgaagagaaggatcaacgaatcggagagctggaccgtctcatagaacggatggagaaggaaaggcaccagttgcagttacaattacttgaacacgagactgagatgagcggggagttgactgactctgacaaagaaaggtatcagcagcttgaggaggccagcgccagccttcgtgagcggattcggcacttagacgacatggtgcattgccaacagaagaaggttaaacagatggtggaggaaaataacgaactgcagagccgattagactatctaaccgagacccaggctaagacagaggtggagacaagagaaattggggtcgggtgtgatctgctcccctcccagacggggcgaacaagagagatagtcatgccaagccggaattacacaccttacacacgcgtgctggagttgaccatgaaaaagacactgacttag

SEQ ID NO: 243531 - DNA, 1248 bp, Artificial Sequence
  derived and/or modified sequence
atgctgagaagcaccagcaccgtgaccctgctgagcggcggcgccgccagaacccccggcgcccccagcagaagagccaacgtgtgcagactgagactgaccgtgccccccgagagccccgtgcccgagcagtgcgagaagaagatcgagagaaaggagcagctgctggacctgagcaacggcgagcccaccagaaagctgccccagggcgtggtgtacggcgtggtgagaagaagcgaccagaaccagcagaaggagatggtggtgtacggctggagcaccagccagctgaaggaggagatgaactacatcaaggacgtgagccacgcccagcaggagtacctggagaaccacatccagacccagagcagcgccctggacagattcaacgccatgaacagcgccctggccagcgacagcatcggcctgcagaagaccctggtggacgtgaccctggagaacagcaacatcaaggaccagatcagaaacctgcagcagacctacgaggccagcatggacaagctgagagagaagcagagacagctggaggtggcccaggtggagaaccagctgctgaagatgaaggtggagagcagccaggaggccaacgccgaggtgatgagagagatgaccaagaagctgtacagccagtacgaggagaagctgcaggaggagcagagaaagcacagcgccgagaaggaggccctgctggaggagaccaacagcttcctgaaggccatcgaggaggccaacaagaagatgcaggccgccgagatcagcctggaggagaaggaccagagaatcggcgagctggacagactgatcgagagaatggagaaggagagacaccagctgcagctgcagctgctggagcacgagaccgagatgagcggcgagctgaccgacagcgacaaggagagataccagcagctggaggaggccagcgccagcctgagagagagaatcagacacctggacgacatggtgcactgccagcagaagaaggtgaagcagatggtggaggagaacaacgagctgcagagcagactggactacctgaccgagacccaggccaagaccgaggtggagaccagagagatcggcgtgggctgcgacctgctgcccagacagagcagaaagttcgagaaggtgctgaacgagttcgtgcagctgctgcccctgccccaccacctgctgtgggccttcggcaacgtgtgctggagaagacacttcggcctgctgcagtag

SEQ ID NO: 243532 - DNA, 1317 bp, Artificial Sequence
  derived and/or modified sequence
atgctgagaagcaccagcaccgtgaccctgctgagcggcggcgccgccagaacccccggcgcccccagcagaagagccaacgtgtgcagactgagactgaccgtgccccccgagagccccgtgcccgagcagtgcgagaagaagatcgagagaaaggagcagctgctggacctgagcaacggcgagcccaccagaaagctgccccagggcgtggtgtacggcgtggtgagaagaagcgaccagaaccagcagaaggagatggtggtgtacggctggagcaccagccagctgaaggaggagatgaactacatcaaggacgtgagagccaccctggagaaggtgagaaagagaatgtacggcgactacgacgagatgagacagaagatcagacagctgacccaggagctgagcgtgagccacgcccagcaggagtacctggagaaccacatccagacccagagcagcgccctggacagattcaacgccatgaacagcgccctggccagcgacagcatcggcctgcagaagaccctggtggacgtgaccctggagaacagcaacatcaaggaccagatcagaaacctgcagcagacctacgaggccagcatggacaagctgagagagaagcagagacagctggaggtggcccaggtggagaaccagctgctgaagatgaaggtggagagcagccaggaggccaacgccgaggtgatgagagagatgaccaagaagctgtacagccagtacgaggagaagctgcaggaggagcagagaaagcacagcgccgagaaggaggccctgctggaggagaccaacagcttcctgaaggccatcgaggaggccaacaagaagatgcaggccgccgagatcagcctggaggagaaggaccagagaatcggcgagctggacagactgatcgagagaatggagaaggagagacaccagctgcagctgcagctgctggagcacgagaccgagatgagcggcgagctgaccgacagcgacaaggagagataccagcagctggaggaggccagcgccagcctgagagagagaatcagacacctggacgacatggtgcactgccagcagaagaaggtgaagcagatggtggaggagaacaacgagctgcagagcagactggactacctgaccgagacccaggccaagaccgaggtggagaccagagagatcggcgtgggctgcgacctgctgcccagccagaccggcagaaccagagagatcgtgatgcccagcagaaactacaccccctacaccagagtgctggagctgaccatgaagaagaccctgacctag

SEQ ID NO: 243533 - protein, 570 aa, Artificial Sequence
  derived and/or modified sequence
MALKKSSPSLDSGDSDSEELPTFAFLKKEPSSTKRRQPEREEKIVVVDISDCEASCPPAPELFSPPVPEIAETVTQTQPVRLLSSESEDEEEFIPLAQRLTCKFLTHKQLSPEDSSSPVKSVLDHQNNEGASCDWKKPFPKIPEVPLHDTPERSAADNKDLILDPCCQLPAYLSTCPGQSSSLAVTKTNSDILPPQKKTKPSQKVQGRGSHGCRQQRQARQKESTLRRQERKNAALVTRMKAQRPEECLKHIIVVLDPVLLQMEGGGQLLGALQTMECRCVIEAQAVPCSVTWRRRAGPSEDREDWVEEPTVLVLLRAEAFVSMIDNGKQGSLDSTMKGKETLQGFVTDITAKTAGKALSLVIVDQEKCFSAQNPPRRGKQGANKQTKKQQQRQPEASIGSMVSRVDAEEALVDLQLHTEAQAQIVQSWKELADFTCAFTKAVAEAPFKKLRDETTFSFCLESDWAGGVKVDLAGRGLALVWRRQIQQLNRVSLEMASAVVNAYPSPQLLVQAYQQCFSDKERQNLLADIQVRRGEGVTSTSRRIGPELSRRIYLQMTTLQPHLSLDSAD

SEQ ID NO: 243534 - DNA, 1713 bp, Artificial Sequence
  derived and/or modified sequence
atggccctgaagaagagcagccccagcctggacagcggcgacagcgacagcgaggagctgcccaccttcgccttcctgaagaaggagcccagcagcaccaagagaagacagcccgagagagaggagaagatcgtggtggtggacatcagcgactgcgaggccagctgcccccccgcccccgagctgttcagcccccccgtgcccgagatcgccgagaccgtgacccagacccagcccgtgagactgctgagcagcgagagcgaggacgaggaggagttcatccccctggcccagagactgacctgcaagttcctgacccacaagcagctgagccccgaggacagcagcagccccgtgaagagcgtgctggaccaccagaacaacgagggcgccagctgcgactggaagaagcccttccccaagatccccgaggtgcccctgcacgacacccccgagagaagcgccgccgacaacaaggacctgatcctggacccctgctgccagctgcccgcctacctgagcacctgccccggccagagcagcagcctggccgtgaccaagaccaacagcgacatcctgcccccccagaagaagaccaagcccagccagaaggtgcagggcagaggcagccacggctgcagacagcagagacaggccagacagaaggagagcaccctgagaagacaggagagaaagaacgccgccctggtgaccagaatgaaggcccagagacccgaggagtgcctgaagcacatcatcgtggtgctggaccccgtgctgctgcagatggagggcggcggccagctgctgggcgccctgcagaccatggagtgcagatgcgtgatcgaggcccaggccgtgccctgcagcgtgacctggagaagaagagccggccccagcgaggacagagaggactgggtggaggagcccaccgtgctggtgctgctgagagccgaggccttcgtgagcatgatcgacaacggcaagcagggcagcctggacagcaccatgaagggcaaggagaccctgcagggcttcgtgaccgacatcaccgccaagaccgccggcaaggccctgagcctggtgatcgtggaccaggagaagtgcttcagcgcccagaacccccccagaagaggcaagcagggcgccaacaagcagaccaagaagcagcagcagagacagcccgaggccagcatcggcagcatggtgagcagagtggacgccgaggaggccctggtggacctgcagctgcacaccgaggcccaggcccagatcgtgcagagctggaaggagctggccgacttcacctgcgccttcaccaaggccgtggccgaggcccccttcaagaagctgagagacgagaccaccttcagcttctgcctggagagcgactgggccggcggcgtgaaggtggacctggccggcagaggcctggccctggtgtggagaagacagatccagcagctgaacagagtgagcctggagatggccagcgccgtggtgaacgcctaccccagcccccagctgctggtgcaggcctaccagcagtgcttcagcgacaaggagagacagaacctgctggccgacatccaggtgagaagaggcgagggcgtgaccagcaccagcagaagaatcggccccgagctgagcagaagaatctacctgcagatgaccaccctgcagccccacctgagcctggacagcgccgactag

SEQ ID NO: 243535 - DNA, 2281 bp, Artificial Sequence
  derived and/or modified sequence
aggagatctacttccgggccctgcgtggcagttgaaagagtggcgggagaagttgcagggaattatttgatagcacatactgatggctctaaagaagtcatcaccctcactggattctggtgatagtgactctgaggagttgccaacatttgcctttctgaagaaggaaccatcttcaacaaagaggagacagcctgaaagggaagagaagattgtagtggttgacatctcagattgtgaagcctcctgtcctccagcaccagagttattttcaccacctgtcccagaaatagctgaaactgtcacacaaacacagccagtcaggttgctaagcagtgaaagtgaagatgaagaagaatttattcctctggctcaaaggcttacatgtaagtttctgacccacaagcaactgagccctgaggactctagctccccagttaaaagtgttttggatcatcaaaataatgaaggtgcatcatgtgactggaaaaagccctttccaaagatccctgaagttcccctccatgataccccagagaggagtgcagcagataacaaggacctgatcttagatccatgctgtcagcttccagcctacctgtctacctgccctggccagagcagcagcttggcagtaaccaaaacaaattctgacatccttccaccccagaagaaaaccaagccgagtcagaaggtccagggaagaggctcacacggatgccggcagcagagacaagcaaggcagaaggaaagcaccctgagaagacaggaaagaaagaatgcagcactggttaccaggatgaaagcccagaggccagaggaatgcttaaaacacatcattgtagtgctggatccagtgctcttacagatggaaggtgggggccagctcctaggagcactgcagaccatggagtgccgctgtgtgattgaggcgcaggctgtgccttgcagtgtcacttggaggagaagggctgggccgtctgaggacagagaggactgggtggaggagccaacagtactggtgttgctccgggcagaggcatttgtgtccatgatcgacaatggaaagcagggaagcctggacagcactatgaaagggaaggaaacgcttcagggctttgtaactgacatcacagcaaagacagcagggaaagctctgtcactggtgattgtggatcaggagaaatgcttcagtgctcagaatcctccaagaagagggaaacagggagcaaataaacagaccaagaagcagcagcagagacaaccagaggccagcatagggtccatggtatccagggtagacgctgaagaggcattggtggatctgcagctacacacagaagcccaggctcaaattgtgcagagctggaaagagctggccgacttcacatgcgcattcacaaaggctgtggctgaggcgcccttcaagaagctccgagatgaaactaccttctccttctgtctggagagtgactgggctggaggggtgaaggtggaccttgctggcaggggactcgcactagtctggaggagacagattcagcagctgaaccgagtcagcctggaaatggccagtgcagttgtgaatgcctatccctccccacagctcctggtacaggcttatcagcagtgtttttcggataaagaacgccagaatttgctcgcagacatacaggtgcgccgtggggaaggtgtgacatccacttctcgccgcattggaccagaactatccaggcgtatctaccttcagatgaccactttacagccacatctctctttagatagtgctgactgattctagccctcagggatgaggatgaaaagctggaaacttccacttccccaacctcagagcctgactgtaatgaagagactggcagcacctcctggaacacaagcctaggtgaggcccagtctttcttgggtcttattatttgtgaaggtctctctgcctgtcggctggggcagagactgaaatactgccacctacctttggcatttaatgttcctctcctggcaaaaattcactgccacagacaaaccacccccactcctacccagccagccctcaaaacacaaaggaacaaagacagtccactcagacacttatttaataactgtagaaatccaaaagaattagcatcaaatcttgaagtcgtgagtgaagctgcgggttggcttgactgggctcagccactgagctgcctcaaccggccaaggaacgggattatgatgactatgcggacttctatattgtcttcatctcattgtgtgtattatg

SEQ ID NO: 243536 - DNA, 1713 bp, Artificial Sequence
  derived and/or modified sequence
atggctctcaagaaatcttcaccctccttagactccggggatagcgactctgaagaactacccacgttcgcctttctgaagaaagaaccttcctctaccaagcggaggcagcctgaacgggaagaaaagattgttgttgttgatatctctgattgcgaagctagctgtcccccagctcccgaactcttttcacccccagtccctgaaatcgctgagaccgttacccagacccagcctgttcggttgcttagctctgagagcgaggatgaggaagaattcatccccttggctcagcgccttacgtgcaaatttcttactcataaacagctgagcccagaggatagcagctcacctgtgaaatctgtcctggaccaccagaataatgaaggtgcatcttgtgattggaaaaaacctttcccaaagattcccgaggtcccacttcacgacacgccagagagaagcgcagctgacaacaaagacctgatactggatccctgttgccaactgccagcttacctttccacctgtccggggcagtcttcttccttggccgtcactaaaacgaactccgatatcctgcctccacagaaaaagactaaaccctcacagaaagtgcagggcagaggctcccacggctgtcgtcagcagcgacaagccagacagaaggaaagtaccctgcgaaggcaggaaagaaaaaacgccgctctcgtcactagaatgaaagctcagcggcctgaggagtgccttaagcacataatcgtcgttttagaccccgtattgctgcagatggaagggggcggccaactcctaggagctctgcaaacaatggagtgtcgatgcgttatcgaagcccaggctgtgccatgctccgtgacatggagacggagggccggtccatcagaagatagggaagactgggtggaagagccaactgtcttggtcttactgagggccgaagcatttgtttctatgatcgacaatggcaagcaaggcagcttggatagtaccatgaaaggtaaagagaccttacagggtttcgtgaccgatatcacagccaagaccgccggtaaggccctatcgcttgtgatcgttgatcaggagaagtgcttcagcgctcagaatccaccacgcagggggaaacagggagccaacaagcaaacaaaaaagcagcaacaaagacagcctgaagcttccatcgggtccatggttagccgggtggatgccgaagaggctctggtggacctacagctccatacagaagcccaggcccagatcgtgcagtcgtggaaggaactggccgacttcacatgtgcgtttactaaggcagtggccgaggcccccttcaagaaacttagagacgagactaccttttctttttgcctcgaaagtgactgggccgggggcgtgaaagtcgatctggcaggccgaggtttggcgctcgtgtggagacgccaaattcagcaactcaatcgagtttccctggaaatggcaagcgctgtggttaatgcgtaccctagcccacagcttctggtccaagcgtaccagcagtgcttttccgataaagaaagacagaatctgcttgccgacatccaggtcaggcggggtgagggcgtgacgagcacaagccgcaggatcggcccggaactgtcaaggcgcatctatctacagatgactaccttacagccgcatctgtctctcgactccgctgactag

SEQ ID NO: 243537 - DNA, 1713 bp, Artificial Sequence
  derived and/or modified sequence
atggccctgaagaagagcagccccagcctggacagcggggacagcgacagcgaggagctgcccacctttgccttcctgaagaaggagcccagcagcaccaagaggcggcagcctgagcgggaggagaagatcgtggtggtggacatcagtgactgtgaggccagctgccccccagcccctgagctgttcagcccccctgtgcctgagattgctgagaccgtgacccagacccagcctgtgcggctgctgagcagcgagagtgaagatgaggaggagttcatccccctggcccagaggctgacctgcaagttcctgacccacaagcagctgagccctgaggacagcagcagccctgtgaagtctgtgctggaccaccagaacaatgaaggagccagctgtgactggaagaagcccttccccaagatccctgaggtgcccctgcatgacaccccagagaggtctgctgctgacaacaaggacctgatcctggacccctgctgccagctgcctgcctacctgagcacctgccccggccagagcagcagcctggccgtgaccaagaccaacagcgacatcctgcccccccagaagaagaccaagcccagccagaaggtgcagggccggggcagccacggctgccggcagcagaggcaggcccggcagaaggagagcaccctgcggcggcaggagaggaagaatgctgccctggtgaccaggatgaaggcccagaggccagaagaatgtctgaagcacatcatcgtggtgctggaccctgtgctgctgcagatggagggcggcggccagctgctgggcgccctgcagaccatggagtgccgctgcgtcatcgaggcccaggccgtgccctgcagcgtgacctggaggagaagagctggccccagtgaagatcgggaggactgggtggaggagcccaccgtgctggtgctgctgcgggcagaggcctttgtgtccatgattgacaatggcaagcagggcagcctggacagcaccatgaagggcaaggagaccctgcagggctttgtgacagacatcacagccaagacagctgggaaggccctgagcctggtgattgtggaccaggagaagtgcttcagcgcccagaaccccccaagaagaggcaagcagggcgccaacaagcagaccaagaagcagcagcagaggcagcctgaggccagcatcggctccatggtgtcccgggtggatgctgaggaggccctggtggacctgcagctgcacacagaggcccaggcccagatcgtgcagagctggaaggagctggccgacttcacctgtgccttcaccaaggctgtggccgaggcccccttcaagaagctgagagatgagaccaccttctccttctgcctggagagtgactgggccggcggcgtgaaggtggacctggccggccggggcctggccctggtgtggaggcggcagatccagcagctgaacagagtgtccctggagatggccagcgctgtggtgaatgcctaccccagcccccagctgctggtgcaggcctaccagcagtgcttcagtgacaaggagcggcagaacctgctggccgacatccaggtgagaagaggagaaggagtgaccagcaccagcagaagaattggccctgagctgagccgccgcatctacctgcagatgaccaccctgcagccccacctgagcctggacagcgctgactag

SEQ ID NO: 243538 - DNA, 1713 bp, Artificial Sequence
  derived and/or modified sequence
atggccctgaagaagagcagccccagcctggacagcggcgacagcgatagcgaggagctgccgactttcgccttcttgaaaaaggaaccaagtagcacaaaacgaagacagcctgaacgagaagagaagatagtcgttgtggatattagtgactgtgaggcttcctgtcctcccgcacctgagttgttctctcccccagttccagaaattgccgagactgtgactcagacccagcccgtgcgccttcttagctccgaatctgaagacgaggaggaatttatcccactcgcacaacgcctgacctgtaagtttctcacccacaagcaactgtcaccggaggatagctctagtcccgtgaaaagtgtgttggaccatcagaacaatgagggcgccagctgcgattggaaaaagccctttccaaagatccccgaagtccccctccacgatacccccgagagatctgccgcagacaacaaggacctgatcctcgacccttgttgccagctgccggcctacttgtcaacctgtcccggccagagctccagcctggcggtgaccaaaactaatagcgatatcttgcccccacagaaaaagaccaagccatcacagaaagtgcaggggagaggatcccacgggtgccgacagcaacggcaggccagacagaaagaaagtacactccgaaggcaggaaaggaagaacgctgcactggtgacacgaatgaaagctcagcgtccagaggagtgcttaaagcacataatcgtggtcctggatcccgtgttgctgcagatggagggtggggggcagttactgggtgcacttcagacgatggagtgcagatgcgttatcgaggcccaggctgtcccctgcagtgttacttggcgacgccgtgcgggaccaagtgaagatcgagaagattgggttgaagagccaaccgtgttggtgttgctaagggctgaggcattcgtaagtatgattgacaacgggaaacagggttcactggacagcaccatgaaaggcaaggagaccctccaggggttcgtcaccgatattaccgcaaaaacggccggtaaagctcttagtctggtcattgttgaccaagagaaatgtttttcagcccagaatccccccagacgaggcaagcagggtgccaataaacagactaaaaaacagcaacaacgccaacccgaggccagcatcgggagcatggtgagcagggtagatgcagaggaggctctcgtagatctgcagctgcacacggaagctcaggcccaaatagtgcagtcttggaaggagcttgccgactttacttgcgcatttacaaaagcagtggcagaggcaccctttaaaaaactccgcgacgagaccaccttcagcttttgccttgagtccgactgggccggaggagtgaaggtcgatctagcaggacgcggtctggctctggtctggcggaggcaaatccagcagttaaacagagtgagccttgaaatggcttctgcagtggtgaacgcctatccctctcctcagctactggtgcaggcttatcagcagtgctttagcgataaggagcgccagaatctgttagccgatatccaggtcagaaggggagagggcgtcactagcacgtcccgccgcattggccccgagctgagcagacgcatctacctgcagatgaccactttgcagccccatctgtctctggacagcgccgactag

SEQ ID NO: 243539 - DNA, 1713 bp, Artificial Sequence
  derived and/or modified sequence
atggcccttaagaaatccagtccgtccctagatagtggtgattccgactccgaagaactgcccacgtttgcattcctcaaaaaggaaccaagttcaacgaagcggcgtcagccagaaagagaagagaaaatcgttgtcgtggacataagtgattgcgaagctagctgtccacccgctcctgagttgttttctcccccagtacccgagatcgctgagaccgtaactcaaacccagccagtgaggctgctgtccagcgaatccgaggatgaagaggagttcatccctctggcacaaaggctaacctgtaagtttctgacccataagcaactgtcccctgaagattcgtcctcgcccgtaaagagcgtcctggaccatcagaacaacgagggagccagttgcgactggaaaaaaccctttcccaaaattccagaagtgccactacacgacactccggaacgctccgctgctgacaataaggacctgatcctggatccgtgctgccagctcccggcatatctgtcaacttgtccagggcagagctccagcctggccgtcactaagaccaattccgatattctgcccccacagaagaaaacgaagccatctcagaaggtgcaaggaagagggtcccacggatgccggcagcagcggcaggcgagacagaaagagtcgactcttcgcaggcaggaacggaagaatgcagcgttggtgacaagaatgaaggcccaaagaccggaggagtgtttgaaacatatcatagtggtactggatccagtgctcctgcagatggagggaggcggacagttgctcggggctctgcagacaatggagtgcaggtgcgtgattgaggcacaggctgttccttgcagcgtcacctggcgtaggagggcgggtccttccgaagaccgcgaagattgggtcgaagaaccaacagttctggtcctactgagggcggaggctttcgtctccatgattgacaacgggaagcaggggtccttagacagtaccatgaagggaaaagagaccttgcagggcttcgtgacagatattaccgccaagaccgccggaaaagccctgtcacttgtgatcgttgaccaggaaaaatgctttagcgcccagaaccctccgcgtcggggtaaacagggggctaataagcagaccaaaaaacagcagcagagacaaccggaagcaagcatagggtctatggtgtctagagtggacgcagaggaggctcttgtcgacctgcagctccatactgaggcccaagcacagatagttcagtcttggaaagagcttgccgacttcacatgcgccttcaccaaagcagttgcagaagctcccttcaagaagctccgggatgagaccactttctcattctgtctggaaagtgattgggctggcggagttaaagtcgatctggctggcaggggcttggcactggtttggaggcggcagattcaacagctgaaccgagtctctctggaaatggctagcgctgtggtcaacgcctatccctccccgcaactgctggtccaggcctatcaacagtgcttcagcgataaagagagacagaatctgctggccgatattcaggtgaggcgcggtgaaggtgtgaccagtacatcaagacgtatcggaccagagctgagtagacgcatttatctgcagatgaccacactccagccacacctttcccttgattctgccgactag

SEQ ID NO: 243540 - protein, 208 aa, Artificial Sequence
  derived and/or modified sequence
MASSLLAGERLVRALGPGGELEPERLPRKLRAELEAALGKKHKGGDSSSGPQRLVSFRLIRDLHQHLRERDSKLYLHELLEGSEIYLPEVVKPPRNPELVARLEKIKIQLANEEYKRITRNVTCQDTRHGGTLSDLGKQVRSLKALVITIFNFIVTVVAAFVCTYLGSQYIFTEMASRVLAALIVASVVGLAELYVMVRAMEGELGEL

SEQ ID NO: 243541 - protein, 299 aa, Artificial Sequence [sequence omitted]

SEQ ID NO: 243542 - DNA, 627 bp, Artificial Sequence
  derived and/or modified sequence
atggccagcagcctgctggccggcgagagactggtgagagccctgggccccggcggcgagctggagcccgagagactgcccagaaagctgagagccgagctggaggccgccctgggcaagaagcacaagggcggcgacagcagcagcggcccccagagactggtgagcttcagactgatcagagacctgcaccagcacctgagagagagagacagcaagctgtacctgcacgagctgctggagggcagcgagatctacctgcccgaggtggtgaagccccccagaaaccccgagctggtggccagactggagaagatcaagatccagctggccaacgaggagtacaagagaatcaccagaaacgtgacctgccaggacaccagacacggcggcaccctgagcgacctgggcaagcaggtgagaagcctgaaggccctggtgatcaccatcttcaacttcatcgtgaccgtggtggccgccttcgtgtgcacctacctgggcagccagtacatcttcaccgagatggccagcagagtgctggccgccctgatcgtggccagcgtggtgggcctggccgagctgtacgtgatggtgagagccatggagggcgagctgggcgagctgtag

SEQ ID NO: 243543 - DNA, 900 bp, Artificial Sequence
  derived and/or modified sequence
atggccagcagcctgctggccggcgagagactggtgagagccctgggccccggcggcgagctggagcccgagagactgcccagaaagctgagagccgagctggaggccgccctgggcaagaagcacaagggcggcgacagcagcagcggcccccagagactggtgagcttcagactgatcagagacctgcaccagcacctgagagagagagacagcaagctgtacctgcacgagctgctggagggcagcgagatctacctgcccgaggtggtgaagccccccagaaaccccgagctggtggccagactggagaagatcaagatccagctggccaacgaggagtacaagagaatcaccagaaacgtgacctgccaggacaccagacacggcggcaccctgagcgacctgggcaagcaggtgagaagcctgaaggccctggtgatcaccatcttcaacttcatcgtgaccgtggtggccgccttcgtgtgcacctacctgggcagccagtacatcttcaccgagatggccagcagacccagaggcgcccactgggccggcagagaccccgagcccggcgagggcaccagaaccagaagagccggcgccgagtgggtgagacacctgggcgcccacgtgcaggccttcggcggcgacatgcccgaggccggcggcggcagaagacccggcagaggcgccgtgctggtgcccccccacggccccagagccgccgcccccctgagagccggcgccggccagctgagagccgccagaggccccggcggcgccgccacccacggcagagaggccagaagcagagtggccctgcccgccagactgctgcagggcggcagagccgccttcgccgccagactgcccagaagcagcggcgtgggcgactag

SEQ ID NO: 243544 - DNA, 627 bp, Artificial Sequence
  derived and/or modified sequence
atggcctcttcactactggcaggcgagagactggtcagagctttgggccctggcggcgaacttgaacctgagcgcttaccacgcaaattacgtgccgaactggaggctgctctgggaaagaagcataaaggaggggactcttcttccggccctcagcgtttggtctcttttaggctcatcagagacctgcaccagcatctgcgcgagcgcgatagcaagctctacctacatgagctgcttgaaggctcagagatttatttacccgaagtcgtgaaaccgccgcgaaatccagagctagtggcacggttagagaagatcaaaatccagcttgcgaatgaggaatacaagaggattaccagaaacgtaacatgtcaggacactcggcacggtgggacattgagcgatctgggaaagcaggttagaagtctgaaggctctagtaatcaccatctttaacttcattgtaacagtggttgctgcgtttgtgtgcacttacttgggatcgcagtacatatttacggaaatggcctcaagagtgttggccgccttaatagtggcctctgttgtaggactagcggagctatatgtgatggttcgtgcaatggagggggagcttggggaactttag

SEQ ID NO: 243545 - DNA, 900 bp, Artificial Sequence
  derived and/or modified sequence
atggccagctcactgttagctggcgagagactggttcgagccctgggccccggaggggagctcgaacccgaaaggctgccacggaaactgcgggctgagctggaggcagccttggggaaaaaacataagggtggcgacagctcttcggggcctcagcgccttgtgagctttaggctgattagagatttgcaccagcacctgagagaacgggactccaagttgtatctgcatgagctcctggagggaagcgagatttatttgccagaggtcgtcaagcctccaagaaatcccgagctcgttgccagactggagaagattaagatacaattagctaatgaagagtacaaaagaatcaccaggaatgtgacttgtcaggatacaaggcacggcggcacgttgtccgacttaggaaagcaggtgagatcattgaaggccctggtcattaccatctttaattttattgtgactgtcgtcgcagcattcgtgtgtacctatctcggctcgcagtacatcttcactgaaatggcttctcgaccccgaggggcccattgggctggccgcgacccggagcccggcgagggaactcgtacgaggagggccggagctgagtgggtgcgtcacctgggagctcatgtccaggcgtttggaggggacatgccagaggctggaggaggcaggcgacctggccgcggagccgtcctagtacccccgcacgggccccgggcggccgcacccctgcgcgctggcgctggtcaactgagagccgctcggggccctgggggggccgcaactcatgggcgggaggcgcggtcgcgggtggccttgccggcgaggctcctgcagggcgggagggcagcttttgctgccagattacctagaagtagcggagtcggcgattag

SEQ ID NO: 243546 - DNA, 627 bp, Artificial Sequence
  derived and/or modified sequence
atggccagcagcctgctggccggggagcggctggtgcgggccctgggccctggaggagagctggagcctgagcggctgcccaggaagctgcgggcagagctggaggccgccctgggcaagaagcacaagggcggggacagcagcagcggcccccagaggctggtgtccttccgcctcatccgggacctgcaccagcacctgcgggagcgggacagcaagctgtacctgcacgagctgctggagggcagcgagatctacctgcctgaggtggtgaagcccccaagaaatcctgagctggtggcccggctggagaagatcaagatccagctggccaatgaggagtacaagaggatcaccagaaatgtgacctgccaggacaccaggcatggaggcaccctgagtgacctgggcaagcaggtgcgcagcctgaaggccctggtgatcaccatcttcaacttcatcgtgacagtggtggccgcctttgtgtgcacctacctgggcagccagtacatcttcacagagatggccagccgggtgctggccgccctgattgtggcctctgtggtgggcctggccgagctgtatgtgatggtgcgggccatggagggggagctgggggagctgtag

SEQ ID NO: 243547 - DNA, 900 bp, Artificial Sequence
  derived and/or modified sequence
atggccagcagcctgctggccggggagcggctggtgcgggccctgggccctggaggagagctggagcctgagcggctgcccaggaagctgcgggcagagctggaggccgccctgggcaagaagcacaagggcggggacagcagcagcggcccccagaggctggtgtccttccgcctcatccgggacctgcaccagcacctgcgggagcgggacagcaagctgtacctgcacgagctgctggagggcagcgagatctacctgcctgaggtggtgaagcccccaagaaatcctgagctggtggcccggctggagaagatcaagatccagctggccaatgaggagtacaagaggatcaccagaaatgtgacctgccaggacaccaggcatggaggcaccctgagtgacctgggcaagcaggtgcgcagcctgaaggccctggtgatcaccatcttcaacttcatcgtgacagtggtggccgcctttgtgtgcacctacctgggcagccagtacatcttcacagagatggccagccggcccaggggggcccactgggccggccgggaccctgagcctggagagggcaccaggacccggcgggccggggctgagtgggtgcgccacctgggcgcccacgtgcaggcctttggaggagacatgcctgaggccggcggcggccggcggcccggccgcggggctgtgctggtgcccccccacggccccagggctgctgcccccctgcgggccggggccggccagctgcgggccgcccggggccctggaggagctgccacccacggccgggaggcccggagccgggtggccctgcctgcccggctgctgcagggcggccgggccgcctttgctgcccggctgcccaggagcagtggagtgggggactag

SEQ ID NO: 243548 - DNA, 627 bp, Artificial Sequence
  derived and/or modified sequence
atggccagcagcctgctggccggcgagcggctggtgcgggccctgggacccggaggcgaactcgagcctgagagactcccgcgcaagttgcgagccgagctggaagcagccttgggaaagaagcacaagggtggtgacagctcgagcgggccccagaggttggtgtctttccgcctgatacgggacctgcaccagcacttaagggagagggattctaagctgtacttgcatgaactgctcgagggttctgaaatctacctacccgaggtagtgaagccccccagaaatcccgagttagttgcccgacttgagaagattaaaatccagttggccaatgaggagtacaaacgcatcactaggaacgtcacctgccaggatactcgccacggtggaactttgtccgatctcggaaagcaagtgagaagtctaaaggccctggtgatcaccatctttaacttcatcgttaccgtggtggcagcctttgtgtgtacatacctggggtcccagtatatcttcactgagatggcgtccagggtgcttgctgcactcatagtagcctctgttgttgggctagccgaactctacgtaatggtaagggcaatggagggggagctcggcgagctgtag

SEQ ID NO: 243549 - DNA, 900 bp, Artificial Sequence
  derived and/or modified sequence
atggccagcagcctgctggccggcgagcggctggtgcgggccctgggacctgggggtgagctggaaccagagcggctgcctcggaagctgagagctgagctggaagcggctctgggcaagaaacacaagggcggtgacagcagcagcggtccccaacggctggtgtcatttcggctcattcgggacctgcatcaacatcttcgggagagggattcaaaactttatttacacgaactcctggaggggagtgagatctatcttcccgaagtggtgaaaccacctcgaaatccagagttggtagccaggctggaaaaaatcaagatccagttggcaaacgaggagtataaaagaataactcggaacgtgacctgccaggacacgagacacggaggcaccttgtccgatctgggaaagcaagttcggtctcttaaggccctagtaattacaatctttaattttattgtgaccgttgtcgccgcttttgtatgtacttatctggggtcgcagtatatatttactgagatggcctcgcggcctaggggagcccattgggccggcagggatcccgagcctggcgaaggaacccgcacccgacgggccggcgccgagtgggtgagacatctgggggcgcacgtgcaggcgtttggaggcgatatgccggaggccggcggcggacgacgtcccggacgaggggctgtgctggtgccaccccacggccctcgtgcagctgcccctctgagggccggcgccggtcagctaagagccgccaggggccctggcggagccgccacacacggccgcgaggcccgcagcagggtcgccctcccggctcgcttattacagggcgggagggccgcctttgcagctaggctcccacggagctcaggagttggcgactag

SEQ ID NO: 243550 - DNA, 627 bp, Artificial Sequence
  derived and/or modified sequence
atggcttcatcgctactggccggtgaaaggttagtgagagccctgggacctggaggtgagttagagccagagcgtctgccacgaaaacttcgcgctgaactagaggctgcactggggaagaagcataaaggcggagattcatcttcaggacctcaaagactggtgagtttccgcctgattagggatctgcatcagcacctccgcgagcgcgattccaagctgtatctgcacgagctcctagaggggtccgaaatttaccttcccgaggtggtgaaacctcctcgaaatccagaactggtcgcgcgactcgaaaaaataaagatccaacttgcaaatgaggagtataaaagaattacgagaaatgtgacgtgccaggacacgcgacacggtggcacccttagtgaccttggcaagcaggttcggtctctgaaggccctcgtaattacaatattcaacttcatcgtcaccgtggtcgccgcatttgtgtgcacctacctaggtagccagtatatctttaccgaaatggccagtcgcgtgctcgccgcattaatcgttgcatccgtcgttggccttgcagagctgtacgtcatggtccgagcaatggaaggcgagttgggtgaactgtag

SEQ ID NO: 243551 - DNA, 900 bp, Artificial Sequence
  derived and/or modified sequence
atggcttcatccttgctggccggagaacgcctcgtgagagcactgggccctggcggtgagctagagccagagcgcctgcccagaaagttacgggctgagctggaggccgctttaggaaagaagcacaagggaggagatagctcaagtggcccacagcgcctggtgagttttagactgatccgggatttgcaccaacacctccgtgagagagacagtaagctttatctccacgaattgctggaaggaagcgaaatttacctccccgaagtggttaagccccctcgaaatccagaactggtggcgaggctggagaaaattaaaattcaactggccaatgaggagtacaagcggattacaagaaatgttacctgtcaggacaccaggcacggcggtaccttatccgacctcggcaaacaagtgaggtctctgaaggctctggttattaccatctttaattttatagttactgtggtagctgcgttcgtttgcacttacctgggctcacagtacatctttaccgaaatggcatctcgcccaaggggcgcacattgggcgggacgggaccccgagcccggtgaaggcacccgcaccaggcgcgctggggctgagtgggtcagacatctgggcgcacatgtccaggcctttggcggagacatgccagaagccggaggaggcagaaggcctgggaggggcgcagtgctggtcccacctcatggtcctcgcgcagccgcacccctccgagccggagccggtcaactgcgggcagcgcgagggcctgggggagctgcgacccacgggagagaagcccgatccagggtggctctgccagctagactcctacagggcggaagggccgcatttgccgctcggctccctagaagcagcggcgtcggtgactag

SEQ ID NO: 243552 - DNA, 3106 bp, Artificial Sequence
  derived and/or modified sequence
cgggcggaagtccgggttggggtcacctgaccggagagccggctagatatggcgtcctctttgcttgcgggcgagcgattggtgcgtgctttgggccccggcggggagctggagccagagcggctaccccgaaagctgcgggccgagcttgaggccgcgctggggaagaagcacaagggcggtgatagctccagtggcccccaacgcttggtttctttccgtctcatccgggatctgcaccagcatctgagagaaagggattccaaactatacctccatgagctcctagaaggcagtgaaatctatctcccagaggttgtgaagcctccacggaacccagaactagttgcccggctggagaagattaagatacagctggccaatgaggaatataaacggatcacccgcaacgtcacttgtcaggatacaagacatggtgggactctcagcgacctgggaaagcaagtgagatcattgaaggctctggtcatcaccatcttcaatttcattgtcacggtggttgctgccttcgtctgcacttaccttggaagccaatatatcttcacagaaatggcctcgcgggtgctagctgcattgatcgtcgcctctgtggtgggtctggccgagctgtatgtcatggtgcgggcaatggaaggcgagctgggagaactgtaactggtgcttcatcatcaagtctagagaagactttgggggcttcaggctccaattggcagtcaccgactcagtcaacccatcagactttttgtattcagctccagttagtcagaagaccagcccaggccagctgctgtttctgtggggagccctaatcttctgtgaatttccaaagggagcattggaggagattgagataacacatctttaaaacagaaagaactggtcttggtctatcagtacctcttcctgaatctggtacccatctgccttctccagttcattctaaacactgctgggactagggtttttccatcaggagcaaatggaatccaggccttcccagaagtagaccatactgccttgaacttgtccatatgtacaaactgatcaccagctttctccatacatttttaatgcagacctgtaattgagttcagaagcctccaagaaaacagaaaggatcccctttctccagtttgtgctggaagaggagctgatcagagacatcaaataagagaaagatgggttgctagaggatggtagaactggaagcaaggcagctacctttttgcaaaaggaaatggtgttaggccccttttccagaagataagacagactcatagagattaaatgatcactatggtccttcttctgttaaatggagccaaagacgcctatgttgttctgaagtcttgtaatgtttaacttctgagaacttagattagtggtgtgatgatagagtctgtataacgcattgaaaagggtatcaggcttagttatttatccaataaatatttattgtatgcagggtattcctattttaactcctgtgacaacacaaagcatagcgatttccatagttctaactgttcagggtctgctcctcctggtacactctttttggttcactgtatgtactcctgttgtctttttttttttttccaaagcacttttctgttttcataaattatatactcattcactcagtggacacttcctctacaatgtttgccagtttctgttagttgggagaagtgtcagctgtgaaaagaaaaagtaggtggcattttacagtgtttccagtaacctgagctatataaaatttgtgttaaaaagctacactgggccaggtgaggtggctcacacctgtaatcgtagcattttgggaggctgaggcaggcggatcacttgaggttgggagtttaagaccagcatggccaatatagcgaaaccccatctttactaaaaatacaaaaaaattagccaggcgtggtggtacatgcctgtaatcccagcactttgggagaccaaggtgggaggatgcttgagttcaggagtttgagaccagcctgggcaacatggcaaaagcccatctctacaaaaaaacgcagaaattagctgacatggtagcgcacgcctgtagtcccagctactcaggaggctaaggtgggaggatcacttgagcctgggaggcagaggttgcagtaagctgagtaagccaagatcatgctattgcactctagcctggatgacagagtgagaccttgtctcaatgaaaaagcagggggcactgggaggggagaaccaaatgccctatcctccagttctcagcatatagaagggagctctctcatctgctagccactcctgcctcactgtgccatgctttctgtaatgcactctgggtccagggactgcttggcaggaggtgggaagaacaagaagtttagggccttcccagtttcttagggcctgtctggagagggaactagcgtttactgagtttttacgatgtgttacacaccatgtaaagccctttacctacattatttcttataccccaaacagagagcaaataagtatccccattttttagtcacatagagttccagagttgccacagttacatcgcaaagtcaggatttgaatccagtgcagaccgcaaacaccatggttttctctccaaagcagagcagctccagaggtggaggtgactggaatgtcctagattcagtgggaccaggagctgggggtgctagcagaggctctcatctccccagggtcttgtcagtcagagtcctaaacccttcaattaactatccctctaatcccagctgaagcctgggtaatacctcccaccaagaggtatctgtgtggaacctggccctatttagggattaggtgatggagataaatttccatggcaaacggccctcgtccccgttcgtttgcagagcacaacaatccagattaaggtacagagtttgggttttatttggagattagttggtattacaggtgatggtgataccaaaacccaatgctgctatacctgcctccatcccagatctgtcaggttgtctccacagccccacatcagagggcatccaatctgatctttgtgaaaattaaatcaacataagcccca

SEQ ID NO: 243553 - protein, 608 aa, Artificial Sequence
  derived and/or modified sequence
MEMESAAASTRFHQPHMERKMSAMACEIFNELRLEGKLCDVVIKVNGFEFSAHKNILCSCSSYFRALFTSGWNNTEKKVYNIPGISPDMMKLIIEYAYTRTVPITPDNVEKLLAAADQFNIMGIVRGCCEFLKSELCLDNCIGICKFTDYYYCPELRQKAYMFILHNFEEMVKVSAEFLELSVTELKDIIEKDELNVKQEDAVFEAILKWISHDPQNRKQHISILLPKVRLALMHAEYFMNNVKMNDYVKDSEECKPVIINALKAMYDLNMNGPSNSDFTNPLTRPRLPYAILFAIGGWSGGSPTNAIEAYDARADRWVNVTCEEESPRAYHGAAYLKGYVYIIGGFDSVDYFNSVKRFDPVKKTWHQVAPMHSRRCYVSVTVLGNFIYAMGGFDGYVRLNTAERYEPETNQWTLIAPMHEQRSDASATTLYGKVYICGGFNGNECLFTAEVYNTESNQWTVIAPMRSRRSGIGVIAYGEHVYAVGGFDGANRLRSAEAYSPVANTWRTIPTMFNPRSNFGIEVVDDLLFVVGGFNGFTTTFNVECYDEKTDEWYDAHDMSIYRSALSCCVVPGLANVEEYAARRDNFPGLALRDEVKYSASTSTLPV

SEQ ID NO: 243554 - protein, 94 aa, Artificial Sequence
  derived and/or modified sequence
MEMESAAASTRFHQPHMERKMSAMACEIFNELRLEGKLCDVVIKVNGFEFSAHKNILCSCSSYFRALFTSGWNNTEKKVYNIPGISPDMMKLII

SEQ ID NO: 243555 - DNA, 285 bp, Artificial Sequence
  derived and/or modified sequence
atggagatggagagcgccgccgccagcaccagattccaccagccccacatggagagaaagatgagcgccatggcctgcgagatcttcaacgagctgagactggagggcaagctgtgcgacgtggtgatcaaggtgaacggcttcgagttcagcgcccacaagaacatcctgtgcagctgcagcagctacttcagagccctgttcaccagcggctggaacaacaccgagaagaaggtgtacaacatccccggcatcagccccgacatgatgaagctgatcatctag

SEQ ID NO: 243556 - DNA, 1827 bp, Artificial Sequence
  derived and/or modified sequence
atggagatggagtcagcagctgctagcacacgctttcaccagccacacatggagagaaaaatgtctgctatggcctgtgagatctttaacgaactaagactcgagggcaagctgtgcgacgtggtcataaaggttaatggcttcgagttcagcgcccacaaaaacatcttatgttcatgctcctcctatttccgggcactgttcacatcaggctggaataatactgagaagaaagtctacaacatccctgggatttcccctgacatgatgaaattaataattgagtacgcatacaccaggaccgttcctataacaccggacaacgttgaaaaattgctggccgctgcagatcaattcaatatcatgggaattgtgcgcggctgttgtgaattcctcaaaagcgaactgtgcctagacaattgtattggtatctgtaagtttacagactactattattgccccgagctgcggcagaaggcttacatgtttattctgcataatttcgaagaaatggtcaaggtatctgccgagtttttggagttatctgtcactgaactgaaggacatcatagagaaagacgaactgaacgttaagcaggaggacgctgtctttgaagccatcttgaaatggatttcacatgaccctcagaatcggaaacagcacatatccatcttactgcctaaagtaagacttgccttaatgcacgccgagtactttatgaataacgtcaagatgaatgactatgtcaaggatagtgaagagtgcaagccagtgatcattaacgcgttaaaggccatgtacgacctgaacatgaacgggcctagcaacagcgactttacaaatccactgactcgccccagacttccatacgccattttgtttgctataggtggctggagcggcggctcccctacaaacgctatcgaagcatacgatgccagggcagaccgatgggtcaatgtgacgtgcgaggaagaaagcccacgcgcatatcacggagctgcctaccttaaaggctacgtgtacatcattggtggatttgactccgtcgattactttaacagtgtgaagcggtttgatcccgtgaagaaaacctggcatcaggtcgccccaatgcattcccgacgttgctatgtttcagttacagtccttgggaatttcatatacgctatgggcgggttcgatgggtacgttcggctgaataccgccgagagatatgagcccgaaactaatcagtggactctgattgcacccatgcatgagcagcggagcgacgccagcgccacaacactgtacggaaaggtttatatctgtggaggcttcaatggcaacgaatgcctgtttaccgccgaagtgtataacactgagtccaatcagtggactgtaatcgctccaatgagaagccgcagaagtggaattggcgtcatagcctatggcgagcacgtgtacgcggtcggcgggttcgacggcgcaaacaggctccgcagtgccgaggcatactccccagttgctaacacatggagaaccattccaacaatgtttaacccgcgcagtaatttcggtatcgaagttgtggacgatctcctgttcgttgtaggtggctttaacggtttcactacaacctttaatgtggagtgctacgacgagaagacggatgagtggtatgacgctcacgatatgtccatataccgttccgcactcagctgttgcgtagtacctggcctggctaacgtggaagagtatgccgctaggagggataactttcccggtctggccctgcgagatgaggtgaagtacagtgcatccacgagtacactgcctgtttag

SEQ ID NO: 243557 - DNA, 285 bp, Artificial Sequence
  derived and/or modified sequence
atggagatggagtccgctgccgcgtccactagatttcaccagcctcacatggaacgcaaaatgagcgccatggcctgtgagatttttaacgagctgcgtctggaaggcaagctttgcgacgtcgtgattaaggtcaacggcttcgagttctctgcccacaaaaatatcctctgtagctgttctagctattttcgggcgctcttcacgagcggttggaataataccgagaaaaaagtgtacaatataccggggattagccccgatatgatgaagctcattatctag

SEQ ID NO: 243558 - DNA, 1827 bp, Artificial Sequence
  derived and/or modified sequence
atggagatggagagcgctgctgccagcacccgcttccaccagccccacatggagaggaagatgtctgccatggcctgtgagatcttcaatgagctgcggctggagggcaagctgtgtgatgtggtgatcaaggtgaatggatttgagttcagcgcccacaagaacatcctgtgcagctgcagcagctacttccgggccctcttcaccagcggctggaacaacacagagaagaaggtgtacaacatccctggcatcagcccagacatgatgaagctgatcatcgagtatgcctacaccaggacagtgcccatcaccccagacaacgtggagaagctgctggccgctgctgaccagttcaacatcatgggcatcgtgcggggctgctgtgagttcctgaagtctgagctgtgcctggacaactgcatcggcatctgcaagttcacagactactactactgcccagagctgcggcagaaggcctacatgttcatcctgcacaactttgaggagatggtgaaggtgtctgctgagttcctggagctgtctgtgacagagctgaaggacatcatcgagaaggatgagctgaatgtgaagcaggaggatgctgtgtttgaggccatcctgaagtggatcagccatgacccccagaacaggaagcagcacatcagcatcctgctgcccaaggtgcggctggccctgatgcacgccgagtacttcatgaacaacgtgaagatgaatgactatgtgaaggacagcgaggagtgcaagcctgtgatcatcaatgccctgaaggccatgtatgacctgaacatgaatggccccagcaacagcgacttcaccaaccccctgacccggccccggctgccctatgccatcctgtttgccatcggcggctggagcggcggcagccccaccaatgccatcgaggcctatgatgcccgggctgaccgctgggtgaatgtgacctgtgaggaggagagcccccgggcctaccacggggccgcctacctgaagggctacgtgtacatcatcggcggctttgattctgtggactacttcaacagcgtgaagagatttgatcctgtgaagaagacctggcaccaggtggcccccatgcacagccgccgctgctacgtgtctgtgacagtgctgggcaacttcatctatgccatgggcggctttgatggctacgtgcggctgaacacagctgagagatatgagcctgagaccaaccagtggaccctcatcgcccccatgcatgagcagaggagtgatgccagcgccaccaccctgtatggcaaggtgtacatctgtggcggcttcaatggaaatgaatgtctcttcaccgctgaggtgtacaacacagagagcaaccagtggacagtgattgcccccatgaggagcagaagaagtggcattggagtcatcgcctacggggagcacgtgtatgctgtgggcggctttgatggagccaaccggctgcggtctgctgaggcctacagccctgtggccaacacctggaggaccatccccaccatgttcaaccccaggagcaactttggcatcgaggtggtggatgacctgctgtttgtggtgggcggcttcaacggcttcaccaccaccttcaacgtggagtgctatgatgagaagacagatgagtggtatgatgcccatgacatgagcatctacagaagtgccctgagctgctgcgtggtgcccggcctggccaacgtggaggagtatgctgcccggcgggacaacttccctggcctggccctgagagatgaggtgaagtacagcgccagcaccagcaccctgcctgtgtag

SEQ ID NO: 243559 - DNA, 285 bp, Artificial Sequence
  derived and/or modified sequence
atggagatggagagcgctgctgccagcacccgcttccaccagccccacatggagaggaagatgtctgccatggcctgtgagatcttcaatgagctgcggctggagggcaagctgtgtgatgtggtgatcaaggtgaatggatttgagttcagcgcccacaagaacatcctgtgcagctgcagcagctacttccgggccctcttcaccagcggctggaacaacacagagaagaaggtgtacaacatccctggcatcagcccagacatgatgaagctgatcatctag

SEQ ID NO: 243560 - DNA, 1827 bp, Artificial Sequence
  derived and/or modified sequence
atggagatggagagcgccgccgccagcacccggttccaccagccccatatggagcggaagatgtctgcaatggcttgtgagatctttaatgaactcaggctggagggtaaactctgcgacgtggtgatcaaggtgaacggcttcgagttttcagcccacaagaatatcctgtgctcttgtagctcctatttcagagcattgttcaccagcggatggaataatactgagaaaaaagtgtataacattccaggaatctctccggatatgatgaagctgataatcgaatacgcctacactcgcacagttcctataacaccggacaatgtcgagaaacttctggcggctgcagatcagttcaatatcatggggattgtccgcggatgttgcgagtttttgaaatccgaactctgcctggacaattgcatcggcatttgcaagttcacggattattactattgcccagagcttagacagaaggcctatatgttcattctacataattttgaggagatggtaaaggtaagcgcagaatttttggaattgagcgtgacagagctcaaggacatcatcgagaaagacgaactgaacgttaagcaagaggatgccgtgttcgaagccatcttaaaatggataagccatgatcctcagaaccggaaacagcatattagcatcctgctgcccaaggtgcgtctggcgttgatgcatgccgagtacttcatgaataatgtaaaaatgaacgactatgttaaggattctgaggaatgtaagcccgtaattataaacgcgcttaaagccatgtacgacttgaacatgaacggaccaagcaactcagatttcaccaacccacttacacgacctcgactaccttacgccatcctgttcgcaatcggaggatggagtgggggctcccccacaaacgccattgaagcatatgacgcgagagctgacaggtgggtgaacgttacatgcgaagaggaatctccgcgagcgtatcacggagcagcctacttaaaggggtatgtttatataattggcgggtttgatagcgtggactacttcaattctgttaagcgatttgaccccgttaagaagacctggcaccaagtggcaccgatgcatagccgcaggtgctacgtgagcgtaactgttttgggtaacttcatttacgcaatggggggcttcgatggttacgttaggcttaacactgctgagagatacgaaccagagacaaatcaatggaccctgatagcccccatgcacgaacagaggtccgacgcctccgccacaactctatacggcaaggtttacatttgcggtgggttcaacggaaacgaatgcttgtttaccgcggaagtatataacaccgagagtaaccagtggacggtcatagctcccatgcgctctaggcgctctggaatcggcgtgatcgcctacggagagcacgtctatgctgtgggggggttcgacggagccaaccggctacggtccgccgaggcctattcccccgtggctaatacctggcggactatccccacgatgttcaaccctcggagtaactttggcattgaagtggttgacgacctcctgttcgtggtgggcggtttcaacggctttactactacattcaatgtggagtgctacgacgagaaaaccgacgagtggtacgatgcacatgacatgtctatataccgaagcgcactgagctgttgcgtcgtaccgggactcgccaacgtggaagaatatgccgctcggagagataatttccccggccttgccctgcgggacgaggtgaagtattcagcaagtacctcaaccctgcccgtgtag

SEQ ID NO: 243561 - DNA, 285 bp, Artificial Sequence
  derived and/or modified sequence
atggagatggagagcgccgccgccagcacccggttccaccagccccatatggaacgcaagatgagtgctatggcctgtgaaattttcaacgagctgcgcctggagggcaaactctgtgacgtggttatcaaagttaacgggttcgagttcagcgcacacaagaacatcctttgttcctgctcttcctacttcagagcccttttcaccagtggctggaataacaccgagaaaaaggtctataatatccccggcatttctcctgacatgatgaaattgattatctag

SEQ ID NO: 243562 - DNA, 1827 bp, Artificial Sequence
  derived and/or modified sequence
atggagatggaatcagcagctgccagtacgcggtttcaccagccgcacatggaaaggaaaatgagtgcaatggcgtgcgagatattcaatgaattgagactggagggcaagttgtgcgacgtggtcattaaggttaacgggttcgaatttagcgctcacaaaaacatcctctgctcctgtagctcctacttcagagccctgttcacatccggctggaataatactgaaaaaaaggtgtataatattcccggtataagccccgatatgatgaaattaattatcgaatacgcctacacccgcacagtgcctataacacccgacaacgtggagaaactgttagcggcagctgatcagtttaacattatgggcattgtcagagggtgttgtgagttcctgaagtctgagctctgtttggataattgcataggtatttgcaagttcaccgattattattactgccctgagttgagacagaaggcctacatgtttattctgcataatttcgaggaaatggtgaaagtgtctgctgaatttctggaactaagtgtaaccgagctaaaggacattatcgaaaaggacgagcttaacgtaaagcaagaagatgcagtttttgaggcgattctcaagtggatcagccatgatccacagaaccggaagcagcacataagtatcctactgcccaaagtacgtctggccctgatgcatgccgagtactttatgaataatgttaagatgaacgattatgttaaagacagtgaagaatgcaaaccagtcataataaatgccttgaaggcaatgtacgatctgaacatgaatggtccctccaatagcgactttaccaaccctttgacccgtccacgcctcccctatgcaattttgttcgctatcggcggttggtcgggcggaagccccactaatgccattgaggcctacgatgctcgcgcagaccgctgggtcaacgttacttgtgaggaagaatctcccagagcatatcatggcgctgcatacttaaagggctatgtctacataatcggaggctttgatagcgttgattactttaattctgtaaagcgattcgatccagttaaaaaaacctggcaccaagttgccccaatgcatagccggcgttgttacgtttctgtcacagtccttgggaacttcatctacgctatgggcggtttcgacggatatgtgaggttgaataccgccgagagatacgagcccgagactaatcagtggactcttatagcacctatgcacgagcagaggagcgacgcttccgccactaccctgtatggcaaggtgtacatatgtggcggtttcaatggcaacgaatgtctttttaccgccgaggtttacaacaccgagtccaaccagtggaccgttatcgccccaatgcgtagccggcgatcaggcatcggcgtcatcgcctacggcgaacacgtgtacgcggttggaggttttgacggggcaaataggctcagatccgccgaggcctacagccctgtggccaacacttggcgtacaatccctacaatgttcaaccctcgcagtaattttggaattgaagttgttgacgatctgctgtttgtcgttgggggtttcaacggctttactactacattcaacgttgagtgctatgatgagaagaccgatgaatggtacgacgcgcatgatatgagcatataccgatccgcactatcatgctgtgtggttccgggattggcaaatgtcgaagagtacgccgcaagacgcgataatttcccaggactcgccttgagggatgaggtcaagtattctgctagtaccagcaccctgcctgtatag

SEQ ID NO: 243563 - DNA, 285 bp, Artificial Sequence
  derived and/or modified sequence
atggagatggagtcagcagccgcttcaacaaggttccaccaaccgcatatggagcggaagatgagtgctatggcgtgtgaaattttcaatgagctgagattggaaggaaagctttgcgacgtagtgataaaggtgaatggcttcgagttttctgcccacaagaacattctgtgcagctgttctagctacttccgtgcacttttcacaagcggatggaacaataccgagaaaaaagtctacaatataccagggatctcacccgacatgatgaagctgattatttag

SEQ ID NO: 243564 - DNA, 558 bp, Artificial Sequence
  derived and/or modified sequence
gaaatttgggttttaggacaggcgaaccaacccgctctccttcaagctcccggccatttcttggggcagagagctaggaggggtccgcggcagagcaaagcgggaaggcccaatgggcaggaagcctctccagccgcccccagcccggccggcccccgcacgccccagagcctcaattgacttggatttccttgagttcggtgtctagggagccaagtgttgggctgtggaaggtagatgaatgctccagggatagagacctgtatcagggtgccatggagatggagagcgcggcggcctccacacgtttccaccagcctcacatggagaggaagatgagtgcgatggcctgtgagatcttcaacgagcttagactagagggcaagctctgcgacgtggtcatcaaggtcaatggctttgagttcagtgcccataagaacatcctctgtagctgcagttcctactttagagctttgtttacaagtggctggaacaacactgaaaagaaggtatacaacatccctggcatttctcccgacatgatgaagctaatcattg

SEQ ID NO: 243565 - DNA, 2057 bp, Artificial Sequence
  derived and/or modified sequence
actgcagggccaggattctggaacttgggttgcctgatagaccctatacaaaagatgtagtagggaaaaggagcgacagctggctaaaggggccccccacaaccctccccgacaccctaggaaagcagcctctctccgctgtcccagggtgccatggagatggagagcgcggcggcctccacacgtttccaccagcctcacatggagaggaagatgagtgcgatggcctgtgagatcttcaacgagcttagactagagggcaagctctgcgacgtggtcatcaaggtcaatggctttgagttcagtgcccataagaacatcctctgtagctgcagttcctactttagagctttgtttacaagtggctggaacaacactgaaaagaaggtatacaacatccctggcatttctcccgacatgatgaagctaatcattgagtatgcatacacccggaccgtgcctatcacaccggacaatgtggagaaactgcttgctgctgcagaccagtttaacatcatgggtatcgtcaggggttgctgcgagttcctcaagtcagagctgtgcttggataattgtatcggcatctgtaagttcacggactactactactgtcctgagctgaggcagaaggcctacatgttcatactgcacaactttgaggagatggtgaaagtctcggcagaatttttagagctctcggtcactgaacttaaggatatcattgagaaagatgagctcaatgtcaaacaggaagatgctgtatttgaggccattttaaagtggatttctcatgacccccaaaatagaaagcagcacatttcaattttgcttcctaaggttcgcctggccctaatgcatgctgagtacttcatgaacaatgttaagatgaatgactatgtcaaagacagtgaggaatgcaaaccagtcatcattaatgccctaaaggccatgtatgacctcaacatgaatggaccctctaattctgatttcaccaacccactcaccagaccacgcttgccctatgccatcctctttgcaattggtggctggagtggtgggagccccaccaatgccattgaggcatatgacgctcgggcagacagatgggtgaatgttacttgtgaggaagagagtccccgtgcctaccatggggcagcctatttgaaaggctatgtgtatatcattggggggtttgatagtgtagactatttcaatagtgttaagcgttttgacccagtcaagaaaacttggcatcaggtggccccgatgcactccagacgttgctatgtcagtgtgacagtcctcggcaattttatttatgccatgggaggatttgatggctacgtgcgtctaaacactgctgaacgttatgagccagagaccaatcaatggacactcatcgcccccatgcacgaacagaggagtgatgcaagcgccacaacactttatgggaaggtctacatatgtggtgggtttaatggaaacgagtgcctgttcacagcagaagtgtataacactgaaagtaatcagtggacagtcatagcacccatgagaagcaggaggagtggaataggcgtgattgcttatggagaacatgtatatgcggtaggtggctttgatggagctaatcgacttaggagtgccgaagcctacagccctgtggctaacacttggcgcacaatccccactatgtttaatcctcgtagcaattttggcatcgaggtggtggatgacctcttgtttgtggtgggtggctttaatggttttaccaccacctttaatgttgagtgctatgatgaaaagaccgatgagtggtatgatgctcatgacatgagtatataccgcagtgctctgagctgctgtgtagtaccagggctggccaatgttgaggaatatgcagctagacgggacaacttcccaggattagcactgcgagatgaagtaaaatattctgcttcgacaagtaccctacctgtatgagcctcttcatttagctaataaaaagtctaagcaataagaattaattctttttttaaaaaaatgcagtgtttaaactt

SEQ ID NO: 243566 - DNA, 1827 bp, Artificial Sequence
  derived and/or modified sequence
atggagatggagagcgccgccgccagcaccagattccaccagccccacatggagagaaagatgagcgccatggcctgcgagatcttcaacgagctgagactggagggcaagctgtgcgacgtggtgatcaaggtgaacggcttcgagttcagcgcccacaagaacatcctgtgcagctgcagcagctacttcagagccctgttcaccagcggctggaacaacaccgagaagaaggtgtacaacatccccggcatcagccccgacatgatgaagctgatcatcgagtacgcctacaccagaaccgtgcccatcacccccgacaacgtggagaagctgctggccgccgccgaccagttcaacatcatgggcatcgtgagaggctgctgcgagttcctgaagagcgagctgtgcctggacaactgcatcggcatctgcaagttcaccgactactactactgccccgagctgagacagaaggcctacatgttcatcctgcacaacttcgaggagatggtgaaggtgagcgccgagttcctggagctgagcgtgaccgagctgaaggacatcatcgagaaggacgagctgaacgtgaagcaggaggacgccgtgttcgaggccatcctgaagtggatcagccacgacccccagaacagaaagcagcacatcagcatcctgctgcccaaggtgagactggccctgatgcacgccgagtacttcatgaacaacgtgaagatgaacgactacgtgaaggacagcgaggagtgcaagcccgtgatcatcaacgccctgaaggccatgtacgacctgaacatgaacggccccagcaacagcgacttcaccaaccccctgaccagacccagactgccctacgccatcctgttcgccatcggcggctggagcggcggcagccccaccaacgccatcgaggcctacgacgccagagccgacagatgggtgaacgtgacctgcgaggaggagagccccagagcctaccacggcgccgcctacctgaagggctacgtgtacatcatcggcggcttcgacagcgtggactacttcaacagcgtgaagagattcgaccccgtgaagaagacctggcaccaggtggcccccatgcacagcagaagatgctacgtgagcgtgaccgtgctgggcaacttcatctacgccatgggcggcttcgacggctacgtgagactgaacaccgccgagagatacgagcccgagaccaaccagtggaccctgatcgcccccatgcacgagcagagaagcgacgccagcgccaccaccctgtacggcaaggtgtacatctgcggcggcttcaacggcaacgagtgcctgttcaccgccgaggtgtacaacaccgagagcaaccagtggaccgtgatcgcccccatgagaagcagaagaagcggcatcggcgtgatcgcctacggcgagcacgtgtacgccgtgggcggcttcgacggcgccaacagactgagaagcgccgaggcctacagccccgtggccaacacctggagaaccatccccaccatgttcaaccccagaagcaacttcggcatcgaggtggtggacgacctgctgttcgtggtgggcggcttcaacggcttcaccaccaccttcaacgtggagtgctacgacgagaagaccgacgagtggtacgacgcccacgacatgagcatctacagaagcgccctgagctgctgcgtggtgcccggcctggccaacgtggaggagtacgccgccagaagagacaacttccccggcctggccctgagagacgaggtgaagtacagcgccagcaccagcaccctgcccgtgtag

SEQ ID NO: 243567 - protein, 726 aa, Artificial Sequence
  derived and/or modified sequence
MLLPRSVSSERAPGVPEPEELWEAEMERLRGSGTPVRGLPYAMMDKRLIWQLREPAGVQTLRWQRWQRRRQTVERRLREAAQRLARGLGLWEGALYEIGGLFGTGIRSYFTFLRFLLLLNLLSLLLTASFVLLPLVWLRPPDPGPTLNLTLQCPGSRQSPPGVLRFHNQLWHVLTGRAFTNTYLFYGAYRVGPESSSVYSIRLAYLLSPLACLLLCFCGTLRRMVKGLPQKTLLGQGYQAPLSAKVFSSWDFCIRVQEAATIKKHEISNEFKVELEEGRRFQLMQQQTRAQTACRLLSYLRVNVLNGLLVVGAISAIFWATKYSQDNKEESLFLLLQYLPPGVIALVNFLGPLLFTFLVQLENYPPNTEVNLTLIWCVVLKLASLGMFSVSLGQTILCIGRDKSSCESYGYNVCDYQCWENSVGEELYKLSIFNFLLTVAFAFLVTLPRRLLVDRFSGRFWAWLEREEFLVPKNVLDIVAGQTVTWMGLFYCPLLPLLNSVFLFLTFYIKKYTLLKNSRASSRPFRASSSTFFFQLVLLLGLLLAAVPLGYVVSSIHSSWDCGLFTNYSAPWQVVPELVALGLPPIGQRALHYLGSHAFSFPLLIMLSLVLTVCVSQTQANARAIHRLRKQLVWQVQEKWHLVEDLSRLLPEPGPSDSPGPKYPASQASRPQSFCPGCPCPGSPGHQAPRPGPSVVDAAGLRSPCPGQHGAPASARRFRFPSGAEL

SEQ ID NO: 243568 - DNA, 2181 bp, Artificial Sequence
  derived and/or modified sequence
atgctgctgcccagaagcgtgagcagcgagagagcccccggcgtgcccgagcccgaggagctgtgggaggccgagatggagagactgagaggcagcggcacccccgtgagaggcctgccctacgccatgatggacaagagactgatctggcagctgagagagcccgccggcgtgcagaccctgagatggcagagatggcagagaagaagacagaccgtggagagaagactgagagaggccgcccagagactggccagaggcctgggcctgtgggagggcgccctgtacgagatcggcggcctgttcggcaccggcatcagaagctacttcaccttcctgagattcctgctgctgctgaacctgctgagcctgctgctgaccgccagcttcgtgctgctgcccctggtgtggctgagaccccccgaccccggccccaccctgaacctgaccctgcagtgccccggcagcagacagagcccccccggcgtgctgagattccacaaccagctgtggcacgtgctgaccggcagagccttcaccaacacctacctgttctacggcgcctacagagtgggccccgagagcagcagcgtgtacagcatcagactggcctacctgctgagccccctggcctgcctgctgctgtgcttctgcggcaccctgagaagaatggtgaagggcctgccccagaagaccctgctgggccagggctaccaggcccccctgagcgccaaggtgttcagcagctgggacttctgcatcagagtgcaggaggccgccaccatcaagaagcacgagatcagcaacgagttcaaggtggagctggaggagggcagaagattccagctgatgcagcagcagaccagagcccagaccgcctgcagactgctgagctacctgagagtgaacgtgctgaacggcctgctggtggtgggcgccatcagcgccatcttctgggccaccaagtacagccaggacaacaaggaggagagcctgttcctgctgctgcagtacctgccccccggcgtgatcgccctggtgaacttcctgggccccctgctgttcaccttcctggtgcagctggagaactacccccccaacaccgaggtgaacctgaccctgatctggtgcgtggtgctgaagctggccagcctgggcatgttcagcgtgagcctgggccagaccatcctgtgcatcggcagagacaagagcagctgcgagagctacggctacaacgtgtgcgactaccagtgctgggagaacagcgtgggcgaggagctgtacaagctgagcatcttcaacttcctgctgaccgtggccttcgccttcctggtgaccctgcccagaagactgctggtggacagattcagcggcagattctgggcctggctggagagagaggagttcctggtgcccaagaacgtgctggacatcgtggccggccagaccgtgacctggatgggcctgttctactgccccctgctgcccctgctgaacagcgtgttcctgttcctgaccttctacatcaagaagtacaccctgctgaagaacagcagagccagcagcagacccttcagagccagcagcagcaccttcttcttccagctggtgctgctgctgggcctgctgctggccgccgtgcccctgggctacgtggtgagcagcatccacagcagctgggactgcggcctgttcaccaactacagcgccccctggcaggtggtgcccgagctggtggccctgggcctgccccccatcggccagagagccctgcactacctgggcagccacgccttcagcttccccctgctgatcatgctgagcctggtgctgaccgtgtgcgtgagccagacccaggccaacgccagagccatccacagactgagaaagcagctggtgtggcaggtgcaggagaagtggcacctggtggaggacctgagcagactgctgcccgagcccggccccagcgacagccccggccccaagtaccccgccagccaggccagcagaccccagagcttctgccccggctgcccctgccccggcagccccggccaccaggcccccagacccggccccagcgtggtggacgccgccggcctgagaagcccctgccccggccagcacggcgcccccgccagcgccagaagattcagattccccagcggcgccgagctgtag

SEQ ID NO: 243569 - DNA, 2181 bp, Artificial Sequence
  derived and/or modified sequence
atgctcctgcccagaagtgtttcctccgagcgtgcccccggcgtaccagagcccgaggagctgtgggaagccgaaatggagaggttaaggggcagcggcactcctgttaggggtctaccttacgccatgatggataagcgcctgatttggcagctcagggaacctgcgggcgtgcagaccctgagatggcagcgctggcagcgtaggagacagaccgtggaacggcgactgcgcgaggcagcccaacggctggctcgggggttaggcctgtgggagggcgccttatacgagattggaggattattcgggacaggcattagatcttacttcacttttctccgttttctgctgctgttaaacctactatcacttttactcacggccagcttcgtgctcctccctctggtgtggctgaggccacctgaccctggcccaactttgaacttaactctccaatgccctggtagccgacagtccccccctggagtcctacggtttcacaaccaactgtggcacgtgctgacaggccgggcttttactaacacatacttgttctacggtgcatacagagtcggtccagagtcctcatcagtgtattccattaggttagcctatctgctaagccctcttgcctgtctgctcttgtgcttctgtggcacacttcgtaggatggtcaaggggcttccacaaaaaaccctgctgggtcaaggctatcaggcacccctatctgccaaggtgttttcgtcctgggacttttgcatcagagtgcaggaagcggctacaattaagaaacatgaaatttccaatgagtttaaagtggagctggaggaaggcagaagattccagttgatgcagcagcaaactagggcacagaccgcttgcaggctgctgtcctacctgcgagtaaatgtgctcaacggattgctcgtggtaggagccatcagcgccattttctgggctacaaagtatagccaggacaataaagaggagtccctcttcctgctgctgcagtacttacctcccggggtcatcgctctggtcaattttcttggtccactgctcttcacgttccttgtacaactggagaattaccccccaaacaccgaagtaaacttgaccctcatttggtgtgtcgtcctgaagctcgcatctttgggaatgttttcggtttcgcttggccaaaccatcctgtgtatcggaagggacaagtcttcctgtgagtcctacgggtataacgtatgtgactatcagtgctgggaaaactccgtgggggaagagctgtacaagctgtccatttttaactttctcctcactgtggcattcgccttcctggtgaccttgccccggagacttttggtagaccggttttctggccggttctgggcttggctggagcgcgaagaattcctggttcccaaaaatgtcctcgacatagttgcaggtcagacagtaacctggatggggctgttctactgccccttactaccgctcctgaattccgttttcctctttctcactttctatatcaaaaagtacactctattgaagaactcccgagcctctagtagaccattcagagcctcatcctctacttttttctttcagttggtgcttcttctgggccttttgctagctgctgtgccgctgggctacgtcgtgtcttccattcatagcagctgggactgcggactgtttaccaattattctgctccttggcaggtggtccccgaactcgtcgctctgggcttaccaccaattgggcagcgcgcgctgcactatcttggctcccacgcgtttagcttccctctgctcattatgctgagtctggtgctgacggtgtgcgtgagccagacgcaggccaacgccagggcgatccacaggcttcgcaaacagcttgtatggcaagtgcaggagaagtggcatcttgtcgaggacctgagcaggctgctccccgaacccgggccatctgactcacccggccctaagtatccggccagccaagcaagcagacctcaatcattctgcccaggctgcccttgtcccggttctccaggccaccaggctccaagacccggaccgtctgtggttgatgctgccgggctgcgctcaccgtgcccaggtcagcatggagctccggcctcagcgcgcagatttaggttcccgtccggggcagagctgtag

SEQ ID NO: 243570 - DNA, 2181 bp, Artificial Sequence
  derived and/or modified sequence
atgctgctgcccaggtctgtgtcctctgagcgggcccctggggtgcctgagcctgaggagctgtgggaggccgagatggagcggctgcggggcagcggcacccctgtgcggggcctgccctatgccatgatggacaagaggctcatctggcagctgcgggagcctgctggggtgcagaccctgcgctggcagcgctggcagaggcggcggcagacagtggagcggcggctgcgggaggccgcccagaggctggcccggggcctgggcctgtgggagggcgccctgtatgagatcggcggcctgtttggcaccggcatccgcagctacttcaccttcctgcgcttcctgctgctgctgaacctgctgagcctgctgctgacagccagctttgtgctgctgcccctggtgtggctgcggcccccagaccccggccccaccctgaacctgaccctgcagtgccccggcagccggcagagccccccaggagtgctgcgcttccacaaccagctgtggcacgtgctgaccggccgggccttcaccaacacctacctgttctacggggcctacagagtgggccctgagagcagctctgtgtacagcatccggctggcctacctgctgagccccctggcctgcctgctgctgtgcttctgtggcaccctgcggaggatggtgaagggcctgccccagaagaccctgctgggccagggctaccaggcccccctgagcgccaaggtgttcagctcctgggacttctgcatccgggtgcaggaggccgccaccatcaagaagcatgagatcagcaatgagttcaaggtggagctggaggagggccgccgcttccagctgatgcagcagcagacccgggcccagacagcctgccgcctgctgagctacctgcgggtgaatgtgctgaatggcctgctggtggtgggcgccatcagcgccatcttctgggccaccaagtacagccaggacaacaaggaggagagcctcttcctgctgctgcagtacctgcccccaggagtcatcgccctggtgaacttcctgggccccctgctcttcaccttcctggtgcagctggagaactacccacccaacacagaggtgaacctgaccctcatctggtgtgtggtgctgaagctggccagcctgggcatgttttctgtgtccctgggccagaccatcctgtgcatcggccgggacaagagcagctgtgagagctatggctacaacgtgtgtgactaccagtgctgggagaacagcgtgggggaggagctgtacaagctgagcatcttcaacttcctgctgactgtggcctttgccttcctggtgaccctgccccggcggctgctggtggaccgcttcagcggccgcttctgggcctggctggagcgggaggagttcctggtgcccaagaatgtgctggacatcgtggccggccagacagtgacctggatgggcctcttctactgccccctgctgcccctgctgaacagcgtcttcctgttcctgaccttctacatcaagaagtacaccctgctgaagaacagccgggccagcagccggcccttccgggccagcagcagcaccttcttcttccagctggtgctgctgctgggcctgctgctggccgctgtgcccctgggctacgtggtgagcagcatccacagctcctgggactgtggcctcttcaccaactacagcgccccctggcaggtggtgcctgagctggtggccctgggcctgccccccatcggccagagggccctgcactacctgggcagccacgccttctccttccccctgctgatcatgctgagcctggtgctgactgtgtgtgtgtcccagacccaggccaatgcccgggccatccaccggctgaggaagcagctggtgtggcaggtgcaggagaagtggcacctggtggaggacctgagccggctgctgcctgagcccggccccagcgacagccctggccccaagtacccagccagccaggccagccggccccagagcttctgccccggctgcccctgccccggcagccctggccaccaggcccccaggcctggccccagcgtggtggatgctgctggcctgcggagcccctgccccggccagcacggggccccagccagcgcccggcgcttccgcttccccagcggggctgagctgtag

SEQ ID NO: 243571 - DNA, 2181 bp, Artificial Sequence
  derived and/or modified sequence
atgctgctgccccggagcgtgagcagcgagcgggcccccggcgtgcctgagcccgaagaactgtgggaggccgaaatggagcggctgaggggatcaggaactcctgtcagggggttaccatatgccatgatggacaagagactcatctggcaattgagggagcccgctggcgtgcaaacacttcgttggcagcggtggcagcgtcgccgccagaccgtcgagcggagattacgggaagccgctcaacgtctcgcccgcgggctcggcctctgggaaggggcactgtatgagatcggcggcctgttcgggaccggcatacggtcctactttactttcctgaggtttctcctcctgcttaacctgctgtcactgctgctgaccgcctctttcgtgctcctccccttagtctggctgcggccccctgaccccggacctactctaaaccttaccctccagtgcccaggatcacgacagtccccccccggggtgctgcggttccacaatcagctatggcacgtgttgacgggacgagccttcactaatacgtatctgttttatggagcctaccgcgtgggtccagagtcatcttcagtgtactctatcaggctagcttacctgctatcgccattagcctgcttgcttttgtgtttctgtggaactctaagaagaatggttaagggtctgccccagaagacactcctggggcagggctaccaggcaccgctgtccgctaaagtcttttcatcttgggatttttgtatcagggtgcaggaagctgccactattaaaaaacacgagatctcgaatgagttcaaagtcgagctcgaggagggtaggaggttccaactcatgcaacagcagaccagagctcagacagcttgccggctgctcagctatttaagggttaacgtcctgaacgggctgttggttgtgggagccataagtgctatcttttgggctacaaagtactctcaggacaataaagaagagagcctttttctgctattgcagtatctccctcccggggtgattgccctggtgaattttctcggaccgcttcttttcacgttccttgtgcagctggagaattacccacctaacacagaagtgaacctgacactcatttggtgtgttgtattaaagcttgcctcactcggcatgttttccgtctcactcggacagacaattctctgtataggacgggacaagtcatcttgcgagagttacggctacaatgtgtgcgattatcagtgttgggagaactccgtcggcgaggaactttataagctgtccatctttaatttcctcctcacagttgcattcgcctttctggtgaccttaccacgccgcctgctggtcgatcgctttagcgggaggttttgggcttggcttgagagggaggagtttctcgtgcctaaaaacgtcctcgatatcgttgcaggccaaacagtgacctggatgggcttattctactgtccactgctgcccctgctcaattccgtgtttttgttcctcactttttacattaagaagtataccctccttaagaatagcagggcgtcaagccgccccttcagggccagttcatccacattcttttttcagttagtgttacttctcggcctcttactcgcagctgtgccactgggctacgtggtgtccagcatccatagcagttgggattgtggcctgttcaccaactattccgcgccctggcaggtggtccctgaactcgtggcgttagggttgccccccattggccagcgggctctccactacctaggatcacatgcattctcctttccattactgatcatgttgtcgctcgtgctgacagtgtgcgtgtcacagacacaggccaatgcccgggcaattcaccgcctgagaaaacaactcgtctggcaggtccaagagaaatggcacctggtggaagatctttcaaggctcttgcctgaaccgggcccttcggatagtccggggccaaagtatccggcatcccaggcctcgcggcctcaaagcttttgtccgggctgcccatgtcctggcagtcctgggcatcaggccccccgtcccggaccttccgtcgttgacgccgccgggctgcgatccccctgccccggacagcatggcgcacctgccagtgccaggagattccgattccccagtggagcggaactatag

SEQ ID NO: 243572 - DNA, 2181 bp, Artificial Sequence
  derived and/or modified sequence
atgttgctgccgaggtcagtgtcttctgagcgcgcacccggtgtgccagagcccgaggagttgtgggaagctgagatggaaaggctgagggggagtggtactccagtgcggggactgccatacgctatgatggataagcgattgatttggcagctgagggaacccgcaggcgtgcagaccctacggtggcagcgctggcagcggagacgccagaccgtggagcgacggctccgggaggctgcacagagactggcgcgaggactgggtctgtgggaaggagctctatacgaaatcggaggcctgttcgggacaggtatcaggagctatttcacttttctgagattccttctcctcctaaacttactctcactcttgctcaccgcctcttttgtactgctccccttagtatggctgagacctcctgacccaggacccacactcaatctgaccctgcagtgtcccggatccaggcaatcgccccctggtgttctacggtttcacaaccagttgtggcacgtgctgacaggacgggcttttacgaacacctatctgttttatggagcctacagagttggaccggagagtagctccgtctatagtattaggctggcctacctgctgtctccgctcgcatgcctgctcctgtgtttctgcgggacccttcgcagaatggtaaaaggtctgccccaaaaaaccctgcttggtcaggggtaccaggcccctctttctgctaaggtcttttcatcgtgggatttttgtatcagagtgcaagaagctgctactattaagaagcatgaaatatcaaacgagtttaaggtggagctcgaggagggacgacggttccaacttatgcagcagcagacccgggctcagactgcttgtagactgctcagctacctgagggttaatgttcttaacggcttgctagtcgtcggagctatttccgctattttttgggccactaagtacagccaggacaataaggaagagtccctattcctcttgctgcagtatctgcccccaggtgtgatagcgctggtgaacttcctgggcccactactgtttaccttcctggtgcagctggagaactatccccctaatactgaggtgaatctgacactgatttggtgcgtggtgctgaaacttgcctcattggggatgttctcagtgtcgctggggcagacaatcttatgtatcgggcgtgataagtcgagctgcgagtcttatgggtataatgtgtgtgactaccaatgctgggagaactccgtgggcgaggaactctacaagctgtctatttttaactttctccttacagtcgcattcgcattcctagtaactttgccacggagactgctggtggaccgtttcagtggtaggttttgggcttggctggaacgagaggagtttctggttcctaagaacgtgctggatatcgttgcaggccaaacagttacatggatgggcttgttctactgtccactgttaccacttttgaatagcgtgttcctattcctgaccttttacataaaaaagtataccctcctcaagaactcgagagcgagtagtcgcccatttcgcgcttctagcagtaccttctttttccagctcgtgctgctgcttggtctgttacttgccgctgtgccgctaggatatgtcgtttctagcatccatagcagttgggattgcgggttattcacaaactactcagccccatggcaagtggtgcccgaactggttgcactcggcctgccccctatcgggcaaagggcgctacattatctcggatctcatgccttttcctttccccttttaatcatgctgtcacttgtcctcacagtgtgcgtgtcacagactcaggcgaatgccagagctattcacagactccgcaaacaactggtgtggcaggtgcaagagaagtggcacctggttgaagacctatcacgactgttgcctgaacctggcccaagtgattctcccggacccaagtatccagcttcacaggccagcaggccccagtcgttttgtcctggatgcccatgcccgggaagtcccggtcatcaagcgcctcgtcctggcccttctgtggtggacgccgctggtttgcgcagtccctgtccaggccaacacggcgctcctgcttccgctcggcgtttccgatttccaagcggcgctgagctgtag

SEQ ID NO: 243573 - DNA, 4419 bp, Artificial Sequence
  derived and/or modified sequence
caccaccctgcctggcttggcaggagtcgtctgagaaggggactcctccagggacttggtccctaggtccccagatggggagactgaggccgtggctgtgtgtccctctgagagttggagcggggctgggcccgaattcgaccgcagcaggattctctctcatttctgagccccggaggtggcagagcggcagacccgggcaagtgaaccctagggctgcaggagcccaggccccgacgccggcgcagaggggacggaagggcccgcccccagcccagcgtgcacagaggccatagccaaggccttaaggctcatccaaccggggactcatatcccccccaccggcagcccggcgccccagcctctacccgtgcccgccgagatgctgctgccgcggtcggtgtcatcggagcgggcccctggggtgccggagccggaggagctgtgggaggcagagatggagcggctgcgcggctctgggacgcccgtgcgcgggctgccctatgccatgatggacaagcgcctcatctggcagctgcgggagcccgcgggggtgcagaccttgcgctggcagcggtggcagcgccggcggcagacggtggaaaggcgcctgcgggaggcagcgcagcggctggcccggggccttgggctctgggagggggcgctctacgagatcgggggcctcttcggcacaggaattcggtcctacttcaccttcctccgcttcctgctgctactcaacctgctgagcctgctgctcaccgcaagcttcgtgctgctgcccctggtctggctccgcccccctgacccaggccccaccctgaacttgaccctccagtgccctggtagccgccagtccccgcctggcgttttgaggttccacaatcaactttggcatgttttgactggcagggccttcaccaacacctatctcttctacggtgcgtaccgagtggggccggagagcagctccgtgtacagcatccgcctggcctacctcctcagcccgctggcctgcctgctcctctgcttctgtgggactctgcggcggatggtgaaggggctgccgcagaagactctgctgggtcagggctatcaggcgcctctcagcgccaaggtcttctcctcatgggacttctgcatccgggtgcaggaagcagccaccatcaagaagcatgagatcagcaacgagttcaaggtggagctggaggagggccgtcgcttccagctgatgcagcagcagacccgggcccagacggcctgccgcctgctctcctacctgcgggtcaacgtactcaacgggctcctggtggttggggccatcagcgccatcttctgggctaccaagtactcacaggacaacaaggaggagtccctgtttctgctgctccagtacctgccccctggggtcatcgccctggtcaacttcctgggtcccctgctgttcacatttctggtccagctggagaactaccctcccaacacggaggtcaacctcactctgatctggtgcgtggtgctgaagctggccagcttggggatgttctccgtctccctgggtcagaccatactgtgcattggcagagacaagagcagctgtgagtcctacggctacaacgtttgtgactatcagtgctgggagaactccgtgggggaggagctgtacaagctgagtatcttcaacttcctcctcaccgtggccttcgccttcctggtcaccctgcctcggaggctgctggtggaccggttctcaggccggttctgggcctggctggaacgggaggagttcctggtccccaagaatgtgctggacatcgtggcggggcagacggtcacctggatgggcctcttctactgccccctgctgcccctgctgaatagcgtcttcctcttcctcaccttctacatcaagaagtacaccctcctgaagaactccagggcatcttcgcggcccttccgtgcctccagctccaccttcttcttccagctagtgctcctcctgggcctgcttctggctgcagtgcccctgggctatgtggtcagcagcatccactcctcctgggactgcggcctcttcaccaactactcagcaccctggcaagtggtcccggagctggtggcccttgggctcccgcccattggccagcgtgccctccactacctgggctcccacgccttcagcttccccctcctcatcatgctcagccttgtcctgacggtgtgcgtctcccagacccaggccaatgccagggccatccacaggctccggaagcagctggtgtggcaggttcaggagaagtggcacctggtggaggacctgtcgcgactgctgccggagccaggcccgagcgactctccgggccccaagtaccctgcctcccaagcttcgcgcccgcagtccttctgccccggatgcccatgccctggctccccgggccaccaggccccgcggccgggcccctccgtcgtggatgccgcgggactgcgttccccttgccctggacagcacggtgccccggcctccgcccgcagattccgcttccccagcggcgcggagctgtaacccctacccctgcctccccgaagcctccctggggccccttcaggcctccttactccatcttccagacccctggcgaccaccgcccctctcagtggctccagggcctccctcagaggtccccaaagatggacacacaaccccagcggcagcaggaaaaacatatgggaattttctttctatattttaatctcatccctttaaaatgtctattttttattgtgttttttataatatacataatctattagtatagtatctcttgaatgcgattttttctagaatgtgttctgctgatttgttttagagccatgagtgcaatttatacacatacatctattgggaatgctcagaagttgtttactgatggaagtgccttcagaagagtccgggaaccacttcctaaggaaggaaagagctggccacagttagagcaagcctgcctggggccctgctctgtgttccagctgcaaactgcctgcatcatcccttcctgttactcttccttcacctgagacagtcgaggccacagcgtcagccagggccagagctgggatttgaacccaggcactcgggctccagagccacactgccccagtgtggggcttagtggcggctcctggccctgactgaggggctgactgaagcctggtgagagcgtgctgggtcagcctctccctggcgggaatcctctccgtccagtcttctaacctagcagcctcacgtccacagagctgccttgtgaaactcagcagagccctggcttcctgcagagccgtgttctcccagcctgcttcatggctccctggttgagccaagcttgcggatccgtggggtgaaggtacccgcaccgcctgggccttagtggtatgtacgggcctgcatcgtgagcagcgggcgggggcccaggcaggtgaggcagctggccacaagggcagggcccggcccccctcccaaggctgtgtctgatattcttgagcctgttcgagtttccttttccaagcctcctgttctcccacccccacccctgccatgctgcagtgactaaatctgtggttctcatccttggagaacacctgagtagctgctacaagctggccacagcccagcgactctgatgtggttgggctgggtgtggccagcagccagggcatcgggacttttcgaagctcccaggtgactcaccggcagctggggatgagaactgtcaggagggaaggtcagaagtcccaggatgcacttgaaaagcctctagctccaccagtgaccagctcctggctggactcctggtctggactcagcatcagggaggctctggcctctcgccctcagggctgggggcttcttcacatggtcatcaaagacttggccagttccgcctctcccacggccgtccttgtctcacccagcatcacgacgcatcagttcaccaacaaacacgattcagtgctgctagtgctgggtcctgttctgggggctggtgatgaggccaagagggaaagagggagctctgtgttccatcgagggggcgacaagcctggaccagatgaaagtgactcatgttgttaattagcggcttagggccaaaggtggcccctggaccagtggcctcagcatcacctgggaaaaggttagaaatgaacattcccaggccccacctcagcctcctgaatcagagcatccctttggcaaaccatactgagaaacaaccacgtgcatcaccaagcgctgtgaagaaggcaagctttgagaccttgaaggaatcatcaaactctgggcctcggtgtgctcacccagggcgagacaaagacgccatgctcctccaagtggcctccaagattaaatgagcaatgactttt

SEQ ID NO: 243574 - protein, 215 aa, Artificial Sequence
  derived and/or modified sequence
MDKVQSGFLILFLFLMECQLHLCLPYADGLHPTGNITGLPGSKRSQPPRNITKEPKVFFHKTQLPGIQGAASRSTAASPTNPMKFLRNKAIIRHRPALVKVILISSVAFSIALICGMAISYMIYRLAQAEERQQLESLYKNLRIPLLGDEEEGSEDEGESTHLLPENENELEKFIHSVIISKRSKNIKKKLKEEQNSVTENKTKNASHNGKMEDL

SEQ ID NO: 243575 - DNA, 915 bp, Artificial Sequence
  derived and/or modified sequence
ggagtagaacttcttgattcctcagataaatagaggacagatgctggactgtagctaagtatttcctttcatctacgggataaaatactgataatttgagagtgatggacaaggttcagagtggtttcctcattttgtttttgtttttaatggaatgccaacttcatttatgcttgccgtatgcagatggactccatcccactggaaacataacaggcttaccaggcagtaaacggtcacaaccacccagaaacatcaccaaagagcccaaagtgttctttcataaaacccagttgcctgggattcaaggggctgcctcgagatccacggctgcatcccctacgaaccccatgaaattcctgaggaataaagcaataattcggcatagacctgctcttgttaaagtaattttaatttcgagcgtagccttcagcattgccctgatatgtgggatggcaatctcctatatgatatatcgactggcacaggctgaggaaagacaacagctcgagtcactttataagaacctcaggataccgttattaggagatgaagaagagggctcagaggacgagggtgagtccacgcacctacttccagagaacgaaaatgagctggaaaagttcatccactcagttattatatcaaaaagaagcaaaaatattaagaagaaactgaaggaagagcaaaactcagtaacagaaaacaaaacaaagaatgcgtcacataatggaaaaatggaagacttgtgaacgcagacgacagaggtgccggctgaggcagaggagaaactatgggggtgctgggagactgagcctgtgggcgtggcttgctcccagagaaccttatggaagaggacatcaaagaaagaaatgccagacctgtatcccagaaaataaagccacatgatatagc

SEQ ID NO: 243576 - DNA, 648 bp, Artificial Sequence
  derived and/or modified sequence
atggacaaggtgcagagcggcttcctgatcctgttcctgttcctgatggagtgccagctgcacctgtgcctgccctacgccgacggcctgcaccccaccggcaacatcaccggcctgcccggcagcaagagaagccagccccccagaaacatcaccaaggagcccaaggtgttcttccacaagacccagctgcccggcatccagggcgccgccagcagaagcaccgccgccagccccaccaaccccatgaagttcctgagaaacaaggccatcatcagacacagacccgccctggtgaaggtgatcctgatcagcagcgtggccttcagcatcgccctgatctgcggcatggccatcagctacatgatctacagactggcccaggccgaggagagacagcagctggagagcctgtacaagaacctgagaatccccctgctgggcgacgaggaggagggcagcgaggacgagggcgagagcacccacctgctgcccgagaacgagaacgagctggagaagttcatccacagcgtgatcatcagcaagagaagcaagaacatcaagaagaagctgaaggaggagcagaacagcgtgaccgagaacaagaccaagaacgccagccacaacggcaagatggaggacctgtag

SEQ ID NO: 243577 - DNA, 648 bp, Artificial Sequence
  derived and/or modified sequence
atggataaagtgcaatccggattcttaatcctgttcctttttctgatggagtgtcaactacacttgtgtctcccatatgccgacggcctccacccaacaggtaatatcacaggcctccctggaagcaagcgctctcaaccgcctcggaacattaccaaggagccaaaggtgttttttcacaagacacagcttcctggtatccagggtgcagctagcaggtccactgctgcgagccctaccaatcctatgaaattcctcaggaataaggcaatcattagacaccgaccagctctcgtgaaagtaattctgatcagttcagtcgcgttctcaatcgcattaatttgtgggatggcaatttcatacatgatctaccgtttggcccaggccgaagagcgccagcagttggaaagtctgtacaaaaacctccgaattcccctgctaggcgacgaagaggagggttccgaagatgagggagagtctacacatctccttcccgagaacgagaacgagttggaaaagtttattcacagtgtgatcattagcaaaagatcaaaaaacatcaagaaaaagctcaaagaggaacagaattccgtcacagaaaacaaaacaaaaaacgcttctcacaacggcaaaatggaggacctctag

SEQ ID NO: 243578 - DNA, 648 bp, Artificial Sequence
  derived and/or modified sequence
atggacaaggtgcagagcggcttcctgatcctcttcctgttcctgatggagtgccagctgcacctgtgcctgccctatgcagatggcctgcaccccactggaaacatcaccggcctgcccggcagcaagaggagccagcccccaagaaacatcaccaaggagcccaaggtgttcttccacaagacccagctgcccggcatccagggcgccgccagccgcagcacagctgccagccccaccaaccccatgaagttcctgaggaacaaggccatcatccgccacaggcctgccctggtgaaggtgatcctgatcagctctgtggccttcagcatcgccctgatctgtggcatggccatctcctacatgatctaccgcctggcccaggccgaggagcggcagcagctggagagcctgtacaagaacctgcgcatccccctgctgggagatgaggaggagggctctgaagatgaaggagagagcacccacctgctgcctgaaaatgaaaatgagctggagaagttcatccacagcgtcatcatcagcaagaggagcaagaacatcaagaagaagctgaaggaggagcagaacagcgtgacagagaacaagaccaagaatgccagccacaacgggaagatggaggacctgtag

SEQ ID NO: 243579 - DNA, 648 bp, Artificial Sequence
  derived and/or modified sequence
atggacaaggtgcagagcggcttcctgatcctgttcctgttcctgatggagtgccagctgcacttatgcctcccttatgctgacggcctgcatcccaccggcaacatcactggcctccctgggtcgaagcgttctcagcctccaaggaacatcacgaaggaaccaaaggtcttcttccacaaaacacagctgcctggcatacaaggcgccgcctcccggagcaccgctgcctctcctactaacccaatgaaatttctgaggaataaggctatcattaggcaccgccctgcgctcgtcaaagtaatactgataagttccgtggctttttcaattgcactcatctgtggtatggcaatcagttacatgatatatagattagcccaggccgaggaacggcagcagcttgagtcactctacaagaacctccgaataccccttctgggcgacgaagaggagggttctgaggacgagggcgagagtacacacctcctgcccgagaatgagaacgaattggaaaaatttattcattctgttatcatatccaaaagatcaaaaaacatcaaaaagaagctaaaagaagagcagaacagcgtaacagaaaacaagaccaaaaacgcctcccataatggaaagatggaggatctgtag

SEQ ID NO: 243580 - DNA, 648 bp, Artificial Sequence
  derived and/or modified sequence
atggataaagttcagagcggctttttgatcttattcctgttcctaatggaatgtcagctgcatttatgccttccgtatgcagacggtttgcatcctactggaaacattacgggtctgcctggttcaaagaggtcccaaccacccagaaacataaccaaagaacccaaggtttttttccacaaaacacagctaccaggcattcagggagctgcttcgagaagtaccgccgcatccccaacaaacccaatgaaatttcttaggaataaagcgattatccgccacagacccgcactggttaaagtcattctcatcagcagcgttgccttcagcattgctctgatttgtggcatggccatctcatacatgatatatcggctcgcacaggctgaagagagacagcagctggagagcctctataaaaatctcagaatccctctccttggcgatgaggaggaaggctcggaggacgagggtgagagcacacacttgctccctgagaacgagaatgaattggagaaattcatccattctgtaattatcagcaagcgttccaaaaatattaagaagaaactgaaagaggagcagaactccgtgaccgagaataagaccaagaacgcaagtcacaacggcaagatggaggatctatag

SEQ ID NO: 243581 - protein, 239 aa, Artificial Sequence
  derived and/or modified sequence
MQRGALSPVLMLSAAPEPPPRPPPALSPPGSGPGSGSRHGSARPGPTPEPSGSLGAALDSSLRAAVAFKAEGQRCYREKKFREAIGKYHRALLQLKAAQGARPSGLPAPAPGPTSSPGPARLSEEQRRLVESTEVECYDSLTACLLQSELVNYERVREYCLKVLEKQQGNFKATYRAGIAFYHLGDYARALRYLQEARSREPTDTNVLRYIQLTQLKMNRCSLQREDSGAGSQTRDVIG

SEQ ID NO: 243582 - DNA, 720 bp, Artificial Sequence
  derived and/or modified sequence
atgcagagaggcgccctgagccccgtgctgatgctgagcgccgcccccgagcccccccccagacccccccccgccctgagcccccccggcagcggccccggcagcggcagcagacacggcagcgccagacccggccccacccccgagcccagcggcagcctgggcgccgccctggacagcagcctgagagccgccgtggccttcaaggccgagggccagagatgctacagagagaagaagttcagagaggccatcggcaagtaccacagagccctgctgcagctgaaggccgcccagggcgccagacccagcggcctgcccgcccccgcccccggccccaccagcagccccggccccgccagactgagcgaggagcagagaagactggtggagagcaccgaggtggagtgctacgacagcctgaccgcctgcctgctgcagagcgagctggtgaactacgagagagtgagagagtactgcctgaaggtgctggagaagcagcagggcaacttcaaggccacctacagagccggcatcgccttctaccacctgggcgactacgccagagccctgagatacctgcaggaggccagaagcagagagcccaccgacaccaacgtgctgagatacatccagctgacccagctgaagatgaacagatgcagcctgcagagagaggacagcggcgccggcagccagaccagagacgtgatcggctag

SEQ ID NO: 243583 - DNA, 720 bp, Artificial Sequence
  derived and/or modified sequence
atgcagcgtggtgcactgtccccagtgctgatgctttcagctgctccagaaccaccccctcggcccccccctgccctcagtcctccagggtctggaccaggctcaggatctcgccatggttccgcgagacctggtcccaccccagaacctagtggcagcttgggagccgcactggattcgtctttaagggccgccgtcgcattcaaggcagaaggtcagcgatgttatagagagaagaagttcagagaagccattggcaagtaccaccgagccctgctacagctgaaggccgcacaaggcgctagaccaagcgggctccctgcccccgccccaggtcctacatctagcccagggcccgctcgactaagcgaggagcagagacgtcttgtagaatccacagaggtagagtgttacgattcgcttaccgcctgtctgctgcagagtgaattagtgaactacgaacgggtcagagagtactgtctcaaggtgttggaaaagcaacagggaaatttcaaagccacttacagggcgggaatcgccttttaccacctgggagactacgcaagagctctgaggtacctgcaagaagctcgcagccgtgagcccacagataccaatgtccttaggtacattcagttgacccagctcaagatgaaccgatgctctctgcagcgggaagactctggggccggaagtcagacaagggacgtgattggttag

SEQ ID NO: 243584 - DNA, 720 bp, Artificial Sequence
  derived and/or modified sequence
atgcagagaggagccctgagccctgtgctgatgctgtctgctgcccctgagcccccaccccggcccccaccagccctgagccccccaggcagcggccctggcagcggcagcagacatggcagcgcccggcccggccccaccccagagcccagcggcagcctgggcgccgccctggacagcagcctgcgggctgctgtggccttcaaggccgagggccagcgctgctaccgggagaagaagttccgggaggccatcggcaagtaccaccgggccctgctgcagctgaaggccgcccagggcgcccggcccagcggcctgcctgccccagcccctggccccaccagcagccctggccctgcccggctgtctgaggagcagaggcggctggtggagagcacagaggtggagtgctatgacagcctgacagcctgcctgctgcagagcgagctggtgaactatgagcgggtgcgggagtactgcctgaaggtgctggagaagcagcagggcaacttcaaggccacctacagagctggcatcgccttctaccacctgggggactatgcccgggccctgcgctacctgcaggaggcccggagccgggagcccacagacaccaacgtgctgcgctacatccagctgacccagctgaagatgaaccgctgcagcctgcagcgggaggacagcggggccggcagccagaccagagatgtgattggatag

SEQ ID NO: 243585 - DNA, 720 bp, Artificial Sequence
  derived and/or modified sequence
atgcagcggggcgccctgagccccgtgctgatgctgagcgccgccccggaaccacccccacggcctccccccgccctgagccccccaggcagtgggccggggtctggcagtcgtcacggttccgcgcgtccgggccccacaccagaaccaagcgggtctcttggagcggctcttgactcctcgctgcgggcggcagttgcctttaaggctgaaggccaaagatgctaccgagagaaaaaattccgcgaagcaatcgggaagtatcacagagctctgctgcaattaaaagctgcccagggcgcaagaccttcagggctgccagcacccgcccccggacctacatcgtctcccgggcccgcacggctatccgaggagcagcgtcggcttgtcgagtccaccgaggtcgaatgctatgactccctgacagcatgtctgctgcagtccgaattagtaaattacgagagggtaagggaatactgtctcaaggtcctcgagaaacagcagggcaactttaaagcaacctatcgggctggaattgcattctaccatctcggcgactatgcgcgtgcacttcgctacctccaagaggcgcgttcgagagaaccaactgatacaaatgtccttcggtacatccagctgacccaattgaagatgaacagatgctccttacaaagggaggactctggggctgggtctcaaacacgcgatgtgattgggtag

SEQ ID NO: 243586 - DNA, 720 bp, Artificial Sequence
  derived and/or modified sequence
atgcagagaggcgcactgtcacccgttcttatgcttagcgctgcaccagagcctccaccgagaccaccgcctgccttgagtcctccgggaagcggccctggctcagggtcccgccacggaagtgccagaccaggtccaacccccgaaccgagcgggtctctgggggctgctttagatagctccttgagggccgctgtggcctttaaggccgaggggcagagatgctacagggagaagaagttccgtgaggctatcggtaaatatcaccgtgcccttctacaactgaaagccgcacagggcgctcgccctagtgggttgcccgctcctgcacccggacccacgtccagcccaggccctgccaggctgagcgaggagcagcgcagactagtggaatcgaccgaggtagagtgttacgacagtctgacagcctgccttcttcagtcagaactggtgaattacgagcgggtccgcgagtattgtctcaaggtgctggagaagcaacagggaaatttcaaggctacatatcgcgcaggtattgcattttatcacctgggagattatgccagggcgcttcggtacctgcaggaagcgcgtagtagggagcctaccgatactaacgtgctcagatatattcagttgacacagctgaaaatgaatagatgcagcctgcagcgagaagacagcggtgctggctcacagacccgcgatgtcattggatag

SEQ ID NO: 243587 - DNA, 843 bp, Artificial Sequence
  derived and/or modified sequence
cggcaggagtttcccacaatgcagcgcggcgcgctgtccccggtgctgatgctcagcgctgccccggagcctccgccgcgcccgcctcccgccctctccccaccgggctcgggcccaggctcgggctcccgccatggctcggctcgtcccggtcctaccccagagccgtcggggagcctgggcgcggcgctcgacagcagcctgcgtgccgccgtggcgttcaaggcagagggccagcgctgctatcgagagaagaagttccgggaggccatcggcaagtaccaccgagcgctgctgcagctgaaggcggcgcagggggcccgccctagcggcctgcccgcccccgcccccgggcccaccagcagccccgggccggcgcgcctcagcgaggagcagcggcgcctggtggagagcacggaggtggagtgttacgactccctcacggcttgcctgctgcagtcggagctggtaaactacgagcgcgtgcgcgagtactgtctcaaggtactggagaagcagcagggcaacttcaaggccacctaccgtgccggcattgccttctaccacctgggcgactacgcacgcgcgctgcgctacctgcaggaggcccgcagccgggaacccacagacaccaatgtgctccgctacatccagctgactcagctgaagatgaatcgttgcagcctccagcgggaagacagtggggctgggtcccagactcgggatgtaattggctgaggccaatccagggggacctctctatccctcgccctcccacctcaccatgtaacttcccccgactcatgtgtttgttggtaaaacacttgtcactggtgatcataa

SEQ ID NO: 243588 - protein, 369 aa, Artificial Sequence
  derived and/or modified sequence
MPPMLWLLLHFAAPALGFYFSISCPSGKQCQQALLSGNDILLYCNSSGAHWYYLFTQGKKGRLTSLTNISNMEIMPEGSLLIKDPLPSQTGLYHCWNKNGRQVVQYEIDFQDVTTLHITHKDLGQRPLQNETLHLGSKQLIFTWWEPWQDCNRCEEPGECKRLGYRYIEEPLEEAMPCWLYLGEVLVWSSRLRPELQVEACHVQCTNNTQLRVDYVIFDNFRLDEKTEFVWLDCPLGSMYRPVNWRANDTPLTWESQLSGQDFTTFLDPSTGGRQLQVFQPAVYKCFVQQELVAQFKPAASLETLEAQWRENDAQWREARKALRGRADSVLKGLKLVLLVVTVLALLGALLKCIHPSPGRRSTQVLVVK

SEQ ID NO: 243589 - protein, 413 aa, Artificial Sequence
  derived and/or modified sequence
MHLALTTVLLWAWGLQAFEIVEKENIFQRTPCPAFLMFENAAYLADMSFELPCHCKPEEVPAVVWFYQKHLGSSHTKVLTDFDGRVLTEAAQVRVGSDMLTRFSIRMFSLLVFRAQSEDSGLYFCGTRKGDYFYAYDVDIQNSEGMVATFQDKGQEPFADEYYGHLHVFTTFWEWTPCDRCGVRGEQWRIGLCYLQSPDLSPRYLKAVPDVVSCGSRAVPRKLRTKARDHTPEVLVRSCLVPCEKTKTIREGVLAIINYVSKVGSRPWVPQVPIQFHQQRLGHGLIISCPGARPEHAVAWDKDRQHLYRTQYLKGVNRSMRVFIDHGNQLHIRFTQLDDRGIYYCWRQGVLVAGFRLGVTSHGHYPASFSDPETRSAVELTLIGYLLITAVFVTIHFCRCCCYLFHCCPSFSP

SEQ ID NO: 243590 - DNA, 1110 bp, Artificial Sequence
  derived and/or modified sequence
atgccccccatgctgtggctgctgctgcacttcgccgcccccgccctgggcttctacttcagcatcagctgccccagcggcaagcagtgccagcaggccctgctgagcggcaacgacatcctgctgtactgcaacagcagcggcgcccactggtactacctgttcacccagggcaagaagggcagactgaccagcctgaccaacatcagcaacatggagatcatgcccgagggcagcctgctgatcaaggaccccctgcccagccagaccggcctgtaccactgctggaacaagaacggcagacaggtggtgcagtacgagatcgacttccaggacgtgaccaccctgcacatcacccacaaggacctgggccagagacccctgcagaacgagaccctgcacctgggcagcaagcagctgatcttcacctggtgggagccctggcaggactgcaacagatgcgaggagcccggcgagtgcaagagactgggctacagatacatcgaggagcccctggaggaggccatgccctgctggctgtacctgggcgaggtgctggtgtggagcagcagactgagacccgagctgcaggtggaggcctgccacgtgcagtgcaccaacaacacccagctgagagtggactacgtgatcttcgacaacttcagactggacgagaagaccgagttcgtgtggctggactgccccctgggcagcatgtacagacccgtgaactggagagccaacgacacccccctgacctgggagagccagctgagcggccaggacttcaccaccttcctggaccccagcaccggcggcagacagctgcaggtgttccagcccgccgtgtacaagtgcttcgtgcagcaggagctggtggcccagttcaagcccgccgccagcctggagaccctggaggcccagtggagagagaacgacgcccagtggagagaggccagaaaggccctgagaggcagagccgacagcgtgctgaagggcctgaagctggtgctgctggtggtgaccgtgctggccctgctgggcgccctgctgaagtgcatccaccccagccccggcagaagaagcacccaggtgctggtggtgaagtag

SEQ ID NO: 243591 - DNA, 1184 bp, Artificial Sequence
  derived and/or modified sequence
tcacaatgttcggggtggcaccagcccactgccacagccccagtccaccatgccacccatgctgtggctgctgctccactttgctgccccggcactggggttctacttttccatcagctgccccagtggtaagcagtgccaacaggccctactctcaggcaatgatattctcctgtattgcaactcctcgggggcgcactggtactatttattcacacaaggcaagaagggcaggctcaccagcctcaccaatatttccaatatggaaataatgcccgagggcagccttctcattaaagatccattgccctcccagacgggcctctaccactgctggaacaagaatggccgccaagtggtgcagtatgaaattgactttcaggatgtcaccaccctgcatataacacacaaggacctgggtcagaggcccctgcagaacgagaccctgcatttgggcagcaaacagctcatttttacctggtgggagccctggcaggactgcaaccgctgtgaggagccgggcgagtgtaaacgcctggggtaccgctacattgaggagcctctggaggaagccatgccctgctggctctatctgggagaggtgctggtgtggtctagccgcttgcggcctgagctgcaggtggaagcctgccacgtccagtgcaccaataacacacagttaagggtggattacgtcatttttgacaacttcaggctcgatgagaagacagaatttgtgtggctcgactgtcccttaggatccatgtacaggcccgtcaactggcgtgccaacgacacccccctgacgtgggagagccagctctccggccaggacttcaccacctttctggacccctccaccggcggcaggcagctgcaggttttccagccggccgtctacaagtgcttcgtgcagcaggagctcgtggcccagttcaaacccgccgccagtctggagacgctggaggctcagtggagagagaacgatgcccagtggcgggaggcaaggaaggccctgcggggcagggcggactccgtgctcaaggggctgaagctggtgctgctcgtggtcaccgtcctggccctgctgggggcgctgctcaagtgcatccacccttccccgggcaggagaagcacacaggtgctggtggtgaaataaagcgagcccccggtgcacaagcgga

SEQ ID NO: 243592 - DNA, 1110 bp, Artificial Sequence
  derived and/or modified sequence
atgccacccatgctttggcttctcctccactttgcagctccagccctcggattctacttttccatctcatgtccttctggcaaacagtgtcagcaggccttgctgtctgggaatgatattctgctctactgtaatagtagcggtgcacattggtattacctttttactcagggcaagaagggccgcttaacatccttgactaacatcagcaacatggaaattatgccagaagggagtctcctcatcaaagatcccctgccaagccagaccggcttgtatcattgttggaacaaaaacggccgccaggtggtccagtatgagatcgactttcaggacgtgactacgttgcacatcacacataaagacctgggccaacgtccactgcagaacgagacactccatctgggctctaaacagttaatctttacgtggtgggaaccatggcaagactgcaaccgatgcgaagaacctggagagtgcaagcggctgggctatcggtacattgaggaaccccttgaagaggctatgccatgctggctgtaccttggcgaagtactcgtttggtcttcacgacttcgtccagagctccaagtcgaagcgtgccacgtacagtgtaccaataacacacagctccgggtggattacgtgatatttgataatttccggctcgacgaaaagacagagtttgtctggctggattgtccgctgggcagtatgtatcgcccggtgaattggcgggctaacgatacacctttaacctgggaaagtcagctgtcaggacaggattttaccacctttctcgatccgtccacaggcggccggcaattgcaggtcttccagcctgccgtgtacaagtgcttcgtgcaacaggagctcgtcgcacagtttaagccagcagcctccctggagaccctggaggctcaatggcgtgagaatgacgcgcagtggcgggaggctcggaaagccctgagaggcagagccgacagtgtgctcaaaggcctgaagctggtcctgctggtggtcactgtcctagccctgctcggcgctttattaaagtgcattcatccctcacccggacgtcgctccacccaagtccttgttgtaaagtag

SEQ ID NO: 243593 - DNA, 1110 bp, Artificial Sequence
  derived and/or modified sequence
atgccacccatgctgtggctgctgctgcactttgctgccccagccctgggcttctacttcagcatcagctgccccagcggcaagcagtgccagcaggccctgctgtctggaaatgacatcctgctgtactgcaacagcagcggggcccactggtactacctgttcacccagggcaagaagggccgcctgaccagcctgaccaacatcagcaacatggagatcatgcctgagggcagcctgctgatcaaggaccccctgcccagccagacaggcctgtaccactgctggaacaagaatggccggcaggtggtgcagtatgaaattgacttccaggatgtgaccaccctgcacatcacccacaaggacctgggccagaggcccctgcagaatgagaccctgcacctgggcagcaagcagctgatcttcacctggtgggagccctggcaggactgcaacagatgtgaggagcctggagagtgcaagaggctgggctaccgctacatcgaggagcccctggaggaggccatgccctgctggctgtacctgggggaggtgctggtgtggagcagccggctgcggcctgagctgcaggtggaggcctgccacgtgcagtgcaccaacaacacccagctgcgggtggactatgtgatctttgacaacttccggctggatgagaagacagaatttgtgtggctggactgccccctgggctccatgtacagacctgtgaactggagggccaatgacacccccctgacctgggagagccagctgagcggccaggacttcaccaccttcctggaccccagcactggaggccggcagctgcaggtgttccagcctgctgtgtacaagtgctttgtgcagcaggagctggtggcccagttcaagccagctgccagcctggagaccctggaggcccagtggagagaaaatgatgcccagtggagggaggccaggaaggccctgcggggccgggctgacagcgtgctgaagggcctgaagctggtgctgctggtggtgacagtgctggccctgctgggcgccctgctgaagtgcatccaccccagccctggccgccgcagcacccaggtgctggtggtgaagtag

SEQ ID NO: 243594 - DNA, 1110 bp, Artificial Sequence
  derived and/or modified sequence
atgccccccatgctgtggctgctgctgcacttcgccgcccccgccctgggattttatttcagcatctcgtgtccatcaggcaagcagtgccaacaggctctgctgagtggcaatgacatactgctctattgtaactcgagtggcgctcactggtactatctgttcacgcagggtaaaaagggccgcctaacgtcactcactaacatttcaaatatggagattatgcccgaggggagtctgctcatcaaggaccccctgccatctcaaaccggcctgtaccattgttggaacaaaaacgggcgccaggtggtacagtatgagatcgactttcaagatgtcaccacattgcatatcacccacaaggacttgggacagcggccacttcagaacgagacattgcacctaggcagtaagcagttaatcttcacctggtgggagccatggcaggactgcaaccgatgtgaggagcccggcgagtgcaagcgtcttgggtatcggtacatagaagagcccctggaagaggccatgccctgctggctgtatcttggcgaagttctagtctggtcttcgcggcttagaccagaactccaggtggaggcttgccacgtccagtgtactaataatactcagctcagagtcgactacgtgatcttcgataacttccgcctcgatgagaagaccgaattcgtttggcttgactgtcccctgggatcaatgtacaggcctgtcaattggagggccaacgatacccccttgacctgggaatcgcagctgtctggccaggacttcacaacctttttggatcccagcaccggcggaaggcagctgcaggtgttccagccagccgtgtacaaatgtttcgtacagcaggaactcgtggcacaattcaagccagcagcctccctggagacactcgaggctcagtggagggagaatgacgcgcagtggcgtgaggcacgcaaggcgctgcgcggccgcgccgacagtgtgcttaaggggctgaaactggttctgttagttgttactgttctagcactgcttggggcactgttgaagtgcatccaccccagtcctggacgaagatccacgcaggtcctcgtcgtcaagtag

SEQ ID NO: 243595 - DNA, 1110 bp, Artificial Sequence
  derived and/or modified sequence
atgcccccaatgctgtggctactcttacattttgcggcaccggctttaggcttttacttttccatcagctgtcccagcgggaagcagtgccagcaggccctcctctcggggaacgatattttattatattgtaactcctcaggagcccattggtactatctattcacccagggcaaaaaagggaggcttacttcattgactaacataagtaacatggaaataatgcctgagggcagcctgctgatcaaggatccgttaccttcccagaccggtttatatcattgttggaacaagaacggacgccaggtagtccagtatgagattgactttcaggatgtcacaactttgcatatcacacacaaggatctggggcagcgacccttacaaaatgagacgctgcacttggggagcaagcagctgatttttacttggtgggaaccatggcaagactgcaaccgctgcgaagaacccggagagtgtaaaaggctgggctacaggtacatcgaggaacccctcgaagaggctatgccatgttggctttaccttggtgaggtgctggtgtggtcaagcaggctgcgccctgagcttcaagtcgaagcatgtcacgtgcagtgtaccaacaacacacagttaagagtggactatgtgatatttgataattttcggttagacgaaaagactgagttcgtgtggctcgactgcccattaggttccatgtatagaccggtcaactggcgagccaatgatacacctcttacctgggaatcacagctgtctgggcaggacttcactacatttctcgacccaagcacggggggacggcaactgcaggtgtttcagccagcggtctacaagtgcttcgtccagcaggagctggtcgcacagtttaagccagctgccagtctggagaccctggaggcccaatggagggaaaatgatgcccaatggcgtgaggctcgtaaggccctgagagggagagctgattcagtgttgaaggggctgaagctggtgctgttagtggtcaccgttctcgcactcctaggggcactgctgaagtgtatccatcccagcccaggacggagatccacacaagttctggttgtgaagtag

SEQ ID NO: 243596 - DNA, 1242 bp, Artificial Sequence
  derived and/or modified sequence
atgcacctggccctgaccaccgtgctgctgtgggcctggggcctgcaggccttcgagatcgtggagaaggagaacatcttccagagaaccccctgccccgccttcctgatgttcgagaacgccgcctacctggccgacatgagcttcgagctgccctgccactgcaagcccgaggaggtgcccgccgtggtgtggttctaccagaagcacctgggcagcagccacaccaaggtgctgaccgacttcgacggcagagtgctgaccgaggccgcccaggtgagagtgggcagcgacatgctgaccagattcagcatcagaatgttcagcctgctggtgttcagagcccagagcgaggacagcggcctgtacttctgcggcaccagaaagggcgactacttctacgcctacgacgtggacatccagaacagcgagggcatggtggccaccttccaggacaagggccaggagcccttcgccgacgagtactacggccacctgcacgtgttcaccaccttctgggagtggaccccctgcgacagatgcggcgtgagaggcgagcagtggagaatcggcctgtgctacctgcagagccccgacctgagccccagatacctgaaggccgtgcccgacgtggtgagctgcggcagcagagccgtgcccagaaagctgagaaccaaggccagagaccacacccccgaggtgctggtgagaagctgcctggtgccctgcgagaagaccaagaccatcagagagggcgtgctggccatcatcaactacgtgagcaaggtgggcagcagaccctgggtgccccaggtgcccatccagttccaccagcagagactgggccacggcctgatcatcagctgccccggcgccagacccgagcacgccgtggcctgggacaaggacagacagcacctgtacagaacccagtacctgaagggcgtgaacagaagcatgagagtgttcatcgaccacggcaaccagctgcacatcagattcacccagctggacgacagaggcatctactactgctggagacagggcgtgctggtggccggcttcagactgggcgtgaccagccacggccactaccccgccagcttcagcgaccccgagaccagaagcgccgtggagctgaccctgatcggctacctgctgatcaccgccgtgttcgtgaccatccacttctgcagatgctgctgctacctgttccactgctgccccagcttcagcccctag

SEQ ID NO: 243597 - DNA, 1242 bp, Artificial Sequence
  derived and/or modified sequence
atgcacctggcgttgacaaccgtcctcctttgggcatgggggctgcaggcctttgagatcgttgaaaaggagaacatttttcagcggacaccatgcccagccttcttgatgttcgaaaacgccgcgtacctggcagacatgtcttttgaactgccatgtcattgtaagccagaggaggtgcctgcagtcgtatggttctaccaaaagcatctgggttcgtcccacacgaaagttctgaccgacttcgatgggcgggtgctgactgaggctgctcaggttagagttgggtctgacatgctgacgcggtttagtataaggatgttttccttgctcgtgttccgtgcgcaatctgaggacagcgggctttacttttgtgggacaaggaagggagattacttttatgcttatgacgtggacatccagaattctgagggcatggtggccactttccaagacaagggacaggagccttttgctgacgagtactacggacatctccacgtgttcaccaccttctgggaatggacaccatgtgatcggtgcggtgtaagaggcgagcagtggaggataggcctgtgttatttgcaatccccagatttgagtcctcggtatctgaaagctgtgccagatgtagtctcttgtggtagtagggccgtaccaagaaagctgaggactaaggcaagagatcatacccctgaagtccttgtgagatcctgcttagttccttgtgagaaaacgaagacgatccgggagggagtgctcgcaataatcaattatgttagcaaagttggctctcggccctgggtgccccaagtgcccattcagtttcaccagcagaggctaggccacggcctgattatcagctgcccaggggcgcgcccagagcatgccgtggcatgggacaaggatcgccagcatctctatcgaacccagtatttaaagggggtaaacagatccatgcgcgttttcatcgatcacggcaaccagctgcatatcaggtttacacaactagacgacagaggcatatactactgctggcgccagggcgttctggttgccggatttcggcttggggtgacatctcacggccactacccagcaagtttttccgaccccgaaacccgttccgcagttgagctgactttaatcggatacctcctgatcactgctgtatttgtgacgattcacttttgcagatgctgttgttatttgttccattgttgtccttctttcagtccctag

SEQ ID NO: 243598 - DNA, 1242 bp, Artificial Sequence
  derived and/or modified sequence
atgcacttggccttgacaaccgtgctgctctgggcttggggactccaggcattcgagattgtggagaaagagaatattttccagcgcactccttgtcccgctttcctaatgttcgaaaacgcagcatatcttgccgacatgtcttttgagctgccttgccactgtaagccagaggaagtgccagcagtcgtgtggttctaccagaagcacttggggtcgagtcacacaaaggtgctgacagatttcgatggtagggtactgaccgaggcggcccaagtccgggttggttcggatatgttaaccaggttctcaatccggatgttctctctccttgtgtttagggctcagagtgaagacagcggcctttatttttgcggcacccgcaaaggagattacttttacgcatacgacgtcgacattcagaactcagagggcatggtggcaacatttcaggacaaaggtcaagagcccttcgcggacgagtactacggtcaccttcatgttttcacaaccttttgggaatggacgccctgtgaccggtgcggtgtccggggtgagcaatggaggattggtctgtgctaccttcagtcccccgatctgtctcccaggtatcttaaggcagtgcctgatgtggtgtcctgtggctccagagctgttccccgcaagcttcgcaccaaggcccgtgaccacactccagaggttttggtgagatcatgcctcgtcccctgcgaaaaaacaaagaccatcagagaaggagtgctggcaattatcaattacgtgtccaaggtgggtagccgcccatgggtccctcaggtccccattcagtttcatcaacaaagactggggcatggattgattatatcctgccctggcgctcgcccagaacatgccgtggcttgggataaggatagacagcacctataccgcactcaatatttgaaaggcgttaatcgctccatgagggtctttatcgaccacggtaaccagctccatatccgcttcacccagctcgatgaccgtggcatctactactgttggcgccaaggcgtgctggtggcaggcttccggctcggtgtcacctcccacggacattacccggcctcattttcagatcccgagacccgatccgcagtggaacttacactgatcgggtatttactcataactgccgttttcgttaccattcacttctgccgatgttgctgctatttattccactgctgtcccagtttctcgccttag

SEQ ID NO: 243599 - DNA, 1242 bp, Artificial Sequence
  derived and/or modified sequence
atgcacctggccctgaccaccgtgctgctgtgggcctggggcctgcaggcctttgagatcgtggagaaggagaacatcttccagaggaccccctgcccagccttcctgatgtttgaaaatgctgcctacctggccgacatgagctttgagctgccctgccactgcaagccagaggaggtgcctgctgtggtgtggttctaccagaagcacctgggcagcagccacaccaaggtgctgacagactttgatggccgggtgctgacagaggccgcccaggtgcgggtgggcagtgacatgctgacccgcttcagcatccgcatgttcagcctgctggtgttccgggcccagagcgaggacagcggcctgtacttctgtggcaccaggaaaggagactacttctacgcctatgatgtggacatccagaacagcgagggcatggtggccaccttccaggacaagggccaggagccctttgctgatgagtactacggccacctgcacgtgttcaccaccttctgggagtggaccccctgtgacagatgtggggtgcggggggagcagtggagaattggcctgtgctacctgcagagcccagacctgagcccccgctacctgaaggctgtgcctgatgtggtgtcctgtggcagcagagctgtgcccaggaagctgcggaccaaggcccgggaccacaccccagaggtgctggtgcgcagctgcctggtgccctgtgagaagaccaagaccatccgggagggcgtgctggccatcatcaactacgtgtccaaggtgggcagccggccctgggtgccccaggtgcccatccagttccaccagcagaggctgggccacggcctcatcatcagctgccctggggcccggcctgagcacgctgtggcctgggacaaggaccggcagcacctgtaccgcacccagtacctgaagggcgtgaacagatccatgagggtcttcatcgaccacggcaaccagctgcacatccgcttcacccagctggatgaccggggcatctactactgctggaggcagggcgtgctggtggccggcttccggctgggcgtgaccagccacggccactacccagccagcttcagtgaccctgagaccaggtctgctgtggagctgaccctgattggctacctgctgatcacagctgtgtttgtgaccatccacttctgccgctgctgctgctacctgttccactgctgccccagcttcagcccctag

SEQ ID NO: 243600 - DNA, 1242 bp, Artificial Sequence
  derived and/or modified sequence
atgcacctggccctgaccaccgtgctgctgtgggcctggggcctgcaggcattcgaaatcgtggaaaaggagaatatatttcagaggactccatgtcccgccttcctgatgtttgagaacgctgcctatctcgccgacatgtcttttgaacttccgtgccattgtaagccagaagaagttcccgccgtggtgtggttttatcagaaacacctgggttcaagtcacaccaaagtgttaaccgactttgatgggagggttctgaccgaagcagcccaggttcgcgttggaagtgatatgttaactcgattttccattagaatgtttagccttctggtcttcagggcacagagcgaggattcaggattgtatttctgcggtactagaaaaggcgactacttctatgcctacgatgtggatatccagaactctgaaggcatggttgccactttccaggacaagggtcaggaaccgtttgccgacgagtactacggccatctgcacgtcttcaccaccttctgggagtggacaccttgcgaccgatgtggagtgcgcggagagcagtggcgaatcggattgtgctatctgcaatccccagatctcagcccccggtacctgaaggccgttcctgacgtcgtatcatgtggatcccgcgcggtgccacgcaagttgagaacaaaagccagggatcatacccccgaggttttggtgagaagctgtctggtgccttgcgagaagaccaagacgatcagggagggggtgctcgccattatcaattacgtgtctaaggtcggctctcgcccttgggtaccacaggttcccattcagtttcatcagcagagactgggccacggcctaatcataagctgtccaggtgcacggcccgaacatgccgtggcctgggacaaggacagacagcatttgtaccgtacccagtatctgaaaggagttaatagaagtatgcgcgtatttattgatcacggaaatcagctgcatatcagattcacgcagcttgacgataggggcatctactactgctggcggcagggcgtccttgtggccggatttcggttgggagtcacctcacacggacactatccagcctctttttctgacccggagacaagaagtgcggtggaattaaccctgattggttaccttcttatcacagctgttttcgttaccattcatttctgccgctgctgttgttacttgtttcattgttgtccaagcttctctccatag

SEQ ID NO: 243601 - DNA, 1242 bp, Artificial Sequence
  derived and/or modified sequence
atgcacctggccctgaccaccgtgctgctgtgggcctggggcctgcaagcgtttgagattgttgagaaggagaacatcttccagagaaccccttgtccagcattcttgatgtttgagaatgccgcatatctcgccgatatgtcatttgagctcccatgtcactgtaagcccgaggaggtccctgccgttgtgtggttttaccaaaagcacctgggctccagtcacactaaggtgcttacggatttcgatggaagagtgctgaccgaagccgcgcaagttagagtgggaagtgacatgctgactcggtttagcatcagaatgttctcactcctggttttcagagcacaatcggaagattccggactttatttctgtgggactcggaagggggactacttctatgcttacgatgtggatatccagaactccgaagggatggtcgcaacatttcaggataagggccaggaaccattcgccgatgagtattacggccacttgcacgtctttactacgttctgggaatggaccccctgcgacagatgtggggtccgtggagagcagtggcgtattggtctgtgttacctacagtccccggatctttctccacggtatcttaaagctgtgccagatgtggtgtcttgcggatcccgggctgtgccgcggaagcttcgcacaaaagcaagagaccacactccagaggttctggtccggagttgcctggttccctgcgagaagactaaaacaatccgtgagggcgtgctcgctattattaactacgtctcaaaggtgggcagcagaccatgggtcccccaggtgccaatacagttccatcagcagcgcctgggtcatggcctcatcatttcctgccctggggctcggcctgagcatgctgtggcatgggataaggatagacaacacctgtatcggacacagtatttgaagggcgttaaccgcagtatgcgcgtgttcatcgatcatggcaatcagttacacattaggtttacgcagctggatgatcggggtatatactactgctggcggcagggagtgttggtcgcaggatttagactgggtgtcacttcccatggacactatcctgctagtttctcagatccggagaccaggagtgcagtggaactcaccttaatcggctatctgctgattactgcagtgtttgtgactattcatttttgccggtgttgctgttacctgttccactgttgcccatcctttagtccctag

SEQ ID NO: 243602 - DNA, 1242 bp, Artificial Sequence
  derived and/or modified sequence
atgcacctggccttgactaccgttctgctatgggcatggggcctgcaagcctttgagattgtagaaaaagagaacatttttcagcggacaccttgccctgcctttctcatgtttgaaaacgccgcatacctggctgatatgtcctttgaattgccatgccattgtaaaccagaagaggttcccgctgtggtctggttttaccagaaacatctggggtctagccacaccaaggttctgacagactttgacgggcgtgtgctgacggaggccgctcaggttcgggtcggaagcgacatgctgacgcgttttagtatccgcatgttttcattactagtgttcagagctcaatccgaggactctggcctgtacttttgtggcacacgaaagggagattacttttacgcttatgatgtggacatccagaatagcgaaggaatggtcgccacttttcaggacaaagggcaggagcctttcgctgatgagtactatgggcacctgcacgtatttacaacgttctgggagtggactccctgcgacagatgtggggttcgcggagagcagtggcggattggattgtgctatctccagagccctgatttgtcccccaggtacctgaaagccgtgccagatgtagtgtcatgcgggtctcgtgcggtcccgagaaagctgcggacaaaggcgagggaccacacccccgaggttctcgtcaggagttgtctggtgccttgtgaaaaaaccaaaaccatccgtgagggagtgctggcaataatcaactacgtttctaaagtgggtagccggccatgggtgccacaggtaccaatccagttccaccagcaacggctcggacatggacttattatctcttgccccggagctcgacctgaacatgcggtggcctgggataaagatcgccagcatctctaccggacacagtacctgaagggagtcaatcgtagtatgcgcgtattcattgaccatggcaatcaactccacatcaggtttacacagctggacgaccggggtatctattactgctggcggcaaggtgtgttggtggcaggatttcggttaggcgtgacatcgcacggccattatccggctagcttcagcgatcctgaaacccggagcgccgtagagctcaccctcattgggtatcttctgatcaccgccgtcttcgttacgatccacttctgcaggtgttgctgttacttgttccattgctgtccgtctttttctccgtag

SEQ ID NO: 243603 - DNA, 1242 bp, Artificial Sequence
  derived and/or modified sequence
atgcacctcgcactgaccactgtgctgctctgggcctgggggctgcaagcttttgagatcgtagagaaggagaacatttttcaacgcacaccttgtcctgctttcctgatgtttgaaaacgctgcatacctggccgatatgtcttttgagctgccatgccattgtaagccagaagaagtgccagccgtggtctggttctaccagaaacatcttgggtcaagccatacgaaggtgctcactgactttgacggaagggtcctgactgaggccgctcaggtgcgggtcggttctgacatgctgactcgtttttccatccgtatgttctctctgctcgttttcagagcacagtccgaggacagcggactttacttttgtggcacgaggaagggggattacttctacgcatacgatgtggacatccaaaacagtgagggaatggtcgccaccttccaagataaggggcaggagcctttcgccgatgaatactatggtcatttgcatgtgtttaccacgttctgggagtggaccccttgcgacagatgcggtgtgaggggcgagcagtggcgcattggactttgttacctgcagtccccagatctaagtccaagatacctgaaggccgtgccggatgtggtcagttgtggaagtcgcgctgtaccccgaaaactgcgcacaaaggctagagatcacactcccgaagtactggttcggtcatgtctggtgccgtgtgaaaaaacaaaaaccatccgtgagggggtcctggccataatcaactatgtgagcaaggtcggatcgagaccctgggtcccccaagtgcccatccagttccatcagcagaggctgggccatggactaatcatctcatgtccgggtgcgaggccagagcatgccgttgcttgggacaaagataggcagcacctgtaccggacccagtatctgaagggagtgaacagatccatgcgggtcttcattgatcacggcaaccaactccacatccgcttcactcagctggatgacaggggcatttactattgctggcgacagggagtgctagtcgcaggattccgcctaggagtgacaagccatgggcactaccccgcatcatttagcgaccccgaaacccgtagcgcggttgagctgactctcattggctacctgcttatcaccgccgtgtttgtaactattcacttctgcaggtgctgttgctacctgtttcactgttgtccttcattcagtccttag

SEQ ID NO: 243604 - DNA, 2061 bp, Artificial Sequence
  derived and/or modified sequence
atgaccgagagccagggcaccgtgaccttcaaggacgtggccatcgacttcacccaggaggagtggaagagactggaccccgcccagagaaagctgtacagaaacgtgatgctggagaactacaacaacctgatcaccgtgggctaccccttcaccaagcccgacgtgatcttcaagctggagcaggaggaggagccctgggtgatggaggaggaggtgctgagaagacactggcagggcgagatctggggcgtggacgagcaccagaagaaccaggacagactgctgagacaggtggaggtgaagttccagaagaccctgaccgaggagaagggcaacgagtgccagaagaagttcgccaacgtgttccccctgaacagcgacttcttccccagcagacacaacctgtacgagtacgacctgttcggcaagtgcctggagcacaacttcgactgccacaacaacgtgaagtgcctgatgagaaaggagcactgcgagtacaacgagcccgtgaagagctacggcaacagcagcagccacttcgtgatcacccccttcaagtgcaaccactgcggcaagggcttcaaccagaccctggacctgatcagacacctgagaatccacaccggcgagaagccctacgagtgcagcaactgcagaaaggccttcagccacaaggagaagctgatcaagcactacaagatccacagcagagagcagagctacaagtgcaacgagtgcggcaaggccttcatcaagatgagcaacctgatcagacaccagagaatccacaccggcgagaagccctacgcctgcaaggagtgcgagaagagcttcagccagaagagcaacctgatcgaccacgagaagatccacaccggcgagaagccctacgagtgcaacgagtgcggcaaggccttcagccagaagcagagcctgatcgcccaccagaaggtgcacaccggcgagaagccctacgcctgcaacgagtgcggcaaggccttccccagaatcgccagcctggccctgcacatgagaagccacaccggcgagaagccctacaagtgcgacaagtgcggcaaggccttcagccagttcagcatgctgatcatccacgtgagaatccacaccggcgagaagccctacgagtgcaacgagtgcggcaaggccttcagccagagcagcgccctgaccgtgcacatgagaagccacaccggcgagaagccctacgagtgcaaggagtgcagaaaggccttcagccacaagaagaacttcatcacccaccagaagatccacaccagagagaagccctacgagtgcaacgagtgcggcaaggccttcatccagatgagcaacctggtgagacaccagagaatccacaccggcgagaagccctacatctgcaaggagtgcggcaaggccttcagccagaagagcaacctgatcgcccacgagaagatccacagcggcgagaagccctacgagtgcaacgagtgcggcaaggccttcagccagaagcagaacttcatcacccaccagaaggtgcacaccggcgagaagccctacgactgcaacgagtgcggcaaggccttcagccagatcgccagcctgaccctgcacctgagaagccacaccggcgagaagccctacgagtgcgacaagtgcggcaaggccttcagccagtgcagcctgctgaacctgcacatgagaagccacaccggcgagaagccctacgtgtgcaacgagtgcggcaaggccttcagccagagaaccagcctgatcgtgcacatgagaggccacaccggcgagaagccctacgagtgcaacaagtgcggcaaggccttcagccagagcagcagcctgaccatccacatcagaggccacaccggcgagaagcccttcgactgcagcaagtgcggcaaggccttcagccagatcagcagcctgaccctgcacatgagaaagcacaccggcgagaagccctaccactgcatcgagtgcggcaaggccttcagccagaagagccacctggtgagacaccagagaatccacacccactag

SEQ ID NO: 243605 - DNA, 1584 bp, Artificial Sequence
  derived and/or modified sequence
atgagaaaggagcactgcgagtacaacgagcccgtgaagagctacggcaacagcagcagccacttcgtgatcacccccttcaagtgcaaccactgcggcaagggcttcaaccagaccctggacctgatcagacacctgagaatccacaccggcgagaagccctacgagtgcagcaactgcagaaaggccttcagccacaaggagaagctgatcaagcactacaagatccacagcagagagcagagctacaagtgcaacgagtgcggcaaggccttcatcaagatgagcaacctgatcagacaccagagaatccacaccggcgagaagccctacgcctgcaaggagtgcgagaagagcttcagccagaagagcaacctgatcgaccacgagaagatccacaccggcgagaagccctacgagtgcaacgagtgcggcaaggccttcagccagaagcagagcctgatcgcccaccagaaggtgcacaccggcgagaagccctacgcctgcaacgagtgcggcaaggccttccccagaatcgccagcctggccctgcacatgagaagccacaccggcgagaagccctacaagtgcgacaagtgcggcaaggccttcagccagttcagcatgctgatcatccacgtgagaatccacaccggcgagaagccctacgagtgcaacgagtgcggcaaggccttcagccagagcagcgccctgaccgtgcacatgagaagccacaccggcgagaagccctacgagtgcaaggagtgcagaaaggccttcagccacaagaagaacttcatcacccaccagaagatccacaccagagagaagccctacgagtgcaacgagtgcggcaaggccttcatccagatgagcaacctggtgagacaccagagaatccacaccggcgagaagccctacatctgcaaggagtgcggcaaggccttcagccagaagagcaacctgatcgcccacgagaagatccacagcggcgagaagccctacgagtgcaacgagtgcggcaaggccttcagccagaagcagaacttcatcacccaccagaaggtgcacaccggcgagaagccctacgactgcaacgagtgcggcaaggccttcagccagatcgccagcctgaccctgcacctgagaagccacaccggcgagaagccctacgagtgcgacaagtgcggcaaggccttcagccagtgcagcctgctgaacctgcacatgagaagccacaccggcgagaagccctacgtgtgcaacgagtgcggcaaggccttcagccagagaaccagcctgatcgtgcacatgagaggccacaccggcgagaagccctacgagtgcaacaagtgcggcaaggccttcagccagagcagcagcctgaccatccacatcagaggccacaccggcgagaagcccttcgactgcagcaagtgcggcaaggccttcagccagatcagcagcctgaccctgcacatgagaaagcacaccggcgagaagccctaccactgcatcgagtgcggcaaggccttcagccagaagagccacctggtgagacaccagagaatccacacccactag

SEQ ID NO: 243606 - DNA, 2061 bp, Artificial Sequence
  derived and/or modified sequence
atgacagagtcacagggcacagttaccttcaaggacgtggcaatcgattttacccaagaggagtggaagcgtctggatccagcgcagcgtaagctgtaccggaatgttatgctggaaaactataataatctgatcaccgtggggtacccttttaccaagcccgacgtgattttcaaactggaacaggaagaggaaccatgggtaatggaggaggaggtcctgcggcgccattggcagggcgagatctggggtgttgacgagcaccagaagaaccaggatcggttactgcgccaggtcgaggttaagtttcagaagaccttgaccgaggagaaggggaacgaatgccagaagaaattcgcgaatgtcttcccactgaattccgacttcttcccaagccggcacaatctgtacgagtatgacctgtttggcaaatgcctcgagcacaatttcgactgccacaataatgtgaagtgcctgatgaggaaggagcattgcgagtacaacgagcctgtgaaatcgtacggaaattccagcagtcacttcgtcatcacgccttttaagtgtaatcactgcggcaaggggttcaatcagacgctggatttgatccggcatctccgtatccacaccggtgagaaaccctacgaatgcagcaattgtaggaaagctttttcgcacaaggaaaaactaattaaacattataagatacattctagagaacagtcatacaagtgtaatgaatgcggcaaggcattcattaaaatgagtaacctgatccgccaccagcgcatacacacaggtgaaaagccctacgcttgcaaggagtgtgaaaagagctttagccagaagagcaatctgattgaccacgagaaaattcatactggagaaaagccctatgaatgcaatgagtgcggcaaggcgttttctcagaagcagagcctgatcgctcatcagaaggtgcacaccggagaaaaaccttacgcctgcaacgaatgtggaaaggcgtttcctcgaatagcttccttagctctgcatatgcggtcccacacaggcgaaaagccatacaagtgcgataaatgcggaaaggctttctcccagtttagcatgcttatcattcacgtgcgaattcacacaggagaaaagccctatgagtgcaacgagtgcggcaaggctttttcccagtctagcgctctgaccgtgcacatgagatcccataccggagagaagccatacgaatgcaaggaatgtagaaaggccttttctcacaaaaagaactttatcactcatcagaaaatccacactagagaaaagccctatgaatgtaacgaatgtggtaaggctttcatccagatgtcaaacctcgtgcgacaccagaggattcacaccggggagaaaccttatatctgcaaggagtgtggaaaggcattttcccagaaatccaatctgatcgcccacgagaaaattcacagcggggagaagccgtacgaatgtaatgagtgcggcaaagctttttcccagaagcagaactttataactcaccagaaggtgcatactggcgaaaaaccatatgattgcaacgagtgcggaaaagccttctctcagattgcaagtttgaccctccatttacgcagtcacacgggcgagaaaccctatgagtgtgacaaatgtggtaaagcattttcacagtgttccctgctgaaccttcatatgcgttcccacacaggcgaaaagccctacgtgtgtaacgagtgtgggaaggccttcagccaaaggacaagcctgattgtacatatgcggggtcacaccggagaaaaaccttatgagtgcaacaagtgcggaaaagcattctctcagtcctcgagtttgaccattcatatccgtggacacactggagagaaacctttcgactgctccaaatgcggcaaggcattcagtcagatttccagtcttaccctgcacatgcggaaacataccggtgagaagccctaccattgtattgagtgtggcaaggccttctcccaaaagtcacacctcgtccgacatcaaagaatacacactcattag

SEQ ID NO: 243607 - DNA, 1584 bp, Artificial Sequence
  derived and/or modified sequence
atgcggaaggaacattgcgagtacaatgagcccgtgaagtcatatggtaacagcagcagccatttcgtcattaccccttttaagtgcaaccattgtggaaaaggctttaaccagacccttgatcttatccggcacctccgtatccatactggggaaaagccatatgaatgctctaattgccgcaaggcttttagtcacaaagagaagttgattaagcactataagattcacagccgagaacagtcctacaaatgcaacgaatgcggaaaggccttcatcaagatgtccaatttgatcagacaccagagaattcatactggcgagaagccttatgcctgcaaagagtgcgagaaatcttttagtcagaagtctaatctgatcgaccacgagaagatccatacgggagaaaagccctacgaatgcaacgaatgcggtaaggcttttagccagaagcagagtctgatcgcccatcagaaagtccacaccggcgagaagccctacgcatgcaatgaatgtggcaaggcgtttcctagaatcgcttcattggccctgcacatgcgatcacatacaggcgaaaagccctacaagtgcgataagtgtgggaaggctttctctcaatttagcatgcttataatccatgtgcgcatccacaccggggagaagccttacgagtgcaatgaatgtggcaaggctttcagtcagtcgtcagccctgacagtgcacatgaggtctcacaccggtgaaaagccttacgaatgtaaagaatgtcgcaaagcttttagtcataaaaaaaatttcattactcaccaaaagatccatacaagggagaagccctacgaatgcaacgagtgtggaaaagcatttattcaaatgtccaacctcgtgcgccaccaacgaatccataccggggaaaaaccatatatttgtaaagaatgtgggaaggcctttagccagaaatccaatctcattgcacacgagaaaattcacagtggtgagaaaccctatgaatgcaatgaatgcggaaaagccttctcacaaaagcaaaactttatcacacaccaaaaggtccatacaggcgagaaaccttacgattgcaatgaatgcggtaaagctttcagtcagatagcttccttaacactccacttgagatcccacacgggggaaaagccttacgaatgcgataagtgtgggaaggcgttcagccagtgttccctgctcaaccttcatatgcgttctcacaccggggagaagccctacgtctgcaacgaatgcggcaaagctttttcccaacgcacatccctcatcgtccatatgcgcggccatactggcgagaaaccttacgaatgcaacaagtgcggcaaagccttttcccagtccagcagcctaactatccacattaggggacacaccggcgaaaagccatttgattgctcaaaatgtggcaaagcatttagccagatatcaagtctgaccctccacatgaggaaacataccggcgagaaaccctaccactgtatcgagtgcggcaaggccttctctcaaaaaagccatctggtgcgacatcaacggattcatacccattag

SEQ ID NO: 243608 - DNA, 2061 bp, Artificial Sequence
  derived and/or modified sequence
atgacagagagccagggcaccgtgaccttcaaggatgtggccatcgacttcacccaggaggagtggaagaggctggaccctgcccagaggaagctgtacagaaatgtgatgctggagaactacaacaacctgatcaccgtgggctaccccttcaccaagccagatgtgatcttcaagctggagcaggaggaggagccctgggtgatggaggaggaggtgctgcggcggcactggcagggcgagatctggggcgtggatgagcaccagaagaaccaggaccggctgctgcggcaggtggaggtgaagttccagaagaccctgacagaggagaagggaaatgaatgccagaagaagtttgccaacgtgttccccctgaacagcgacttcttccccagccgccacaacctgtatgaatatgacctgtttgggaagtgcctggagcacaactttgactgccacaacaacgtgaagtgcctgatgaggaaggagcactgtgagtacaatgaacctgtgaagagctatggcaacagcagcagccactttgtgatcacccccttcaagtgcaaccactgtgggaagggcttcaaccagaccctggacctgatccgccacctgcgcatccacactggagagaagccctatgaatgtagcaactgcaggaaggccttcagccacaaggagaagctgatcaagcactacaagatccacagccgggagcagagctacaagtgcaatgaatgtgggaaggccttcatcaagatgagcaacctgatccgccaccagaggatccacactggagagaagccctatgcctgcaaggaatgtgagaagagcttcagccagaagagcaacctgattgaccacgagaagatccacactggagagaagccctatgaatgtaatgaatgtgggaaggccttcagccagaagcagagcctcatcgcccaccagaaggtgcacactggagagaagccctatgcctgcaatgaatgtgggaaggccttcccccgcatcgccagcctggccctgcacatgaggagccacactggagagaagccctacaagtgtgacaagtgtgggaaggccttcagccagttctccatgctgatcatccacgtgcgcatccacactggagagaagccctatgaatgtaatgaatgtgggaaggccttcagccagagcagcgccctgactgtgcacatgaggagccacactggagagaagccctatgagtgcaaggagtgcaggaaggccttcagccacaagaagaacttcatcacccaccagaagatccacacccgggagaagccctatgaatgtaatgaatgtgggaaggccttcatccagatgagcaacctggtgcgccaccagaggatccacactggagagaagccctacatctgcaaggaatgtgggaaggccttcagccagaagagcaacctgattgcccacgagaagatccacagcggggagaagccctatgaatgtaatgaatgtgggaaggccttcagccagaagcagaacttcatcacccaccagaaggtgcacactggagagaagccctatgactgcaatgaatgtgggaaggccttcagccagatcgccagcctgaccctgcacctgcggagccacactggagagaagccctatgaatgtgacaagtgtgggaaggccttcagccagtgcagcctgctgaacctgcacatgaggagccacactggagagaagccctacgtgtgcaatgaatgtgggaaggccttcagccagaggaccagcctcatcgtgcacatgaggggccacactggagagaagccctatgagtgcaacaagtgtgggaaggccttcagccagagcagcagcctgaccatccacatccggggccacactggagagaagccctttgactgcagcaaatgtgggaaggccttcagccagatcagcagcctgaccctgcacatgaggaagcacactggagagaagccctaccactgcattgaatgtgggaaggccttcagccagaagagccacctggtgcgccaccagaggatccacacccactag

SEQ ID NO: 243609 - DNA, 1584 bp, Artificial Sequence
  derived and/or modified sequence
atgaggaaggagcactgtgagtacaatgaacctgtgaagagctatggcaacagcagcagccacttcgtcatcacccccttcaagtgcaaccactgtgggaagggcttcaaccagaccctggacctgatccgccacctgcgcatccacactggagagaagccctatgagtgcagcaactgcaggaaggccttcagccacaaggagaagctgatcaagcactacaagatccacagccgggagcagagctacaagtgcaatgaatgtgggaaggccttcatcaagatgagcaacctgatccgccaccagaggatccacactggagagaagccctatgcctgcaaggaatgtgagaagagcttcagccagaagagcaacctgattgaccacgagaagatccacactggagagaagccctatgagtgcaatgaatgtgggaaggccttcagccagaagcagagcctgattgcccaccagaaggtgcacactggagagaagccctatgcctgcaatgaatgtgggaaggccttccccagaattgccagcctggccctgcacatgaggagccacactggagagaagccctacaagtgtgacaagtgtgggaaggccttcagccagttctccatgctgatcatccacgtgcgcatccacactggagagaagccctatgagtgcaatgaatgtgggaaggccttcagccagagcagcgccctgactgtgcacatgaggagccacactggagagaagccctatgagtgcaaggaatgtaggaaggccttcagccacaagaagaacttcatcacccaccagaagatccacacccgggagaagccctatgagtgcaatgaatgtgggaaggccttcatccagatgagcaacctggtgcgccaccagaggatccacactggagagaagccctacatctgcaaggaatgtgggaaggccttcagccagaagagcaacctgattgcccacgagaagatccacagcggggagaagccctatgagtgcaatgaatgtgggaaggccttcagccagaagcagaacttcatcacccaccagaaggtgcacactggagagaagccctatgactgcaatgaatgtgggaaggccttcagccagatcgccagcctgaccctgcacctgcggagccacactggagagaagccctatgaatgtgacaagtgtgggaaggccttcagccagtgcagcctgctgaacctgcacatgaggagccacactggagagaagccctacgtgtgcaatgaatgtgggaaggccttcagccagaggaccagcctgattgtgcacatgaggggccacactggagagaagccctatgagtgcaacaagtgtgggaaggccttcagccagagcagcagcctgaccatccacatccggggccacactggagagaagccctttgactgcagcaaatgtgggaaggccttcagccagatcagcagcctgaccctgcacatgaggaagcacactggagagaagccctaccactgcattgaatgtgggaaggccttcagccagaagagccacctggtgcgccaccagaggatccacacccactag

SEQ ID NO: 243610 - DNA, 2061 bp, Artificial Sequence
  derived and/or modified sequence
atgaccgagagccagggcaccgtgaccttcaaggacgtggccatcgattttacccaggaggagtggaagcgactcgatcctgcccaacgaaagctctaccgcaacgttatgctcgagaattataacaacctgatcactgtgggctatccgtttaccaagcctgacgtaatcttcaagctcgaacaggaagaagagccctgggtgatggaggaggaggtgctaaggagacactggcaaggggaaatttggggtgtagacgagcaccagaaaaatcaggaccgcttactgcgtcaggtagaggtgaaatttcagaagaccctgacggaagagaaaggcaatgagtgtcaaaagaagttcgccaacgttttcccattgaacagcgatttcttcccatctaggcataatctatacgaatacgacttgtttggaaaatgtcttgaacataatttcgattgccacaacaacgtaaaatgcctgatgaggaaggaacattgcgaatacaacgaacctgttaagtcatatggaaatagttcctcccattttgtgattaccccttttaaatgtaaccactgcgggaaaggctttaaccaaacactagatctgatcaggcacctgaggattcacacaggcgaaaagccatacgaatgctctaactgcaggaaggcgttctcccacaaagaaaagctgatcaagcactacaagattcattcaagggagcagtcttacaaatgtaacgaatgcggcaaggccttcataaaaatgtcaaacctgatcagacaccagcggatccacactggggaaaaaccctacgcttgtaaggaatgcgagaagtctttttcccagaagagtaacttgattgaccacgagaagattcacaccggcgagaaaccatatgaatgcaatgagtgtggaaaggccttttctcagaagcagtctctgatcgctcatcaaaaggtgcatacaggggagaagccctacgcgtgcaatgagtgtgggaaggcatttcctaggattgcctctctcgctctgcacatgaggtcacacacgggcgagaaaccatacaaatgtgacaagtgtggaaaggcattcagccagtttagcatgttgatcatccacgtgaggatccacactggcgaaaaaccttatgagtgcaacgaatgcggaaaagccttctcacagtctagtgccctaacagtacacatgcgtagccatactggagagaagccatacgagtgcaaagaatgcagaaaagccttttctcataagaaaaattttatcacccatcagaaaatccacacgcgggaaaagccatatgaatgtaatgagtgcgggaaagcatttattcagatgtctaatctggtcagacaccagaggatacatactggcgaaaaaccttatatatgcaaggagtgcggtaaggccttttctcaaaagtccaatctgatcgcacatgaaaagatacacagcggcgagaagccatacgagtgtaacgagtgcggcaaggcctttagccagaaacagaacttcatcactcaccagaaggttcacactggtgaaaagccatatgactgcaatgagtgtggcaaagccttctctcagatcgcctccctgaccctgcaccttcgaagtcatacaggggagaagccatacgagtgtgacaaatgcggaaaggctttctcccagtgtagcttgctgaatttgcatatgcggtcccatacaggcgagaaaccatatgtctgcaacgaatgtgggaaagccttcagccagcggactagcctcatcgtacacatgcgaggccacacaggtgaaaagccatatgagtgtaacaagtgtggaaaagcattcagccagtccagcagcctcacaatccatattcgtgggcacaccggcgagaagccctttgactgcagcaaatgtgggaaggctttctcccagatcagtagcttgaccctgcacatgcggaagcacaccggcgagaaaccttaccactgtattgaatgtggtaaggccttcagccagaaatcccatctcgtgcggcaccaacggatccacacccattag

SEQ ID NO: 243611 - DNA, 1584 bp, Artificial Sequence
  derived and/or modified sequence
atgcggaaggagcactgcgagtacaacgagcccgtgaagagctacggcaattcttcctcacacttcgttatcactccgttcaaatgtaaccactgtggcaaaggctttaaccagaccctcgaccttatccgccacctcaggatccatacaggagaaaaaccctatgaatgcagcaactgtcgcaaagcgttcagccacaaagagaagctgatcaagcattataaaatccattcaagagaacagtcatataaatgcaacgaatgcggaaaagcctttatcaaaatgtccaaccttattcggcatcaacgtatccataccggtgaaaaaccttacgcatgcaaagagtgtgaaaagtccttcagccagaagtccaacctgatcgatcatgagaagatccacactggcgaaaaaccatatgagtgcaatgagtgcggcaaggctttcagccagaaacagagtctcatagcgcaccaaaaggtgcatactggagaaaagccatatgcatgcaatgaatgtggtaaagcgttccccagaatcgctagcttggctcttcatatgcgcagtcatactggagagaagccctataaatgtgataaatgtggtaaagctttttcacagtttagcatgctgattatacacgtcaggatccacacgggagagaaaccttatgagtgtaatgagtgtggaaaagcatttagccagagttctgctctgaccgtccatatgaggagccacacgggcgagaagccttacgaatgcaaagaatgcaggaaggcttttagccataagaagaatttcatcactcatcaaaaaatccacactcgggagaaaccctatgaatgcaacgagtgcggcaaagccttcatacaaatgtcaaatcttgtgcgccaccagcgcatacacacaggtgagaaaccgtacatctgcaaagagtgtggcaaagcgttttcacagaagtccaacctgatcgcccacgagaagatccactctggtgaaaagccatacgagtgtaacgaatgcggtaaggcattttcccaaaagcaaaactttattacacaccaaaaggtccataccggggaaaaaccctacgactgcaacgagtgtggaaaggccttcagccagatcgcatcgttgaccttacatctgcgtagccacacgggcgagaaaccttacgaatgtgataagtgcggaaaagccttctcacaatgcagcttgctgaacctgcatatgcgttctcacacaggcgagaaaccatatgtgtgcaacgaatgcggaaaggcctttagtcagcgcaccagcttgattgtgcatatgaggggtcataccggcgagaaaccttatgaatgcaacaaatgcggaaaggcttttagtcagtcgagttccctcaccattcatataagaggccatactggtgagaagcccttcgattgcagtaagtgcggaaaggccttctcccaaatatctagtttaactctgcacatgcggaaacacaccggtgagaagccttaccactgtatcgaatgcgggaaggcttttagtcaaaagtctcaccttgtaaggcatcagagaatacacacccattag

SEQ ID NO: 243612 - DNA, 2061 bp, Artificial Sequence
  derived and/or modified sequence
atgacagagagtcagggcacagtgacttttaaggatgtggctattgactttactcaggaggagtggaaaagattggatcctgcccaacggaagctctaccggaatgtaatgctggaaaactataacaacttgatcactgtgggttaccccttcacaaaaccggatgttattttcaagctggaacaagaagaggagccttgggtcatggaggaggaggttcttcgtcggcattggcagggcgaaatttggggggtagatgagcaccagaagaaccaggataggctcttacgccaggtagaggtgaagttccagaagaccctgaccgaagagaaagggaacgagtgccaaaaaaagtttgctaacgtgttccccctgaacagcgacttttttccaagccggcacaacctgtacgagtacgacctattcgggaaatgtctggaacacaactttgattgtcataataacgttaagtgtctcatgcggaaagaacattgtgagtataatgagcccgttaaatcatacggaaatagctcaagtcacttcgttattaccccattcaagtgtaatcattgtggaaagggcttcaatcagacactggatctgatccggcacctacgcatccacacaggagagaagccatacgagtgtagcaactgccgcaaggcctttagccataaggaaaaactcatcaagcattacaagattcactcccgcgaacagtcatataaatgtaatgagtgtggtaaagcctttattaaaatgagcaacctgattcgccatcaacgcattcacactggcgagaagccctacgcatgtaaggaatgcgaaaagtcattcagccagaagtctaaccttattgaccatgaaaaaatacataccggagaaaagccttatgagtgtaacgagtgtggcaaggcatttagtcagaaacagagtcttatcgcccaccagaaagtgcacacaggcgagaagccctacgcatgcaatgagtgtggaaaagcttttcccagaatcgcgtccctagctttgcatatgcgaagtcacaccggagagaagccgtacaagtgtgataaatgtggtaaggccttttcccagttcagcatgctgatcatccacgtacggatccataccggcgaaaagccgtacgagtgtaacgagtgcggcaaagctttttcccagtccagtgctctcaccgttcatatgagaagccatacaggggagaaaccgtatgagtgtaaagagtgcagaaaagctttcagccacaaaaagaacttcatcacacatcaaaagatacatactcgcgaaaagccctatgagtgtaatgagtgtggcaaggcatttattcagatgtcaaatcttgtgagacatcagagaatccatactggtgaaaaaccatacatctgcaaggagtgtggtaaggcattcagccagaaaagtaatcttatcgcacacgagaaaattcacagtggcgaaaaaccatacgagtgtaacgagtgtggaaaggcctttagtcaaaaacagaactttatcacccatcagaaagtgcacaccggagaaaagccatacgattgcaacgaatgtggaaaggctttcagccagattgcatccctaacattacatcttcgcagtcacaccggtgagaaaccatacgagtgtgataagtgcggtaaggcttttagccagtgtagtctactgaatctccacatgagatctcacacgggggaaaaaccttacgtctgcaacgagtgtggcaaggcgttctcacagcggacatcactgatagtccacatgagaggccacacgggcgagaagccatacgaatgtaacaaatgcggcaaagctttcagccagtcaagttccctgacaatccatatcagaggacacaccggcgagaaaccattcgactgttccaaatgcggcaaggccttctcacagatcagctctcttacacttcacatgaggaagcacaccggcgaaaagccctaccactgtatcgagtgtggtaaagccttctctcagaagagccatttggtgcggcaccaaagaattcatacccactag

SEQ ID NO: 243613 - DNA, 1584 bp, Artificial Sequence
  derived and/or modified sequence
atgaggaaggagcattgcgagtacaacgagccagtaaaaagctacggcaactcatcctcacacttcgtcataactccatttaaatgcaaccactgcggcaaagggtttaatcagactttggatttgatccgtcacttgaggatccacacaggagaaaagccctatgaatgctcaaactgtcgcaaggctttcagccacaaagaaaaactgatcaagcattataagatacactcccgagaacaatcatacaaatgtaatgagtgtgggaaggcattcatcaagatgtctaacctgattcggcaccagcgcatccatacaggagagaaaccttacgcttgtaaggaatgtgagaaatcttttagccagaaatccaacctgatcgatcatgaaaaaatacatacgggtgaaaagccttatgaatgcaatgagtgcgggaaagcattcagtcagaagcagtccctgattgcccaccaaaaagtgcatacaggggaaaaaccttatgcgtgcaatgagtgtggaaaagcctttccccgaattgcatctcttgcccttcatatgaggagccataccggcgagaagccatataaatgtgataaatgtggtaaagccttttcccagttcagcatgctcatcatccatgtccgaatccacactggtgaaaaaccctatgagtgtaatgaatgcggaaaggccttctctcagtcttccgccctgacggtgcatatgcgatcacacaccggagagaagccttatgaatgcaaggaatgtcggaaggccttctctcacaaaaagaatttcataacccaccagaaaatccatacccgcgagaaaccatacgagtgcaacgaatgcggcaaggccttcatccagatgagcaacttagttagacaccagcgaatacacactggtgagaagccatacatttgtaaagaatgcggcaaagccttttctcaaaagagtaatctgattgcacacgagaaaattcactccggcgaaaagccctatgaatgtaatgagtgtggcaaggctttttcccagaagcagaatttcattacacatcaaaaggtccacacaggcgagaaaccatatgattgtaatgagtgcgggaaagccttctcccagattgcgtcactgacactacacttgagaagccataccggagaaaagccttatgaatgcgataagtgcggcaaggcgttctctcaatgttctctcctgaacctgcacatgcggtcccacacaggagagaagccttacgtttgtaatgagtgtggaaaagcattcagtcagcgaaccagcctcatcgtccacatgagaggccacacaggagaaaaaccatacgagtgcaacaaatgcggaaaagcatttagtcagagctcatcactcacgatccatatccgcggtcataccggtgaaaagccattcgattgtagtaagtgtgggaaggccttttcacaaatctcttctttgacgctgcacatgaggaaacacaccggagaaaagccctaccattgcatcgagtgtggcaaggcctttagccagaaaagccacttggtgaggcaccagcgaatccatactcattag

SEQ ID NO: 243614 - DNA, 2352 bp, Artificial Sequence
  derived and/or modified sequence
tgtagtaactgtagaaaagccttcagtcacaaggaaaaacttattaaacattataaaattcacagtagggagcagtcttacaaatgtaatgaatgtggtaaagctttcattaaaatgtcaaatctcattagacatcaaagaattcatactggagagaagccctatgcatgtaaggaatgtgagaagtccttcagccagaaatcaaatcttattgatcatgaaaaaattcatactggagagaaaccttatgaatgtaatgagtgtggaaaagcattcagccagaagcaaagcctcattgcacatcagaaagttcatactggggagaaaccttatgcatgtaatgaatgtggtaaagccttccctcgaattgcatcccttgctcttcatatgagaagtcatacaggagaaaaaccttataaatgtgataaatgtggtaaagccttctctcagttttccatgcttattatacatgttagaattcatacaggtgaaaaaccctatgaatgtaatgagtgtggaaaagccttctctcaaagctcagcccttactgtacatatgagaagtcacactggtgagaaaccctatgaatgtaaggaatgcagaaaagccttcagccacaagaaaaacttcattacacaccagaaaattcatactagagagaaaccttatgagtgtaatgaatgtgggaaagcttttatacagatgtcaaatcttgttagacaccagagaattcatactggggaaaaaccctatatatgtaaggaatgtgggaaagcctttagccagaaatcaaatctcattgctcatgaaaaaattcattctggagagaaaccctatgaatgcaatgaatgtggtaaagccttcagccaaaagcaaaacttcattacacatcaaaaagttcatactggagagaaaccttatgattgtaatgaatgtggtaaagccttctctcaaattgcatcccttacccttcatttgagaagtcatacaggggaaaagccttatgaatgtgataaatgtggtaaagccttctctcagtgctcactgcttaatttacatatgagaagtcacacaggtgagaagccctatgtatgtaatgaatgtgggaaagccttctctcaaagaacttcccttattgtgcacatgagaggccatacaggtgaaaaaccctatgaatgtaataaatgtggaaaagccttctcccaaagctcatcccttactatacatatacgaggacatacaggtgagaaacccttcgactgtagtaaatgtggaaaagccttctctcaaatctcatctcttacccttcatatgagaaaacatacaggtgagaagccctatcactgtattgagtgtggcaaggctttcagccaaaagtcgcaccttgttagacaccagagaattcatactcattagaaaccctatgaatattgtgaatatggcaaggccatctgaaggaattaacacctcattgcacattacatgatcacttccagagtagaaaactatgaatgtgggatagccttctgaaaaagccacaaatttatgaaacattagagaattcttccaaggtgacaaattatataatgaaaaagctgttaccagaaactttcagcagacatcttattgataatatttaatcagcattctcattgaaatctgaaacaaggtatcttccatcagcataacaacacaacacttgagctcctagccaatgtattaagtaaggaaaacaagtatcaacgaagaactataaaaataacttttatacaagaaataattagaaaatgtgttgatagaaaacctaagaataaacacaacaatgagttaggtctttatcaagttataaaatatgttgaaaggcacaaaagaacacctgaaaaatgatattttgtctgaaaagacttgacattgtaaaaatataatttctctcccaaatcactaagtttaatatacttctgaagtttacatcagttttattttaaggaacttcacaaacttatccaaaaattttatgtggaaaagtaaagaaacacaaatagctgaaacaaacttgacaaagcaagtagagaagacacactctattattagatatatcatgtacttatttaaagctgctgtcatttaaacaatgtattaccaagtgaataaatcaagcagtagtaagatagtgagcattcatacaaaaatccaagaagatacaggaattctgtgtatgacagtgctattgaaatcactggggaatgaatggcttatttaataaatggaaggttcataggagaaaaattttagctttctactttatatcatatacaaaaataaaatccaactaaagaccagaatataaaaagc

SEQ ID NO: 243615 - DNA, 1918 bp, Artificial Sequence
  derived and/or modified sequence
cttctgcaggccccatcccttcccagaaagaagaggaaatgactgagtcccaggagaaatatggggagttgatgagcatcagaaaaaccaggacagacttttgagacaagttgaagttaaattccagaaaacactgactgaagaaaaaggcaatgaatgtcaaaagaaatttgcaaatgtatttcctctgaactctgattttttcccttccagacacaatctctatgagtatgacttatttggaaagtgtttagaacataattttgactgtcataataatgtgaaatgccttatgagaaaggagcattgtgaatataatgaacctgtgaaatcatatggtaatagctcatcccattttgtcattaccccctttaagtgtaatcattgtggaaaaggcttcaatcagactttggacctcatcagacatctgagaattcatactggagagaagccctatgaatgtagtaactgtagaaaagccttcagtcacaaggaaaaacttattaaacattataaaattcacagtagggagcagtcttacaaatgtaatgaatgtggtaaagctttcattaaaatgtcaaatctcattagacatcaaagaattcatactggagagaagccctatgcatgtaaggaatgtgagaagtccttcagccagaaatcaaatcttattgatcatgaaaaaattcatactggagagaaaccttatgaatgtaatgagtgtggaaaagcattcagccagaagcaaagcctcattgcacatcagaaagttcatactggggagaaaccttatgcatgtaatgaatgtggtaaagccttccctcgaattgcatcccttgctcttcatatgagaagtcatacaggagaaaaaccttataaatgtgataaatgtggtaaagccttctctcagttttccatgcttattatacatgttagaattcatacaggtgaaaaaccctatgaatgtaatgagtgtggaaaagccttctctcaaagctcagcccttactgtacatatgagaagtcacactggtgagaaaccctatgaatgtaaggaatgcagaaaagccttcagccacaagaaaaacttcattacacaccagaaaattcatactagagagaaaccttatgagtgtaatgaatgtgggaaagcttttatacagatgtcaaatcttgttagacaccagagaattcatactggggaaaaaccctatatatgtaaggaatgtgggaaagcctttagccagaaatcaaatctcattgctcatgaaaaaattcattctggagagaaaccctatgaatgcaatgaatgtggtaaagccttcagccaaaagcaaaacttcattacacatcaaaaagttcatactggagagaaaccttatgattgtaatgaatgtggtaaagccttctctcaaattgcatcccttacccttcatttgagaagtcatacaggggaaaagccttatgaatgtgataaatgtggtaaagccttctctcagtgctcactgcttaatttacatatgagaagtcacacaggtgagaagccctatgtatgtaatgaatgtgggaaagccttctctcaaagaacttcccttattgtgcacatgagaggccatacaggtgaaaaaccctatgaatgtaataaatgtggaaaagccttctcccaaagctcatcccttactatacatatacgaggacatacaggtgagaaacccttcgactgtagtaaatgtggaaaagccttctctcaaatctcatctcttacccttcatatgagaaaacatacaggtgagaagccctatcactgtattgagtgtggcaaggctttcagccaaaagtcgcaccttgttagacaccagagaattcatactcattagaaaccctatgaatattgtgaatatggcaaggccatctgaagg

SEQ ID NO: 243616 - protein, 500 aa, Artificial Sequence
  derived and/or modified sequence
MRNWLVLLCPCVLGAALHLWLRLRSPPPACASGAGPADQLALFPQWKSTHYDVVVGVLSARNNHELRNVIRSTWMRHLLQHPTLSQRVLVKFIIGAHGCEVPVEDREDPYSCKLLNITNPVLNQEIEAFSLSEDTSSGLPEDRVVSVSFRVLYPIVITSLGVFYDANDVGFQRNITVKLYQAEQEEALFIARFSPPSCGVQVNKLWYKPVEQFILPESFEGTIVWESQDLHGLVSRNLHKVTVNDGGGVLRVITAGEGALPHEFLEGVEGVAGGFIYTIQEGDALLHNLHSRPQRLIDHIRNLHEEDALLKEESSIYDDIVFVDVVDTYRNVPAKLLNFYRWTVETTSFNLLLKTDDDCYIDLEAVFNRIVQKNLDGPNFWWGNFRLNWAVDRTGKWQELEYPSPAYPAFACGSGYVISKDIVKWLASNSGRLKTYQGEDVSMGIWMAAIGPKRYQDSLWLCEKTCETGMLSSPQYSPWELTELWKLKERCGDPCRCQAR

SEQ ID NO: 243617 - DNA, 1503 bp, Artificial Sequence
  derived and/or modified sequence
atgagaaactggctggtgctgctgtgcccctgcgtgctgggcgccgccctgcacctgtggctgagactgagaagccccccccccgcctgcgccagcggcgccggccccgccgaccagctggccctgttcccccagtggaagagcacccactacgacgtggtggtgggcgtgctgagcgccagaaacaaccacgagctgagaaacgtgatcagaagcacctggatgagacacctgctgcagcaccccaccctgagccagagagtgctggtgaagttcatcatcggcgcccacggctgcgaggtgcccgtggaggacagagaggacccctacagctgcaagctgctgaacatcaccaaccccgtgctgaaccaggagatcgaggccttcagcctgagcgaggacaccagcagcggcctgcccgaggacagagtggtgagcgtgagcttcagagtgctgtaccccatcgtgatcaccagcctgggcgtgttctacgacgccaacgacgtgggcttccagagaaacatcaccgtgaagctgtaccaggccgagcaggaggaggccctgttcatcgccagattcagcccccccagctgcggcgtgcaggtgaacaagctgtggtacaagcccgtggagcagttcatcctgcccgagagcttcgagggcaccatcgtgtgggagagccaggacctgcacggcctggtgagcagaaacctgcacaaggtgaccgtgaacgacggcggcggcgtgctgagagtgatcaccgccggcgagggcgccctgccccacgagttcctggagggcgtggagggcgtggccggcggcttcatctacaccatccaggagggcgacgccctgctgcacaacctgcacagcagaccccagagactgatcgaccacatcagaaacctgcacgaggaggacgccctgctgaaggaggagagcagcatctacgacgacatcgtgttcgtggacgtggtggacacctacagaaacgtgcccgccaagctgctgaacttctacagatggaccgtggagaccaccagcttcaacctgctgctgaagaccgacgacgactgctacatcgacctggaggccgtgttcaacagaatcgtgcagaagaacctggacggccccaacttctggtggggcaacttcagactgaactgggccgtggacagaaccggcaagtggcaggagctggagtaccccagccccgcctaccccgccttcgcctgcggcagcggctacgtgatcagcaaggacatcgtgaagtggctggccagcaacagcggcagactgaagacctaccagggcgaggacgtgagcatgggcatctggatggccgccatcggccccaagagataccaggacagcctgtggctgtgcgagaagacctgcgagaccggcatgctgagcagcccccagtacagcccctgggagctgaccgagctgtggaagctgaaggagagatgcggcgacccctgcagatgccaggccagatag

SEQ ID NO: 243618 - DNA, 1503 bp, Artificial Sequence
  derived and/or modified sequence
atgagaaactggctcgtcctcctgtgtccttgtgttctgggcgccgctcttcacctctggctgcgcctgcgctctccacctcctgcatgcgcttctggagccgggccggccgatcagctcgccctgttcccgcaatggaagtctactcattacgatgttgtggtgggcgtcttgagtgcacggaacaatcacgaactgaggaatgtcatacggagtacctggatgcgacacctgctccagcacccaaccctttcgcaaagagttctagttaaattcataattggcgcccatggatgcgaagtgcctgtggaggatcgtgaggatccttacagttgtaaactcttgaacatcaccaatccagttctcaatcaggagattgaggctttcagtctgagtgaagacacaagttctggactgcctgaggatcgggtcgtatctgtatcctttagggtcctataccctattgtaatcactagtctgggggttttttacgacgccaatgatgttgggttccaacggaacatcacagtcaaattgtatcaggccgagcaagaggaagccctgtttatagcccggttttccccgccgtcttgtggggtgcaggtcaacaaactgtggtacaaaccagttgagcagttcatcctgcctgaaagtttcgagggcaccattgtttgggagagccaggacttgcacggactcgtctcgagaaacctccataaagtcaccgtgaacgacggggggggcgttctgcgagtcatcaccgccggggaaggagcccttccgcacgagttcctggagggcgtggaaggagttgccgggggttttatttataccatacaggagggcgacgcactgttgcacaacttacactcccgcccacaacgtttgattgaccatataaggaatctgcacgaggaggatgccctgctgaaggaagagtctagtatttacgatgacatcgtctttgtcgatgttgttgacacgtaccgcaacgtgccagctaaattacttaatttctatcgatggactgtggaaaccacctcatttaatcttcttctgaaaacggatgacgactgctatattgatctagaggctgtcttcaaccggatcgtccaaaaaaacctggacggcccgaacttttggtggggaaactttagactcaattgggctgtagataggaccggtaaatggcaagaactggagtaccccagccccgcctaccccgcttttgcctgtggaagtggatacgtgattagcaaggatatcgttaagtggttagcttctaacagcgggcgccttaagacctaccagggggaggacgtgtctatgggaatatggatggccgccattggcccaaaaagatatcaggactcgctgtggctttgtgagaaaacttgtgaaacaggaatgctttcctccccccagtatagtccatgggaactgacagagctctggaagttaaaagagcggtgtggcgacccgtgcaggtgccaagcacggtag

SEQ ID NO: 243619 - DNA, 1503 bp, Artificial Sequence
  derived and/or modified sequence
atgaggaactggctggtgctgctgtgcccctgtgtgctgggcgccgccctgcacctgtggctgcggctgcggagccccccaccagcctgtgccagcggggccggccctgctgaccagctggccctcttcccccagtggaagagcacccactatgatgtggtggtgggcgtgctgagcgccaggaacaaccacgagctgagaaatgtcatccgcagcacctggatgaggcacctgctgcagcaccccaccctgagccagagggtgctggtgaagttcatcatcggggcccacggctgtgaggtgcctgtggaggaccgggaggacccctacagctgcaagctgctgaacatcaccaaccctgtgctgaaccaggagattgaggccttcagcctgtctgaggacaccagcagcggcctgcctgaagatagagtggtgtctgtgtccttccgggtgctgtaccccatcgtcatcaccagcctgggcgtcttctatgatgccaatgatgtgggcttccagaggaacatcaccgtgaagctgtaccaggccgagcaggaggaggccctcttcatcgcccgcttcagcccccccagctgtggggtgcaggtgaacaagctgtggtacaagcctgtggagcagttcatcctgcctgagagctttgagggcaccatcgtgtgggagagccaggacctgcacggcctggtgtccaggaacctgcacaaggtgacagtgaatgatggcggcggcgtgctgcgggtcatcacagctggggagggcgccctgccccatgagttcctggagggcgtggagggcgtggccggcggcttcatctacaccatccaggagggagatgccctgctgcacaacctgcacagccggccccagaggctgattgaccacatccggaacctgcacgaggaggatgccctgctgaaggaggagagcagcatctatgatgacatcgtgtttgtggatgtggtggacacctacagaaatgtgcctgccaagctgctgaacttctaccgctggacagtggagaccaccagcttcaacctgctgctgaagacagatgatgactgctacatcgacctggaggccgtgttcaaccgcatcgtgcagaagaacctggatggccccaacttctggtggggcaacttccggctgaactgggccgtggacagaacaggcaagtggcaggagctggagtaccccagccctgcctacccagcctttgcctgtggcagcggctacgtgatcagcaaggacatcgtgaagtggctggccagcaacagcggccgcctgaagacctaccagggagaagatgtgtccatgggcatctggatggccgccatcggccccaagcgctaccaggacagcctgtggctgtgtgagaagacctgtgagaccggcatgctgagcagcccccagtacagcccctgggagctgacagagctgtggaagctgaaggagcgctgtggggacccctgccgctgccaggccaggtag

SEQ ID NO: 243620 - DNA, 1503 bp, Artificial Sequence
  derived and/or modified sequence
atgcggaactggctggtgctgctgtgcccctgcgtgctgggcgccgcactgcatttatggcttcgcctgcgcagtcctcccccggcatgtgcgagcggagcgggtcccgctgaccagctggcactcttccctcagtggaagtctacgcactacgatgtcgtagtcggcgtgctgtctgctaggaacaaccacgaattgcgtaatgtcattaggtcaacatggatgaggcatcttctccagcatcctactctgtcgcagagagtgttagtgaagtttataatcggtgcacacggctgcgaagtacccgtcgaagacagggaagacccatacagttgcaaactgctgaatatcacaaacccagtactgaaccaggagatagaggcattcagcctttcggaagacacgtctagtgggttacccgaagaccgggtcgtctccgttagcttccgggtgctgtaccctatcgtgattacctcgctcggagtgttttacgatgccaatgacgtcggattccagagaaatataacggttaagttgtatcaggcagaacaggaggaagccctgtttatcgctcggttttctccgccaagttgtggcgttcaagtcaacaaactgtggtacaaaccagtcgaacagttcatactcccagagtcgttcgaaggtacaatcgtgtgggagtcccaagaccttcacgggctagttagtcggaaccttcataaagttacggtaaacgacgggggcggggtgttacgcgtcataacagcaggtgagggcgcactcccgcatgagttcctggagggggtcgagggggtcgccggcggctttatatacacaattcaagaaggagacgccttacttcataacctgcactctagaccgcagcggctaattgaccatatccgcaatttgcatgaggaagatgctttactgaaggaggagtcttctatttacgatgacatcgtcttcgtggacgtggtggacacctataggaacgtgcccgcaaaattactcaacttttaccgctggacggtggaaacaaccagcttcaatctactattgaaaacagacgatgattgttatatcgacttggaggcggtgttcaatcggatcgtgcagaagaacctcgatggacccaatttctggtggggaaacttccgactcaattgggccgtggacagaaccgggaagtggcaggaattggagtacccatctccagcctacccagctttcgcatgtgggagcggttatgtcatcagcaaagacatcgttaaatggttagcttctaattccggtaggctcaaaacttaccaaggtgaggacgtatccatgggcatttggatggctgcaataggaccaaaaagatatcaggattctctgtggctctgcgagaagacctgtgagaccgggatgctctcgtccccgcaatactcaccatgggaactgacagagctctggaagttaaaggagagatgcggtgatccttgcagatgccaggcgagatag

SEQ ID NO: 243621 - DNA, 1503 bp, Artificial Sequence
  derived and/or modified sequence
atgcgcaattggttagtgctgctatgtccctgtgtcctcggagctgccctccacctgtggctaaggctgagatctcccccacccgcttgcgcatccggcgctggtcctgccgaccagctggccctgttcccccagtggaagagtactcactatgatgttgttgttggagtgctgtctgcccgtaataaccatgaactgagaaacgtgattagatctacttggatgaggcatctgctacagcatcccaccctttcccagcgagtgctggtcaagttcatcatcggcgcacacggttgcgaggtacctgtggaggatagagaggatccatactcctgtaagctcctaaacatcaccaatcccgtgctgaatcaagaaattgaagctttcagtctgtctgaggatacgtccagcggcttgcccgaagaccgcgtagtctccgttagtttccgagtgctttaccctatagtgattacaagcctgggagtcttctacgacgccaacgacgtgggattccagagaaatattaccgttaagctgtaccaggccgagcaagaggaggcactttttattgccaggttcagtcctccttcgtgtggtgttcaagtgaataaactgtggtacaaacctgttgagcaatttattctgcccgaatctttcgaaggaaccatcgtgtgggaatcacaagacttacacggacttgtctcccggaatctgcataaggtgaccgttaatgacggcggtggggtgttaagagtgattacagccggagagggggcactgcctcatgagttcctggaaggtgtggagggggtagctggcggatttatttatactatccaggagggtgacgccctactccataatctgcactctcggccacagcgattgatcgatcacatccggaatcttcacgaggaggacgccctcctaaaagaagaatcctctatctatgatgatatagtctttgtggatgttgttgacacctatcggaatgttccagctaaattattgaatttttatcgttggactgtggaaacaacatcgttcaatcttctgctgaaaacagacgacgactgctatatcgatttagaggccgttttcaatcgcatagtgcagaagaatctcgacggaccgaatttctggtggggcaactttagactaaattgggctgtggatcgcacaggcaagtggcaggaactggagtacccttcccctgcctaccctgcctttgcctgcgggtcaggctatgtgatatcaaaggatatcgtcaaatggctggcctcaaactcaggacggctgaaaacttaccagggcgaggacgtgtccatgggcatctggatggccgctatcgggccaaagcgatatcaggattctctgtggttatgcgaaaaaacctgcgagactggtatgctctcctctccccaatatagcccctgggagttgacagagctgtggaaacttaaggagcggtgcggggacccatgcagatgccaagccaggtag

SEQ ID NO: 243622 - DNA, 4843 bp, Artificial Sequence
  derived and/or modified sequence
aggcggagggggcggggcttcggccggctaagccgcggccacccgcggtctgagggaccggaggagcggggccgggagctgcgaggagccctccagacgtcgccgagcgcgagggcgggcgtgctcggagtggtcgctcgtcagccgccgcccctcagtctccgcacttgcaggtcccctccctctccgccgggacgcgggagagcccggctcgcggcgggggcggccaatgcgaaactggctggtgctgctgtgcccgtgtgtgctcggggccgcgctgcacctctggctgcggctgcgctccccgccgcccgcctgcgcctccggggccggccctgcaggtggagtctcactcttgttgcccaggctggagtgcaatggcgcggtctcggctcaccccaacctccacctcccgggttcaagagattctcctgcctcagcctcccaagtagctgggataacagatcagttggccttatttcctcagtggaaatctactcactatgatgtggtagttggcgtgttgtcagctcgcaataaccatgaacttcgaaacgtgataagaagcacctggatgagacatttgctacagcatcccacattaagtcaacgtgtgcttgtgaagttcataataggtgctcatggctgtgaagtgcctgtggaagacagggaagatccttattcctgtaaactactcaacatcacaaatccagttttgaatcaggaaattgaagcgttcagtctgtccgaagacacttcatcggggctgcctgaggatcgagttgtcagcgtgagtttccgagttctctaccccatcgttattaccagtcttggagtgttctacgatgccaatgatgtgggtttccagaggaacatcactgtcaaactttatcaggcagaacaagaggaggccctcttcattgctcgcttcagtcctccaagctgtggtgtgcaggtgaacaagctgtggtacaagcccgtggaacaattcatcttaccagagagctttgaaggtacaatcgtgtgggagagccaagacctccacggccttgtgtcaagaaatctccacaaagtgacagtgaatgatggagggggagttctcagagtcattacagctggggagggtgcattgcctcatgaattcttggaaggtgtggagggagttgcaggtggttttatatatactattcaggaaggtgatgctctcttacacaaccttcattctcgccctcaaagacttattgatcatataaggaatctccatgaggaagatgccttactgaaggaggaaagcagcatctatgatgatattgtttttgtggatgttgtcgacacttatcgtaatgttcctgcaaaattattgaacttctatagatggactgtggaaacaacgagcttcaatttgttgctgaagacagatgatgactgttacatagacctcgaagctgtatttaataggattgtccaaaagaatctggatgggcctaatttttggtggggaaatttcagactgaattgggcagttgaccgaaccggaaagtggcaggagttggagtacccgagccccgcttaccctgcctttgcatgtgggtcaggatatgtgatctccaaggacatcgtcaagtggctggcaagcaactcggggaggttaaagacctatcagggtgaagatgtaagcatgggcatctggatggctgccataggacctaaaagataccaggacagtctgtggctgtgtgagaagacctgtgagacaggaatgctgtcttctcctcagtattctccgtgggaactgacggaactgtggaaactgaaggaacggtgcggtgatccttgtcgatgtcaagcaagataacagggacttgaattagcagagtctaaaatcagggcaggcaaacgataatctgagtgcaagtctgaggagtcccagggtttagcagtagactgtatggtctttcaagagagttccagactggcactttcacccagaaccaatgcggtgtttcttaatgtttgcacaaatttccttaaaaatcaacttgtactgtagcataagaaaagtttttatttatctattggaagattatcagaaaaataccaagttattttataaaagaaaaaatatttctaaatcctgatgcattgtggctaattagtaattcaccattacctatagtttttggttaaaacttggcctagttcagaaatctgtagtagtaactgagagtttgaatttcaacctggattgcaggatagctctgtagagctaattaggataattatcagacaaaaaggaactcacaggaatgctgtgtgatcatgtgatcacatatttgagcagtggtcacttataccaaagtttggggtttctggaaataatgtcagattttgtggatctctgaagtgggcaacttgaactaacttgaagaggaaccaatatgattctcagttctgaaccttggttttaaagaagttcatttatatggtagactaatacccaaattttctttctgccatctaacataaatcctgaaggtcacagtttagtactcatagtttttaaatgctaaagttgtgtgagtatgaataaaagcaaatacctctcagggttttagtgccatcgggaaggatatttctaaattttgttgacattttgaaagaattagttttgctttcctcctatcattgcctaatgtttacctaatatgagtacatttcaatcaaagctggttatcacagaagaagatatactcagcttaggtataattgtagggaaaagcatgtgattaatttaagtactcttagaaatagtgcaactgagaagacagataatagcatattgttatacatagtagaggatgtctccccaagtttaagggacatttcccaaaatgaccaaccaaatcatttctagtaaccctttaaaatagtagtttcaatagagaattccattaaaactagtcttatgacagatattaactgtgttcagattttattaggctagctagtttctttctatttaatatttaaatcttatcatgaaatgcagtgatgagctgtaaaaataaatatgaaataagatcagaaaatcattagtaggttcaaagcctttattattgctattatgtataagcctagaaatggtcacttcccaacaaaaaatacatcccttgttatacttaggacaagttgtaaaccccctttgttttgacagtagaattgttccagtgaatcatttatttccggtgaaccccagacacgataagcagtgtggtctttaaattttattagttggttgtcaccatcgcactaatagacaatctccattttccacagaataaaactgtaatgactttaggtcattttccagctcgatttctctgcccggcttctaaaattagaacgaaggtggggaaggatgtgattaagacagatccgataaagcatgctacacatactcttcccccaccccgtccccaggcagtagcttacccttaaaatcaaacaaacagacccatggtctccatttagaatcaaactgttgctatctagagacagtttaatgtcataatacgaggactaagcttgactttgactttgtattttgctgggcaacttactttgggactttcataggacaacagaaggtctgacacaggaactttgagaagacgtgacagcaatcccttcaccttttgaattgtcatggagcctatcaaaagacaagaaaagtccattcgttctctcaaatgacagttacctgtaaaactagctcatgtgatgagaccacagtatcattgcaatgatagctgtatctgtcttttttttttttttttttttgagactgacttacttacttacttaagtaagtcttgctctgtcgcccaggctggagtgcaatggtgtaatctcggctcactgcaacctccgcttcccgggttcaaacaattctcctgcctcagcctcctgagtagctggtgcccatcaccacacccagctaacttttgtatttttagtagagacggggtttcaccatgttggccaggctggtcttgaactcctgacctcgtgatccgcccgccctggccccccaaagtgctgggattacaagcatgagcccagcgcctggctgtatctttcattttacccaagtcactttacccaagtaagtaattaggggaaagcctgagtcttgtaccacctgttcatttggggaactgtgggaaacggagccaacggacctaagtgccctttgacagtgagtttcataccatttcagtagtgtatttctttcttaatctgaataaaccagaatgatactctcagcacagaagaataaagggagcgagtcattaacgttttctttttaaacctttatgatgacttccttatgaattactgaacgaacactggaatgggactcaggtatcctgaggacatctctcaactctggccttagttccccctctgtaaaattagggtgccaactaaatgatctacaaggtcccttccagcgccgccattctgtaattacatcatgtgtaactgtattaaacatacacaagtgactgccaggcatgggaatgtaacttccgagtaaatgctttggtttgttcagaatacactatgaacttctttccaaagacgggttgtggtaaatagtggatattttgattataagaaatagagtttccttgaagctttagctggagatacagcaatagtgtggtgttcctacaaatatcacagtgtattcaaacatatttttctatcaaaaatcatttttgtaaaagctgtgtgtttttatccaacttgtgataataaatgttctttattttagaat

SEQ ID NO: 243623 - DNA, 2015 bp, Artificial Sequence
  derived and/or modified sequence
aggcggagggggcggggcttcggccggctaagccgcggccacccgcggtctgagggaccggaggagcggggccgggagctgcgaggagccctccagacgtcgccgagcgcgagggcgggcgtgctcggagtggtcgctcgtcagccgccgcccctcagtctccgcacttgcaggtcccctccctctccgccgggacgcgggagagcccggctcgcggcgggggcggccaatgcgaaactggctggtgctgctgtgcccgtgtgtgctcggggccgcgctgcacctctggctgcggctgcgctccccgccgcccgcctgcgcctccggggccggccctgcagatcagttggccttatttcctcagtggaaatctactcactatgatgtggtagttggcgtgttgtcagctcgcaataaccatgaacttcgaaacgtgataagaagcacctggatgagacatttgctacagcatcccacattaagtcaacgtgtgcttgtgaagttcataataggtgctcatggctgtgaagtgcctgtggaagacagggaagatccttattcctgtaaactactcaacatcacaaatccagttttgaatcaggaaattgaagcgttcagtctgtccgaagacacttcatcggggctgcctgaggatcgagttgtcagcgtgagtttccgagttctctaccccatcgttattaccagtcttggagtgttctacgatgccaatgatgtgggtttccagaggaacatcactgtcaaactttatcaggcagaacaagaggaggccctcttcattgctcgcttcagtcctccaagctgtggtgtgcaggtgaacaagctgtggtacaagcccgtggaacaattcatcttaccagagagctttgaaggtacaatcgtgtgggagagccaagacctccacggccttgtgtcaagaaatctccacaaagtgacagtgaatgatggagggggagttctcagagtcattacagctggggagggtgcattgcctcatgaattcttggaaggtgtggagggagttgcaggtggttttatatatactattcaggaaggtgatgctctcttacacaaccttcattctcgccctcaaagacttattgatcatataaggaatctccatgaggaagatgccttactgaaggaggaaagcagcatctatgatgatattgtttttgtggatgttgtcgacacttatcgtaatgttcctgcaaaattattgaacttctatagatggactgtggaaacaacgagcttcaatttgttgctgaagacagatgatgactgttacatagacctcgaagctgtatttaataggattgtccaaaagaatctggatgggcctaatttttggtggggaaatttcagactgaattgggcagttgaccgaaccggaaagtggcaggagttggagtacccgagccccgcttaccctgcctttgcatgtgggtcaggatatgtgatctccaaggacatcgtcaagtggctggcaagcaactcggggaggttaaagacctatcagggtgaagatgtaagcatgggcatctggatggctgccataggacctaaaagataccaggacagtctgtggctgtgtgagaagacctgtgagacaggaatgctgtcttctcctcagtattctccgtgggaactgacggaactgtggaaactgaaggaacggtgcggtgatccttgtcgatgtcaagcaagataacagggacttgaattagcagagtctaaaatcagggcaggcaaacgataatctgagtgcaagtctgaggagtcccagggtttagcagtagactgtatggtctttcaagagagttccagactggcactttcacccagaaccaatgcggtgtttcttaatgtttgcacaaatttccttaaaaatcaacttgtactgtagcataagaaaagtttttatttatctattggaagattatcagaaaaataccaagttattttataaaagaaaaaatatttctaaatcctga

SEQ ID NO: 243624 - protein, 502 aa, Artificial Sequence
  derived and/or modified sequence
MAQRCVCVLALVAMLLLVFPTVSRSMGPRSGEHQRASRIPSQFSKEERVAMKEALKGAIQIPTVTFSSEKSNTTALAEFGKYIHKVFPTVVSTSFIQHEVVEEYSHLFTIQGSDPSLQPYLLMAHFDVVPAPEEGWEVPPFSGLERDGIIYGRGTLDDKNSVMALLQALELLLIRKYIPRRSFFISLGHDEESSGTGAQRISALLQSRGVQLAFIVDEGGFILDDFIPNFKKPIALIAVSEKGSMNLMLQVNMTSGHSSAPPKETSIGILAAAVSRLEQTPMPIIFGSGTVVTVLQQLANEFPFPVNIILSNPWLFEPLISRFMERNPLTNAIIRTTTALTIFKAGVKFNVIPPVAQATVNFRIHPGQTVQEVLELTKNIVADNRVQFHVLSAFDPLPVSPSDDKALGYQLLRQTVQSVFPEVNITAPVTSIGNTDSRFFTNLTTGIYRFYPIYIQPEDFKRIHGVNEKISVQAYETQVKFIFELIQNADTDQEPVSHLHKL

SEQ ID NO: 243625 - DNA, 1509 bp, Artificial Sequence
  derived and/or modified sequence
atggcacagagatgcgtgtgcgtgctcgctctggttgctatgctgcttctggtatttcccactgtcagcaggtccatgggacccaggtctggcgaacatcaaagagcatcaagaatccctagccaattttccaaagaagagcgtgtggcaatgaaagaagcactgaagggagccattcaaatcccaacggtgacgttctcaagcgagaaatcaaacaccactgccctagctgaattcggcaagtatattcacaaggttttccctaccgttgtgtccacttcatttatccagcacgaggtggtggaggagtactcccacctgttcactattcagggaagtgatccctccctgcagccatacctgttaatggcccactttgatgtggtccctgctccagaagaagggtgggaggtaccaccatttagtggcctcgagcgagatggcattatttacgggaggggcacccttgacgacaaaaattcggtgatggcattgttgcaggccctggagttattactgattagaaaatatatccctaggcggagcttctttatctccctcggacatgatgaggagtcctctgggacgggggctcagaggatttcggcactcctgcagtcacgcggagtccagctcgcattcattgttgatgaaggaggcttcatcttagacgacttcatcccaaatttcaaaaagcccattgctctgatcgctgtgagtgagaaaggctccatgaacctgatgttgcaggtgaatatgacttcaggtcactcttctgcccctcccaaagagacctccatcgggatcctagccgctgcggtctctagactggagcagacacccatgcccataattttcggatcggggacagtagtcaccgtgttgcaacaactcgctaatgagttcccattccccgttaatattattttaagcaatccgtggttgtttgagcccctcatttctcggttcatggagcgcaatcctttaacgaatgcaatcattcgaaccactaccgctctgaccattttcaaggccggagtgaagtttaacgttatcccccctgtagcccaggccacagttaatttccgcatacacccgggacagaccgtccaagaggttctggagctcaccaaaaacatcgtggccgacaacagagttcaatttcatgtcttaagcgcattcgatcctttgccggtgtccccctcggacgacaaggccctgggatatcagctcttgcgccagacggtgcaatccgtctttccggaagttaacatcactgctcctgtgacgagtatcggcaacactgactcccgcttcttcacaaacctgacgactggaatatataggttttaccctatatacatacagcccgaagactttaagcggattcatggcgttaacgagaaaatctccgttcaggcctacgaaacccaggtcaagttcatcttcgaattaatacaaaatgccgacacagaccaagaacccgtgagccacttgcacaaactctag

SEQ ID NO: 243626 - DNA, 1509 bp, Artificial Sequence
  derived and/or modified sequence
atggcccagcgttgcgtttgcgtgcttgccctggtcgctatgttgttacttgtctttcctacagtatcaagaagcatgggtccacggagcggcgagcaccagcgagcgagcagaatccccagccaatttagcaaagaagaaagagtggctatgaaggaagcgcttaaaggcgcaattcagattcctaccgtgacattctcgtcagaaaagtccaatacaacagctctagccgagttcggcaagtatatccacaaggtatttcctacggtcgtgagcacttcatttatacaacatgaggtagtggaagagtacagccatctcttcaccatccagggctctgacccttccctccagccatacctgctgatggctcatttcgacgtagtaccggcccccgaggaaggttgggaggtcccgccattcagcgggttggaacgagacggaatcatctacgggcgcggcacattggatgataagaacagcgtgatggcccttttacaggcactggagctgttattgatccggaaatatatacctcggaggagcttctttataagcctcggccacgatgaagaatcgtctggaaccggggctcagcgaatatccgctcttctgcagtcccgaggagtccagcttgccttcatagtggatgaaggcggatttattctagatgatttcattcccaactttaagaagcctatagctcttatcgccgtgtcagaaaaaggcagtatgaatcttatgttacaggtgaacatgacaagtggtcattcaagcgcccccccaaaggagacaagcatcggtattcttgcggccgcagtgtctaggctggagcaaactccaatgcctataattttcggtagcgggacagttgtgacagtactgcagcaattggctaacgagtttccctttccagtgaacatcatcctgagcaacccctggttgtttgagcctcttattagtcgctttatggagcgtaatcctcttaccaatgcgattattagaactactacggcactcaccattttcaaggccggggtgaagtttaatgtcattccacctgtcgctcaggccacagtcaatttcaggatccacccgggtcagaccgtgcaagaagtgcttgaattaacaaaaaatattgttgccgataatagggtgcagtttcacgtactctccgccttcgatcccctgcccgtgagtccatctgacgacaaggctcttggctatcagctactacggcagacagttcagagtgtgtttccagaagtaaacattaccgcacctgtgacatcaattggcaatacagactcacgattttttaccaacctcacaacaggtatttaccggttctaccctatttatattcagcccgaagacttcaagcgaatccatggggtgaatgagaaaataagtgtgcaggcctacgaaacacaggtgaagttcatttttgagctgattcagaacgccgatacagatcaggaaccagtctcccacctccacaaactctag

SEQ ID NO: 243627 - DNA, 1509 bp, Artificial Sequence
  derived and/or modified sequence
atggcccagcgctgcgtgtgcgtcctggctcttgtagcaatgctgctgcttgtgttccccaccgtctcaagaagtatgggtccgagatccggagaacatcaacgcgcatctcgcatccccagtcagttcagcaaggaagagcgagtagctatgaaagaggctctgaagggtgccatccagatcccaaccgtcacatttagctccgaaaaatccaacactaccgccttggcagagtttggaaagtacatacataaagtgttcccgaccgtggtgtcaacttcttttatacagcacgaagttgtcgaggagtattcccatctgtttactatccagggatctgacccctcgttacagccttacctgctaatggctcactttgatgtcgtccctgcccctgaggaaggctgggaggtgcctcccttcagtggactggaaagggatggaataatatatggcagaggcactctcgatgataaaaactcagtgatggcactgctgcaggcccttgaattgctcctcatcagaaagtacattcccaggcgcagcttttttatttcccttggccatgatgaagaatcatccggcacgggtgcacaacggattagtgccctgttacaatcccgtggtgtacaacttgcttttatcgtcgacgaggggggttttattttggatgactttatccccaactttaaaaaacccatagcactgatcgctgtcagcgagaagggtagcatgaacctgatgctgcaagtgaacatgacttctggacattcatctgccccacccaaggaaacctcgataggtatcctggcagcagcagttagccggcttgagcagactccaatgccgataatcttcggatctggcaccgtggtgaccgtactacaacagctagccaatgagttccccttccccgtcaacattattctgtcaaatccctggctattcgaaccactcattagccgttttatggagcgcaaccccctgaccaatgccattattcgaaccacaaccgctctgacgatctttaaagccggcgtaaaattcaatgttatcccaccagtagcccaggcaaccgtcaactttcggattcatcccggtcagacagtgcaggaagtccttgagctgacaaaaaacattgttgctgacaatcgcgtgcagttccatgtgctctctgccttcgatcctcttcctgttagcccaagtgacgacaaagcactcggttatcaactactacgccagaccgtccaatcagttttccctgaggtcaacatcaccgcaccagtgacgagcatcgggaatacagatagtagattttttaccaacctaactaccgggatctatagattttacccaatatatattcagccagaggattttaagcggattcacggcgtgaatgagaagattagcgtccaagcctacgagacccaagtgaagtttatattcgagctcatccagaatgccgataccgatcaagaacctgtgtcacatcttcataagttgtag

SEQ ID NO: 243628 - DNA, 1509 bp, Artificial Sequence
  derived and/or modified sequence
atggcccagagatgcgtgtgcgtgctggccctggtggccatgctgctgctggtgttccccaccgtgagcagaagcatgggccccagaagcggcgagcaccagagagccagcagaatccccagccagttcagcaaggaggagagagtggccatgaaggaggccctgaagggcgccatccagatccccaccgtgaccttcagcagcgagaagagcaacaccaccgccctggccgagttcggcaagtacatccacaaggtgttccccaccgtggtgagcaccagcttcatccagcacgaggtggtggaggagtacagccacctgttcaccatccagggcagcgaccccagcctgcagccctacctgctgatggcccacttcgacgtggtgcccgcccccgaggagggctgggaggtgccccccttcagcggcctggagagagacggcatcatctacggcagaggcaccctggacgacaagaacagcgtgatggccctgctgcaggccctggagctgctgctgatcagaaagtacatccccagaagaagcttcttcatcagcctgggccacgacgaggagagcagcggcaccggcgcccagagaatcagcgccctgctgcagagcagaggcgtgcagctggccttcatcgtggacgagggcggcttcatcctggacgacttcatccccaacttcaagaagcccatcgccctgatcgccgtgagcgagaagggcagcatgaacctgatgctgcaggtgaacatgaccagcggccacagcagcgccccccccaaggagaccagcatcggcatcctggccgccgccgtgagcagactggagcagacccccatgcccatcatcttcggcagcggcaccgtggtgaccgtgctgcagcagctggccaacgagttccccttccccgtgaacatcatcctgagcaacccctggctgttcgagcccctgatcagcagattcatggagagaaaccccctgaccaacgccatcatcagaaccaccaccgccctgaccatcttcaaggccggcgtgaagttcaacgtgatcccccccgtggcccaggccaccgtgaacttcagaatccaccccggccagaccgtgcaggaggtgctggagctgaccaagaacatcgtggccgacaacagagtgcagttccacgtgctgagcgccttcgaccccctgcccgtgagccccagcgacgacaaggccctgggctaccagctgctgagacagaccgtgcagagcgtgttccccgaggtgaacatcaccgcccccgtgaccagcatcggcaacaccgacagcagattcttcaccaacctgaccaccggcatctacagattctaccccatctacatccagcccgaggacttcaagagaatccacggcgtgaacgagaagatcagcgtgcaggcctacgagacccaggtgaagttcatcttcgagctgatccagaacgccgacaccgaccaggagcccgtgagccacctgcacaagctgtag

SEQ ID NO: 243629 - DNA, 1509 bp, Artificial Sequence
  derived and/or modified sequence
atggcacagcgctgtgtgtgcgttctcgcactggtagctatgctactccttgtgtttcctacggtatcgaggtccatggggcctcgcagcggggaacatcagagggccagccgcattccctctcaattttccaaggaagagcgggtcgcaatgaaggaggccctcaaaggcgctattcagatcccaaccgtaaccttcagcagcgagaagagtaacactactgccctggccgagtttggtaaatatatccacaaagtattcccaacagtggtcagcacttccttcattcagcatgaagtcgtggaggagtattcacacctgttcaccattcaagggtcagacccctctctacagccgtatcttctgatggctcattttgacgtcgttccggctcctgaggaaggttgggaggtcccccctttctctggtctcgaacgcgatggtatcatctacgggaggggcaccctagacgacaagaactccgtgatggcactgctacaggctctcgagctgttactgattagaaaatacatcccgcgccgtagctttttcatatctctgggacacgatgaggaatcctccgggaccggggctcagagaatctccgccctccttcagagcagaggagtacaactggcctttatcgtcgatgagggaggtttcatcctcgatgacttcatccctaactttaagaagcccatcgccttgattgctgtgtctgaaaagggtagcatgaacctcatgttacaagtaaacatgacctcaggccacagttccgctccaccaaaggagacctcgatcgggattttggccgcagctgtttcccggttggagcagactccaatgcccataatattcgggtcggggactgttgtgaccgtactgcagcagctggctaacgaattcccgtttcctgtgaatataattctgagtaacccttggctctttgagcctcttatctctagattcatggagcgcaatcctctcacgaacgccattatcagaacaactacagccctgacgattttcaaggctggggttaaattcaatgttatcccccccgttgctcaggcaaccgttaatttccgtatacacccaggtcagactgttcaggaggtgctggaattgacgaagaatattgtcgcagataatagggtacagttccacgtgctgtccgcctttgaccccctgcccgtttcaccgtcagacgataaggcgctgggctatcagctcctcagacagaccgtgcagtccgttttccctgaagtgaacattacagccccagttacgtcaataggcaatacagattctcgatttttcacaaatctcaccacagggatctatagattctaccccatctacatccagccagaagatttcaaacgcatacacggcgttaacgagaagatcagtgtccaggcctacgaaactcaggtgaagtttatctttgaactgattcagaacgctgacactgaccaggagcccgtctcccatttgcacaaactctag

SEQ ID NO: 243630 - DNA, 2152 bp, Artificial Sequence
  derived and/or modified sequence
gtcagaactaccccggtagcctgacagcaggagctcgagagaagcatggctcagcggtgcgtttgcgtgctggccctggtggctatgctgctcctagttttccctaccgtctccagatcgatgggcccgaggagcggggagcatcaaagggcgtcgcgaatcccttctcagttcagcaaagaggaacgcgtcgcgatgaaagaggcgctgaaaggtgccatccagattccaacagtgacttttagctctgagaagtccaatactacagccctggctgagttcggaaaatacattcataaagtctttcctacagtggtcagcaccagctttatccagcatgaagtcgtggaagagtatagccacctgttcactatccaaggctcggaccccagcttgcagccctacctgctgatggctcactttgatgtggtgcctgcccctgaagaaggctgggaggtgcccccattctctgggttggagcgtgatggcatcatctatggtcggggcacactggacgacaagaactctgtgatggcattactgcaggccttggagctcctgctgatcaggaagtacatcccccgaagatctttcttcatttctctgggccatgatgaggagtcatcagggacaggggctcagaggatctcagccctgctacagtcaaggggcgtccagctagccttcattgtggacgaggggggcttcatcttggatgatttcattcctaacttcaagaagcccatcgccttgattgcagtctcagagaagggttccatgaacctcatgctgcaagtaaacatgacttcaggccactcttcagctcctccaaaggagacaagcattggcatccttgcagctgctgtcagccgattggagcagacaccaatgcctatcatatttggaagcgggacagtggtgactgtattgcagcaactggcaaatgagtttcccttccctgtcaatataatcctgagcaacccatggctatttgaaccacttataagcaggtttatggagagaaatcccttaaccaatgcaataatcaggaccaccacggcactcaccatattcaaagcaggggtcaagttcaatgtcatccccccagtggcccaggccacagtcaacttccggattcaccctggacagacagtccaagaggtcctagaactcacgaagaacattgtggctgataacagagtccagttccatgtgttgagtgcctttgaccccctccccgtcagcccttctgatgacaaggccttgggctaccagctgctccgccagaccgtacagtccgtcttcccggaagtcaatattactgccccagttacttctattggcaacacagacagccgattctttacaaacctcaccactggcatctacaggttctaccccatctacatacagcctgaagacttcaaacgcatccatggagtcaacgagaaaatctcagtccaagcctatgagacccaagtgaaattcatctttgagttgattcagaatgctgacacagaccaggagccagtttctcacctgcacaaactgtgaggtcaaggggcctgctgggttaggcatgcccgaccccgggacaggactaacccaagggggaaagctagtgttgatgaaacttttgatcaaaaccacattgtaaaacattgcccatctgtcttgctcactcttaaactctcccaagaacaaggccggggtaaggtaaagtcagcagaaatctggcttctcccttcctcccgacatctgcatcccttgatccactggcatttgctgccctcttgtcccttatctgtcttatgctggttatttcactgcttcaccttccaggcttgacttaacaaatgtagatttgagaaatctcaaccagttgttacctgataggagtctttaatttagggcactcttgctgggatgctttctccagagcttatatatttcttcttactagaactttcttcccccttttattcccctctcttcttggactcatgagctgtctcttcatctctcctctctctcctgcatctctccccttactcttcaatttattctacttctggacctggacttacccaaactgtgatactaccataattgtcaccataatcagtcaaataaagtgatctgtgcatcacca

SEQ ID NO: 243631 - DNA, 1509 bp, Artificial Sequence
  derived and/or modified sequence
atggcccagagatgtgtgtgtgtgctggccctggtggccatgctgctgctggtgttccccaccgtgagccgctccatgggccccaggtctggagagcaccagagggccagccgcatccccagccagttcagcaaggaggagcgggtggccatgaaggaggccctgaagggggccatccagatccccaccgtgaccttcagcagcgagaagagcaacaccacagccctggccgagtttgggaagtacatccacaaggtgttccccaccgtggtgtccaccagcttcatccagcacgaggtggtggaggagtacagccacctgttcaccatccagggcagtgaccccagcctgcagccctacctgctgatggcccactttgatgtggtgcctgcccctgaggagggctgggaggtgccccccttcagcggcctggagagagatggcatcatctacggccggggcaccctggatgacaagaacagcgtgatggccctgctgcaggccctggagctgctgctgatcaggaagtacatcccccggcgctccttcttcatcagcctgggccatgatgaggagagcagcggcaccggggcccagaggatcagcgccctgctgcagagcagaggagtgcagctggccttcatcgtggatgaaggaggcttcatcctggatgacttcatccccaacttcaagaagcccatcgccctgattgctgtgtctgagaagggctccatgaacctgatgctgcaggtgaacatgaccagcggccacagcagcgccccacccaaggagaccagcatcggcatcctggccgctgctgtgtcccggctggagcagacccccatgcccatcatcttcggcagcggcaccgtggtgacagtgctgcagcagctggccaatgagttccccttccctgtgaacatcatcctgagcaacccctggctgtttgagcccctcatcagccgcttcatggagaggaaccccctgaccaatgccatcatccgcaccaccacagccctgaccatcttcaaggccggcgtgaagttcaacgtcatcccccctgtggcccaggccaccgtgaacttccgcatccaccctggccagacagtgcaggaggtgctggagctgaccaagaacatcgtggccgacaacagagtgcagttccacgtgctgagcgcctttgaccccctgcctgtgagccccagtgatgacaaggccctgggctaccagctgctgcggcagacagtgcagagcgtcttccctgaggtgaacatcacagcccctgtgaccagcatcggcaacacagacagccgcttcttcaccaacctgaccaccggcatctaccgcttctaccccatctacatccagcctgaggacttcaagaggatccacggcgtgaatgagaagatctctgtgcaggcctatgagacccaggtgaagttcatctttgagctgatccagaatgctgacacagaccaggagcctgtgagccacctgcacaagctgtag

SEQ ID NO: 243632 - DNA, 1509 bp, Artificial Sequence
  derived and/or modified sequence
atggcccagcggtgcgtgtgcgtgctggccctggtggccatgctgctgctagtgttcccaacggtgagccgctccatgggcccacggtctggcgagcaccagcgcgcctcaaggattcctagccaattcagtaaagaggagagggtggcaatgaaggaggccctgaaaggagccatccaaatacccaccgttacattttccagtgaaaaatctaataccaccgccctggccgagttcggaaagtacattcataaggtgttcccgactgtggttagcacatcctttatccagcacgaagtggtcgaagagtactcccatcttttcacaattcagggctctgatcccagtctgcaaccatacctgctgatggcccattttgatgtcgtacccgctccagaagaaggttgggaggtacctccctttagtggcctcgaacgcgacggcatcatttatggccgcggcacactggacgacaagaactctgtgatggcgctcctgcaagcactggagttacttctgatacggaaatatattccccgccgcagcttctttatctctctcggtcatgacgaagaatcttctggaacaggggctcaacggatctccgctcttcttcagtcgagaggtgtccagcttgctttcattgtggatgaaggaggcttcatcctggacgactttattcccaattttaagaaacctattgctttaatagccgtttccgagaagggatcaatgaatctgatgctgcaggtcaacatgacaagtggccattcaagtgccccacctaaggaaaccagtatcggtattctcgccgcggccgtctccaggctggaacagactcccatgcctatcattttcggctcaggaactgttgtaacggtccttcaacagctggctaatgagtttccctttcctgtgaatatcatactgagcaacccctggttgttcgagcctttgatcagtagattcatggaacgaaatccactgacaaatgccatcattcgtactaccaccgcgttgactattttcaaggcaggggtgaaatttaacgtaattcctccagtggcacaggccactgtgaactttcgcattcaccctgggcagaccgtgcaggaggtcctggaattgactaagaatattgtggcggataatcgagtccaatttcacgtgctgtcagcattcgatccgctgccggtctctcccagcgatgataaagccctgggctatcagctgctgaggcagacagtgcagagcgtgtttcccgaggtgaacataacggcgcctgtgacatcaataggcaacaccgacagtcgattctttactaacctgactactggcatttaccgattttacccaatctatatccagcctgaggattttaaacgtatccatggagttaacgaaaaaatctctgtgcaggcctatgagacccaggtcaagttcatctttgagctaatacagaatgccgacaccgaccaggagcccgtttctcacttgcacaagctttag

SEQ ID NO: 243633 - RNA, 1509 nt, Artificial Sequence
  derived and/or modified sequence
auggcccagcguugcguuugcgugcuugcccuggucgcuauguuguuacuugucuuuccuacaguaucaagaagcauggguccacggagcggcgagcaccagcgagcgagcagaauccccagccaauuuagcaaagaagaaagaguggcuaugaaggaagcgcuuaaaggcgcaauucagauuccuaccgugacauucucgucagaaaaguccaauacaacagcucuagccgaguucggcaaguauauccacaagguauuuccuacggucgugagcacuucauuuauacaacaugagguaguggaagaguacagccaucucuucaccauccagggcucugacccuucccuccagccauaccugcugauggcucauuucgacguaguaccggcccccgaggaagguugggaggucccgccauucagcggguuggaacgagacggaaucaucuacgggcgcggcacauuggaugauaagaacagcgugauggcccuuuuacaggcacuggagcuguuauugauccggaaauauauaccucggaggagcuucuuuauaagccucggccacgaugaagaaucgucuggaaccggggcucagcgaauauccgcucuucugcagucccgaggaguccagcuugccuucauaguggaugaaggcggauuuauucuagaugauuucauucccaacuuuaagaagccuauagcucuuaucgccgugucagaaaaaggcaguaugaaucuuauguuacaggugaacaugacaaguggucauucaagcgcccccccaaaggagacaagcaucgguauucuugcggccgcagugucuaggcuggagcaaacuccaaugccuauaauuuucgguagcgggacaguugugacaguacugcagcaauuggcuaacgaguuucccuuuccagugaacaucauccugagcaaccccugguuguuugagccucuuauuagucgcuuuauggagcguaauccucuuaccaaugcgauuauuagaacuacuacggcacucaccauuuucaaggccggggugaaguuuaaugucauuccaccugucgcucaggccacagucaauuucaggauccacccgggucagaccgugcaagaagugcuugaauuaacaaaaaauauuguugccgauaauagggugcaguuucacguacucuccgccuucgauccccugcccgugaguccaucugacgacaaggcucuuggcuaucagcuacuacggcagacaguucagaguguguuuccagaaguaaacauuaccgcaccugugacaucaauuggcaauacagacucacgauuuuuuaccaaccucacaacagguauuuaccgguucuacccuauuuauauucagcccgaagacuucaagcgaauccauggggugaaugagaaaauaagugugcaggccuacgaaacacaggugaaguucauuuuugagcugauucagaacgccgauacagaucaggaaccagucucccaccuccacaaacucuag

SEQ ID NO: 243634 - RNA, 1509 nt, Artificial Sequence
  derived and/or modified sequence
auggcccagcgcugcgugugcguccuggcucuuguagcaaugcugcugcuuguguuccccaccgucucaagaaguauggguccgagauccggagaacaucaacgcgcaucucgcauccccagucaguucagcaaggaagagcgaguagcuaugaaagaggcucugaagggugccauccagaucccaaccgucacauuuagcuccgaaaaauccaacacuaccgccuuggcagaguuuggaaaguacauacauaaaguguucccgaccguggugucaacuucuuuuauacagcacgaaguugucgaggaguauucccaucuguuuacuauccagggaucugaccccucguuacagccuuaccugcuaauggcucacuuugaugucgucccugccccugaggaaggcugggaggugccucccuucaguggacuggaaagggauggaauaauauauggcagaggcacucucgaugauaaaaacucagugauggcacugcugcaggcccuugaauugcuccucaucagaaaguacauucccaggcgcagcuuuuuuauuucccuuggccaugaugaagaaucauccggcacgggugcacaacggauuagugcccuguuacaaucccgugguguacaacuugcuuuuaucgucgacgagggggguuuuauuuuggaugacuuuauccccaacuuuaaaaaacccauagcacugaucgcugucagcgagaaggguagcaugaaccugaugcugcaagugaacaugacuucuggacauucaucugccccacccaaggaaaccucgauagguauccuggcagcagcaguuagccggcuugagcagacuccaaugccgauaaucuucggaucuggcaccguggugaccguacuacaacagcuagccaaugaguuccccuuccccgucaacauuauucugucaaaucccuggcuauucgaaccacucauuagccguuuuauggagcgcaacccccugaccaaugccauuauucgaaccacaaccgcucugacgaucuuuaaagccggcguaaaauucaauguuaucccaccaguagcccaggcaaccgucaacuuucggauucaucccggucagacagugcaggaaguccuugagcugacaaaaaacauuguugcugacaaucgcgugcaguuccaugugcucucugccuucgauccucuuccuguuagcccaagugacgacaaagcacucgguuaucaacuacuacgccagaccguccaaucaguuuucccugaggucaacaucaccgcaccagugacgagcaucgggaauacagauaguagauuuuuuaccaaccuaacuaccgggaucuauagauuuuacccaauauauauucagccagaggauuuuaagcggauucacggcgugaaugagaagauuagcguccaagccuacgagacccaagugaaguuuauauucgagcucauccagaaugccgauaccgaucaagaaccugugucacaucuucauaaguuguag

SEQ ID NO: 243635 - protein, 706 aa, Artificial Sequence
  derived and/or modified sequence
MDIKHHQNGTRGQRRKQPHTTVQRLLTWGLPVSCSWFLWRQPGEFPVTALLLGAGAGGLLAIGLFQLLVNPMNIYEEQKIMFLYSLVGLGAMGWGTSPHIRCASLLLVPKMLGKEGRLFVLGYALAAIYVGPVANLRHNLNNVIASLGCTVELQINNTRAAWRISTAPLRAMFKDLLSSKELLRAETRNISATFEDLDAQVNSETGYTPEDTMDSGETAQGREARQAPASRLHLSTQKMYELKTKLRCSYVVNQAILSCRRWFDRKHEQCMKHIWVPLLTHLLCLPMKFKFFCGIAKVMEVWCRNRIPVEGNFGQTYDSLNQSIRGLDGEFSANIDFKEEKQAGVLGLNTSWERVSTEVRDYVYRQEARLEWALGLLHVLLSCTFLLVLHASFSYMDSYNHDIRFDNIYISTYFCQIDDRRKKLGKRTLLPLRKAEEKTVIFPCKPTIQASEMSNVVRELLETLPILLLLVVLCGLDWALYSIFDTIRHHSFLQYSFRSSHKLEVKVGGDSMLARLLRKTIGALNTSSETVMESNNMPCLPQPVGLDARAYWRAAVPIGLLVCLCLLQAFGYRLRRVIAAFYFPKREKKRILFLYNDLLKKRAAFTKLRRAAILRRERQQKAPRHPLADILHRGCPLLRRWLCRRCVVCQAPETPESYVCRTLDCEAVYCWSCWDDMRQRCPVCTPREELSSSAFSDSNDDTAYAG

SEQ ID NO: 243636 - protein, 664 aa, Artificial Sequence
  derived and/or modified sequence
MDIKHHQNGTRGQRRKQPHTTVQRLLTWGLPVSCSWFLWRQPGEFPVTALLLGAGAGGLLAIGLFQLLVNPMNIYEEQKIMFLYSLVGLGAMGWGTSPHIRCASLLLVPKMLGKEGRLFVLGYALAAIYVGPVANLRHNLNNVIASLGCTVELQINNTRAAWRISTAPLRAMFKDLLSSKELLRAETRNISATFEDLDAQVNSETGYTPEDTMDSGETAQGREARQAPASRLHLSTQKMYELKTKLRCSYVVNQAILSCRRWFDRKHEQCMKHIWVPLLTHLLCLPMKFKFFCGIAKVMEVWCRNRIPVEGNFGQTYDSLNQSIRGLDGEFSANIDFKEEKQAGVLGLNTSWERVSTEVRDYVYRQEARLEWALGLLHVLLSCTFLLVLHASFSYMDSYNHDIRFDNIYISTYFCQIDDRRKKLGKRTLLPLRKAEEKTVIFPCKPTIQASEMSNVVRELLETLPILLLLVVLCGLDWALYSIFDTIRHHSFLQYSFRSSHKLEVKVGGDSMLARLLRKTIGALNTSSETVMESNNMPCLPQPVGLDARAYWRAAVPIGLLVCLCLLQAFGYRLRRVIAAFYFPKREKKRILFLYNDLLKKRAAFTKLRRAAILRRERQQKAPVFTEPQFLPLKNGKTGEICKACSLEISLEWWSGVGLRCQRA

SEQ ID NO: 243637 - DNA, 2121 bp, Artificial Sequence
  derived and/or modified sequence
atggacatcaagcaccaccagaacggcaccagaggccagagaagaaagcagccccacaccaccgtgcagagactgctgacctggggcctgcccgtgagctgcagctggttcctgtggagacagcccggcgagttccccgtgaccgccctgctgctgggcgccggcgccggcggcctgctggccatcggcctgttccagctgctggtgaaccccatgaacatctacgaggagcagaagatcatgttcctgtacagcctggtgggcctgggcgccatgggctggggcaccagcccccacatcagatgcgccagcctgctgctggtgcccaagatgctgggcaaggagggcagactgttcgtgctgggctacgccctggccgccatctacgtgggccccgtggccaacctgagacacaacctgaacaacgtgatcgccagcctgggctgcaccgtggagctgcagatcaacaacaccagagccgcctggagaatcagcaccgcccccctgagagccatgttcaaggacctgctgagcagcaaggagctgctgagagccgagaccagaaacatcagcgccaccttcgaggacctggacgcccaggtgaacagcgagaccggctacacccccgaggacaccatggacagcggcgagaccgcccagggcagagaggccagacaggcccccgccagcagactgcacctgagcacccagaagatgtacgagctgaagaccaagctgagatgcagctacgtggtgaaccaggccatcctgagctgcagaagatggttcgacagaaagcacgagcagtgcatgaagcacatctgggtgcccctgctgacccacctgctgtgcctgcccatgaagttcaagttcttctgcggcatcgccaaggtgatggaggtgtggtgcagaaacagaatccccgtggagggcaacttcggccagacctacgacagcctgaaccagagcatcagaggcctggacggcgagttcagcgccaacatcgacttcaaggaggagaagcaggccggcgtgctgggcctgaacaccagctgggagagagtgagcaccgaggtgagagactacgtgtacagacaggaggccagactggagtgggccctgggcctgctgcacgtgctgctgagctgcaccttcctgctggtgctgcacgccagcttcagctacatggacagctacaaccacgacatcagattcgacaacatctacatcagcacctacttctgccagatcgacgacagaagaaagaagctgggcaagagaaccctgctgcccctgagaaaggccgaggagaagaccgtgatcttcccctgcaagcccaccatccaggccagcgagatgagcaacgtggtgagagagctgctggagaccctgcccatcctgctgctgctggtggtgctgtgcggcctggactgggccctgtacagcatcttcgacaccatcagacaccacagcttcctgcagtacagcttcagaagcagccacaagctggaggtgaaggtgggcggcgacagcatgctggccagactgctgagaaagaccatcggcgccctgaacaccagcagcgagaccgtgatggagagcaacaacatgccctgcctgccccagcccgtgggcctggacgccagagcctactggagagccgccgtgcccatcggcctgctggtgtgcctgtgcctgctgcaggccttcggctacagactgagaagagtgatcgccgccttctacttccccaagagagagaagaagagaatcctgttcctgtacaacgacctgctgaagaagagagccgccttcaccaagctgagaagagccgccatcctgagaagagagagacagcagaaggcccccagacaccccctggccgacatcctgcacagaggctgccccctgctgagaagatggctgtgcagaagatgcgtggtgtgccaggcccccgagacccccgagagctacgtgtgcagaaccctggactgcgaggccgtgtactgctggagctgctgggacgacatgagacagagatgccccgtgtgcacccccagagaggagctgagcagcagcgccttcagcgacagcaacgacgacaccgcctacgccggctag

SEQ ID NO: 243638 - DNA, 1995 bp, Artificial Sequence
  derived and/or modified sequence
atggacatcaagcaccaccagaacggcaccagaggccagagaagaaagcagccccacaccaccgtgcagagactgctgacctggggcctgcccgtgagctgcagctggttcctgtggagacagcccggcgagttccccgtgaccgccctgctgctgggcgccggcgccggcggcctgctggccatcggcctgttccagctgctggtgaaccccatgaacatctacgaggagcagaagatcatgttcctgtacagcctggtgggcctgggcgccatgggctggggcaccagcccccacatcagatgcgccagcctgctgctggtgcccaagatgctgggcaaggagggcagactgttcgtgctgggctacgccctggccgccatctacgtgggccccgtggccaacctgagacacaacctgaacaacgtgatcgccagcctgggctgcaccgtggagctgcagatcaacaacaccagagccgcctggagaatcagcaccgcccccctgagagccatgttcaaggacctgctgagcagcaaggagctgctgagagccgagaccagaaacatcagcgccaccttcgaggacctggacgcccaggtgaacagcgagaccggctacacccccgaggacaccatggacagcggcgagaccgcccagggcagagaggccagacaggcccccgccagcagactgcacctgagcacccagaagatgtacgagctgaagaccaagctgagatgcagctacgtggtgaaccaggccatcctgagctgcagaagatggttcgacagaaagcacgagcagtgcatgaagcacatctgggtgcccctgctgacccacctgctgtgcctgcccatgaagttcaagttcttctgcggcatcgccaaggtgatggaggtgtggtgcagaaacagaatccccgtggagggcaacttcggccagacctacgacagcctgaaccagagcatcagaggcctggacggcgagttcagcgccaacatcgacttcaaggaggagaagcaggccggcgtgctgggcctgaacaccagctgggagagagtgagcaccgaggtgagagactacgtgtacagacaggaggccagactggagtgggccctgggcctgctgcacgtgctgctgagctgcaccttcctgctggtgctgcacgccagcttcagctacatggacagctacaaccacgacatcagattcgacaacatctacatcagcacctacttctgccagatcgacgacagaagaaagaagctgggcaagagaaccctgctgcccctgagaaaggccgaggagaagaccgtgatcttcccctgcaagcccaccatccaggccagcgagatgagcaacgtggtgagagagctgctggagaccctgcccatcctgctgctgctggtggtgctgtgcggcctggactgggccctgtacagcatcttcgacaccatcagacaccacagcttcctgcagtacagcttcagaagcagccacaagctggaggtgaaggtgggcggcgacagcatgctggccagactgctgagaaagaccatcggcgccctgaacaccagcagcgagaccgtgatggagagcaacaacatgccctgcctgccccagcccgtgggcctggacgccagagcctactggagagccgccgtgcccatcggcctgctggtgtgcctgtgcctgctgcaggccttcggctacagactgagaagagtgatcgccgccttctacttccccaagagagagaagaagagaatcctgttcctgtacaacgacctgctgaagaagagagccgccttcaccaagctgagaagagccgccatcctgagaagagagagacagcagaaggcccccgtgttcaccgagccccagttcctgcccctgaagaacggcaagaccggcgagatctgcaaggcctgcagcctggagatcagcctggagtggtggagcggcgtgggcctgagatgccagagagcctag

SEQ ID NO: 243639 - DNA, 2279 bp, Artificial Sequence
  derived and/or modified sequence
gacccagttccgaggactggagaggggatagaaccttgtgtccaaggaggtccttcaggagacctgggatgagtggtgcttccccaaaacagactcatggacattaaacatcatcagaatggcacaagagggcaaagaagaaaacagcctcataccacggtgcagaggctcctgacctgggggctgccagtctcctgtagctggttcctgtggcgccagccgggcgagtttcctgtcactgctctcctgctgggggcaggcgctggggggctcctggccataggtctctttcagctcctggtgaaccccatgaacatctacgaagaacagaagattatgttcttgtacagcttggtgggcttgggggccatgggctgggggacctcccctcacatccgctgtgccagcctcctactagtacccaagatgctgggcaaggaaggcaggctctttgtcctgggatacgccttggctgccatctatgtggggccagtagccaatctgcgacacaatctcaacaacgtgatcgcatcgctgggctgcaccgtggagctgcagatcaacaacacccgcgcagcttggcgcatctccacagcccccttacgggccatgttcaaggacctgctgagtagcaaagaattgctgagagcagagactcggaacatctccgccacttttgaggacctggatgcccaggtgaatagtgagacgggctacacgcctgaggataccatggactcaggggagacagcccagggcagggaggcccgccaagccccagcctccagactccacctgtcgacacagaagatgtatgagctgaagaccaagctgcgttgctcctatgtggtgaaccaggccatactcagctgccgtcgttggtttgaccgcaagcatgaacagtgcatgaagcacatctgggtcccactcctcacccacctgctctgcctgcctatgaagttcaagttcttctgtggcattgccaaggtgatggaggtttggtgccgcaatcgcatcccagtggaaggcaactttgggcagacctacgactccctcaaccagtctattcgtggcctggatggggaattttcagccaatattgacttcaaggaagagaagcaggctggggtgctggggctcaacacaagctgggagcgcgtgagcaccgaggtgcgggactacgtgtaccgccaggaggcccggctggagtgggccctggggctgctgcacgtgctgctctcctgcactttcctgctggtcctgcatgcgtctttctcctacatggacagctataaccatgacattcgttttgacaacatctacatcagtacctacttctgccagatcgatgaccgcaggaagaagctgggcaaacggactctgctgccactccgcaaagctgaggagaaaaccgtcatcttcccttgcaagcccaccatccaggcctcagaaatgagcaatgtggtgagggagctcctggagacactgcccattctgctgctgctggtggtgctgtgtggcttggactgggctctctactccatcttcgacaccatccgccaccactccttcctgcagtactccttccgcagcagtcataaactggaggtgaaggtcgggggagactccatgctagcccggcttcttcgaaaaaccattggggccctgaacacctcctcagagacagtgatggaatcaaacaacatgccctgcctgccccagcctgtgggcctggatgccagggcctactggagagctgcagtaccgattggcctgttagtgtgtctctgcctgttacaggcttttggctaccgactccggagggtcatcgcagccttctacttccccaagcgagagaagaagcggatcctgttcctctacaatgacctattgaagaaaagagcagccttcaccaaactcaggagggccgctatcctgaggcgggagcgacagcagaaggctccgcgccacccgctggcggatatcctgcaccgcggctgcccgctcctgcgccgctggctgtgccggcgctgcgtggtgtgccaggcacccgagacgcccgagtcctacgtgtgccggacgctggactgcgaggccgtgtactgctggtcgtgctgggacgacatgcggcagcggtgcccggtctgcacgccccgcgaagagctctcttcctccgcctttagtgacagcaacgacgacactgcctacgcggggtgaagaggcgtcctgctcgctcttccgcaccgtccttcccggttaataaaatgccctgtacgctt

SEQ ID NO: 243640 - DNA, 2207 bp, Artificial Sequence
  derived and/or modified sequence
agaaccttgtgtccaaggaggtccttcaggagacctgggatgagtggtgcttccccaaaacagactcatggacattaaacatcatcagaatggcacaagagggcaaagaagaaaacagcctcataccacggtgcagaggctcctgacctgggggctgccagtctcctgtagctggttcctgtggcgccagccgggcgagtttcctgtcactgctctcctgctgggggcaggcgctggggggctcctggccataggtctctttcagctcctggtgaaccccatgaacatctacgaagaacagaagattatgttcttgtacagcttggtgggcttgggggccatgggctgggggacctcccctcacatccgctgtgccagcctcctactagtacccaagatgctgggcaaggaaggcaggctctttgtcctgggatacgccttggctgccatctatgtggggccagtagccaatctgcgacacaatctcaacaacgtgatcgcatcgctgggctgcaccgtggagctgcagatcaacaacacccgcgcagcttggcgcatctccacagcccccttacgggccatgttcaaggacctgctgagtagcaaagaattgctgagagcagagactcggaacatctccgccacttttgaggacctggatgcccaggtgaatagtgagacgggctacacgcctgaggataccatggactcaggggagacagcccagggcagggaggcccgccaagccccagcctccagactccacctgtcgacacagaagatgtatgagctgaagaccaagctgcgttgctcctatgtggtgaaccaggccatactcagctgccgtcgttggtttgaccgcaagcatgaacagtgcatgaagcacatctgggtcccactcctcacccacctgctctgcctgcctatgaagttcaagttcttctgtggcattgccaaggtgatggaggtttggtgccgcaatcgcatcccagtggaaggcaactttgggcagacctacgactccctcaaccagtctattcgtggcctggatggggaattttcagccaatattgacttcaaggaagagaagcaggctggggtgctggggctcaacacaagctgggagcgcgtgagcaccgaggtgcgggactacgtgtaccgccaggaggcccggctggagtgggccctggggctgctgcacgtgctgctctcctgcactttcctgctggtcctgcatgcgtctttctcctacatggacagctataaccatgacattcgttttgacaacatctacatcagtacctacttctgccagatcgatgaccgcaggaagaagctgggcaaacggactctgctgccactccgcaaagctgaggagaaaaccgtcatcttcccttgcaagcccaccatccaggcctcagaaatgagcaatgtggtgagggagctcctggagacactgcccattctgctgctgctggtggtgctgtgtggcttggactgggctctctactccatcttcgacaccatccgccaccactccttcctgcagtactccttccgcagcagtcataaactggaggtgaaggtcgggggagactccatgctagcccggcttcttcgaaaaaccattggggccctgaacacctcctcagagacagtgatggaatcaaacaacatgccctgcctgccccagcctgtgggcctggatgccagggcctactggagagctgcagtaccgattggcctgttagtgtgtctctgcctgttacaggcttttggctaccgactccggagggtcatcgcagccttctacttccccaagcgagagaagaagcggatcctgttcctctacaatgacctattgaagaaaagagcagccttcaccaaactcaggagggccgctatcctgaggcgggagcgacagcagaaggctccggtcttcactgagcctcagtttctccctctgaagaatggcaagactggagagatctgtaaggcctgctcactggagatcagcctagagtggtggtcaggtgtgggactccggtgccagagggcctaagtgtgtatcccggctccttccctcattactatgacaacggtgtgaccttgagcacatgacttaactgctgtgcctgggcttttgccttccataaaatggggttaactactccatctggttgttttaaggattaaatgagttgtac

SEQ ID NO: 243641 - DNA, 2091 bp, Artificial Sequence
  derived and/or modified sequence
gacccagttccgaggactggagaggggatagaaccttgtgtccaaggaggtccttcaggagacctgggatgagtggtgcttccccaaaacagactcatggacattaaacatcatcagaatggcacaagagggcaaagaagaaaacagcctcataccacggtgcagaggctcctgacctgggggctgccagtctcctgtagctggttcctgtggcgccagccgggcgagtttcctgtcactgctctcctgctgggggcaggcgctggggggctcctggccataggtctctttcagctcctggtgaaccccatgaacatctacgaagaacagaagattatgttcttgtacagcttggtgggcttgggggccatgggctgggggacctcccctcacatccgctgtgccagcctcctactagtacccaagatgctgggcaaggaaggcaggctctttgtcctgggatacgccttggctgccatctatgtggggccagtagccaatctgcgacacaatctcaacaacgtgatcgcatcgctgggctgcaccgtggagctgcagatcaacaacacccgcgcagcttggcgcatctccacagcccccttacgggccatgttcaaggacctgctgagtagcaaagaattgctgagagcagagactcggaacatctccgccacttttgaggacctggatgcccaggtgaatagtgagacgggctacacgcctgaggataccatggactcaggggagacagcccagggcagggaggcccgccaagccccagcctccagactccacctgtcgacacagaagatgtatgagctgaagaccaagctgcgttgctcctatgtggtgaaccaggccatactcagctgccgtcgttggtttgaccgcaagcatgaacagtgcatgaagcacatctgggtcccactcctcacccacctgctctgcctgcctatgaagttcaagttcttctgtggcattgccaaggtgatggaggtttggtgccgcaatcgcatcccagtggaaggcaactttgggcagacctacgactccctcaaccagtctattcgtggcctggatggggaattttcagccaatattgacttcaaggaagagaagcaggctggggtgctggggctcaacacaagctgggagcgcgtgagcaccgaggtgcgggactacgtgtaccgccaggaggcccggctggagtgggccctggggctgctgcacgtgctgctctcctgcactttcctgctggtcctgcatgcgtctttctcctacatggacagctataaccatgacattcgttttgacaacatctacatcagtacctacttctgccagatcgatgaccgcaggaagaagctgggcaaacggactctgctgccactccgcaaagctgaggagaaaaccgtcatcttcccttgcaagcccaccatccaggcctcagaaatgagcaatgtggtgagggagctcctggagacactgcccattctgctgctgctggtggtgctgtgtggcttggactgggctctctactccatcttcgacaccatccgccaccactccttcctgcagtactccttccgcagcagtcataaactggaggtgaaggtcgggggagactccatgctagcccggcttcttcgaaaaaccattggggccctgaacacctcctcagagacagtgatggaatcaaacaacatgccctgcctgccccagcctgtgggcctggatgccagggcctactggagagctgcagtaccgattggcctgttagtgtgtctctgcctgttacaggcttttggctaccgactccggagggtcatcgcagccttctacttccccaagcgagagaagaagcggatcctgttcctctacaatgacctattgaagaaaagagcagccttcaccaaactcaggagggccgctatcctgaggcgggagcgacagcagaaggctccggtcttcactgagcctcagtttctccctctgaagaatggcaagactggagagatctgtaaggcctgctcactggagatcagcctagagtggtggtcaggtgtgggactccggtgccagagggcctaa

SEQ ID NO: 243642 - DNA, 2121 bp, Artificial Sequence
  derived and/or modified sequence
atggacattaagcatcatcaaaacggaaccagagggcagcggcggaagcagcctcacaccactgtccagaggttgcttacctggggtcttccagtgtcttgcagctggttcctgtggcggcagccaggcgagttccctgtcaccgccctcttgctgggggccggcgcaggtggcctgcttgcaattgggcttttccagctgctggtgaatcccatgaacatctatgaggagcagaagatcatgtttctgtacagtcttgtcggactcggcgcgatggggtggggtacaagccctcatatccgttgcgccagcctcttgttggtccccaaaatgctggggaaagaggggagattgtttgtgctgggttacgccctcgcggctatctacgtgggcccggtcgcaaacctgagacacaacctgaacaacgtgatcgcaagcctgggctgtactgtggaactccagataaataacacaagggcagcatggcgcatttccacagccccgctgagggcgatgttcaaggacttgctttcaagtaaggaactgctgcgggcagagacccgcaacattagtgctacgttcgaggacctcgacgcccaagtgaattctgaaactgggtatactcccgaagataccatggacagcggggaaactgcccaaggaagagaagcacgccaggcacctgcatcaagactgcacctgagcacccagaagatgtatgagcttaaaacaaagctcaggtgttcgtacgtagtaaaccaagcaattctgagttgccgacggtggtttgacaggaaacacgagcagtgcatgaagcatatctgggtgccccttctgacacatctactgtgtctccccatgaaatttaagttcttctgcggaatcgccaaagtcatggaggtgtggtgtcggaacaggatccctgtggagggcaactttggccagacatatgattccctcaatcaatctatacgggggctggacggcgagttcagcgcgaatatagacttcaaggaggaaaagcaggccggggttctcgggctgaatacgagttgggaaagagtcagcactgaggtaagagattatgtgtatagacaagaagcacgcctggaatgggctctgggattactgcacgtgcttctgagctgtacgttcctactggtgctacacgctagcttttcatacatggattcctataaccatgatatacggtttgataatatctacatctctacatatttttgtcaaatcgacgaccggcgtaagaaactgggaaagcgaactctgctgcccctgcgaaaagcggaagaaaagacggtgatctttccatgtaaaccaacaattcaagcctcagagatgagcaacgttgtgcgcgagctgttggagacgctgccaattctgctcttgctggtcgtgctatgcggcctcgactgggccctgtatagcatatttgatactatccgccaccactcatttcttcagtatagcttcaggagctctcataaactggaggtgaaagtgggaggggatagtatgctggccagactacttcggaaaactatcggggcccttaacactagctccgagacggtcatggagtcaaacaacatgccctgtctgccccaacctgtgggactagacgcaagggcgtattggagggctgcggtccccataggcctgctggtgtgtttgtgccttctgcaagcgttcggttacaggctgcgcagagtcatcgctgccttttatttccctaagcgagaaaaaaaaaggatcttatttctgtacaacgaccttctgaaaaaacgtgccgcattcacaaaattgaggagggcagccatattgcgacgggaaagacagcaaaaggcacctcgccacccactggctgacattctgcaccgaggatgccccctgctgagaagatggctctgcagacgatgtgtcgtgtgccaagctcccgagaccccagagtcctatgtgtgtcgaacactggactgcgaagcagtgtactgctggtcttgttgggacgatatgcgacaaaggtgccctgtatgtacaccccgtgaggaactatctagcagcgcatttagtgatagcaacgacgataccgcttatgctggatag

SEQ ID NO: 243643 - DNA, 1995 bp, Artificial Sequence
  derived and/or modified sequence
atggacataaagcaccaccagaacggcactagaggccaacgacgcaaacaacctcacacaacagtgcagcggttactcacctggggtctgccagtctcctgttcctggtttctgtggagacaacccggcgaattcccagtgaccgctctgcttttaggagccggggcaggcggcctgttagctattggtctgttccagttgttagtgaaccccatgaatatttacgaagaacagaagataatgttcctctattccctggtgggcctaggggccatgggctggggcacatcaccccacatccgctgtgccagccttttactggtgcctaagatgctggggaaagagggacgtctgtttgtgctgggttacgccctggccgcaatctatgtcggacccgtcgccaacctacgccacaatctgaacaatgtaattgcgtcactcggctgtactgtcgagctgcagattaataacacacgtgcagcgtggcgtatctccaccgctccactcagagcaatgtttaaggacctcctatccagcaaagagctgctcagagctgagacacggaatattagcgctacatttgaagatctcgacgcacaggtgaattcagagactggttacacccctgaggatactatggactctggcgaaactgcacagggtcgggaagcaagacaggcccccgcctctagattacatctgagcacacagaaaatgtacgaactgaagactaagctcagatgctcttatgtagttaatcaagcaatcctctcatgtagaagatggttcgatcggaagcatgaacagtgtatgaaacatatctgggttccacttttgactcacctactatgcctccccatgaagtttaaattcttctgcggaatagcgaaggtcatggaggtgtggtgccgcaacagaatccctgtggaaggcaatttcgggcagacctacgattccttgaaccagtcgatcaggggcctggatggagaatttagtgcaaatattgacttcaaagaggagaagcaggccggggttctaggccttaacacatcctgggagcgcgtctctacagaggtccgagactacgtttaccgccaagaagctcgactcgagtgggcattgggcctgcttcacgtcctgttgtcttgcacttttctgctggtgttgcatgcctccttcagctatatggactcttacaatcatgacattcgattcgacaacatttatatcagtacatatttttgtcaaattgacgaccgcagaaaaaagttagggaaaaggacgctgttaccactaagaaaagcagaagagaagacagttatttttccgtgtaagcccacaatccaggcatccgaaatgtccaatgtggtgcgtgaactgttggaaaccctccctattctgcttttgcttgttgtgctttgcggcctcgactgggctctctattccatttttgacacgattagacaccacagttttctacagtattcttttagatcctcgcacaaacttgaagtgaaggtgggcggcgactccatgcttgctcgcttgttaagaaagacaattggcgccctcaatacaagctctgagaccgtgatggaaagcaacaatatgccttgcttgccacagcctgttggcctcgacgccagggcatactggcgagcggcagtgccgattggactgcttgtatgtctttgtctcttgcaggcctttggttatagactcaggcgagtgattgccgctttttactttcccaagcgggagaaaaagcgtatcctgtttctatataacgatctgcttaagaagcgcgctgcctttactaagctgcgcagagcagcaattttgcgacgggagcggcagcagaaagcaccagtgtttactgagccccagtttcttccacttaagaacggcaaaactggcgaaatctgcaaagcttgctcactagaaatttctctcgagtggtggtctggcgtgggcttgagatgccagcgcgcctag

SEQ ID NO: 243644 - DNA, 1995 bp, Artificial Sequence
  derived and/or modified sequence
atggacatcaagcaccaccagaacggcacaaggggtcaaagaaggaaacaacctcataccaccgtccagagactcctgacctggggcctacccgtttcctgtagttggtttctttggcgacagccaggagagtttccggtgacagccctcttactcggagcgggagcaggaggtctcctcgcaatagggctgtttcaactcctagtgaatcccatgaatatctacgaggagcagaaaatcatgttcttgtattctttagtggggttgggagcgatgggttggggcacttcacctcacatccgttgcgcatccttactgctggtgcctaagatgcttggcaaagagggcagactctttgtactgggatacgctctcgcggccatctacgtggggcctgttgcaaatctccgccacaacctcaataatgtgatcgcctctctaggctgtaccgtggagctacagattaacaataccagggctgcatggagaatcagcaccgcacccttacgcgcgatgttcaaggatctgttatcgtccaaggagttgctgcgcgcagagacccgtaacatctcagccacatttgaggacctggacgcccaagtcaatagcgaaactggttatactcccgaggatactatggactcaggagaaacagcacagggccgggaggctagacaggctccagcctctaggctccacctgtccacccaaaagatgtatgaactgaaaaccaagctgaggtgctcatacgttgtgaatcaagccatcctgtcttgccgtaggtggtttgaccgaaaacacgaacaatgcatgaagcacatctgggtcccgctcctcacccacctgctctgcttacccatgaagttcaaatttttttgtggtatcgctaaggtcatggaggtgtggtgcaggaaccgcatccccgtggagggtaactttggtcagacatatgacagtctcaatcagagcattaggggattggatggagaattcagcgccaatatcgacttcaaagaagaaaaacaggctggtgtgctggggctgaacacgtcatgggaaagggtcagtacagaagtcagagattatgtgtacagacaggaagctagactggaatgggctctgggcctgctccacgtgcttctgtcctgcacttttttattggtgctacatgcgtcttttagttacatggactcatataaccacgacattaggttcgacaatatctacatttcaacctatttttgccagattgacgacaggcgcaagaagctgggcaagagaaccctactaccgctcaggaaagccgaagaaaaaacggtgattttcccctgtaagcctaccatccaggctagcgaaatgtccaacgtggtgagagaactgctggagacactccccatccttcttctgctcgtcgtgctttgcgggctcgactgggccctttattcaatcttcgacaccattaggcatcacagcttcctgcaatattctttccggagctcccacaagcttgaagtcaaagtcggtggagatagtatgcttgcccggctcctgcgtaagacaattggcgcccttaataccagttccgagactgtgatggaatccaacaatatgccctgtttaccccaacctgtgggtttggacgcaagagcatattggcgtgcagccgtacccatcggacttcttgtctgcctctgcttgctccaagccttcggctacaggctcaggcgcgtgatcgccgccttctatttcccaaagcgcgaaaaaaagaggatactttttctctacaacgacctcctcaagaagcgcgccgccttcacgaaacttcgtcgcgccgctatattaaggagagaacgacagcagaaagctcccgtgttcacagaacctcagtttctccccctgaagaacgggaaaaccggtgagatttgcaaggcatgttcccttgaaatttctctagaatggtggagcggtgtgggcctgagatgtcagcgggcttag

SEQ ID NO: 243645 - DNA, 2121 bp, Artificial Sequence
  derived and/or modified sequence
atggacatcaagcaccaccagaatggcacccggggccagaggaggaagcagccccacaccaccgtgcagaggctgctgacctggggcctgcctgtgtcctgctcctggttcctgtggaggcagcccggggagttccctgtgacagccctgctgctgggcgctggggccggcggcctgctggccatcggcctcttccagctgctggtgaaccccatgaacatctatgaggagcagaagatcatgttcctgtacagcctggtgggcctgggcgccatgggctggggcaccagcccccacatccgctgtgccagcctgctgctggtgcccaagatgctgggcaaggagggccgcctgtttgtgctgggctacgccctggccgccatctacgtgggccctgtggccaacctgcggcacaacctgaacaacgtcatcgccagcctgggctgcaccgtggagctgcagatcaacaacacccgggccgcctggaggatcagcacagcccccctgcgggccatgttcaaggacctgctgagcagcaaggagctgctgcgggcagagaccaggaacatcagcgccacctttgaggacctggatgcccaggtgaacagcgagaccggctacaccccagaggacaccatggattctggagaaacagcccagggccgggaggcccggcaggccccagccagccggctgcacctgagcacccagaagatgtatgagctgaagaccaagctgcgctgcagctatgtggtgaaccaggccatcctgagctgccgccgctggtttgacaggaagcatgagcagtgcatgaagcacatctgggtgcccctgctgacccacctgctgtgcctgcccatgaagttcaagttcttctgtggcatcgccaaggtgatggaggtgtggtgcaggaaccgcatccctgtggagggcaactttggccagacctatgacagcctgaaccagagcatccggggcctggatggagagttcagcgccaacatcgacttcaaggaggagaagcaggccggcgtgctgggcctgaacacctcctgggagcgggtgtccacagaggtgcgggactatgtgtaccggcaggaggcccggctggagtgggccctgggcctgctgcacgtgctgctgagctgcaccttcctgctggtgctgcacgccagcttctcctacatggacagctacaaccacgacatccgctttgacaacatctacatcagcacctacttctgccagattgatgacaggaggaagaagctgggcaagaggaccctgctgcccctgaggaaggccgaggagaagacagtcatcttcccctgcaagcccaccatccaggccagcgagatgagcaatgtggtgcgggagctgctggagaccctgcccatcctgctgctgctggtggtgctgtgtggcctggactgggccctgtacagcatctttgacaccatccgccaccacagcttcctgcagtacagcttccgcagcagccacaagctggaggtgaaggtgggcggggacagcatgctggcccggctgctgaggaagaccatcggggccctgaacaccagcagcgagaccgtgatggagagcaacaacatgccctgcctgccccagcctgtgggcctggatgcccgggcctactggagggctgctgtgcccatcggcctgctggtgtgcctgtgcctgctgcaggccttcggctaccgcctgcggcgggtgattgctgccttctacttccccaagcgggagaagaagaggatcctcttcctgtacaatgacctgctgaagaagagagctgccttcaccaagctgcggcgggccgccatcctgcggcgggagcggcagcagaaggcccccaggcaccccctggccgacatcctgcaccggggctgccccctgctgcggcgctggctgtgccgccgctgtgtggtgtgccaggcccctgagaccccagagagctatgtgtgcaggaccctggactgtgaggccgtgtactgctggagctgctgggatgacatgaggcagcgctgccctgtgtgcaccccccgggaggagctgagcagcagcgccttcagtgacagcaatgatgacacagcctatgccggctag

SEQ ID NO: 243646 - DNA, 1995 bp, Artificial Sequence
  derived and/or modified sequence
atggacatcaagcaccaccagaatggcacccggggccagaggaggaagcagccccacaccaccgtgcagaggctgctgacctggggcctgcctgtgtcctgctcctggttcctgtggaggcagcccggggagttccctgtgacagccctgctgctgggcgctggggccggcggcctgctggccatcggcctcttccagctgctggtgaaccccatgaacatctatgaggagcagaagatcatgttcctgtacagcctggtgggcctgggcgccatgggctggggcaccagcccccacatccgctgtgccagcctgctgctggtgcccaagatgctgggcaaggagggccgcctgtttgtgctgggctacgccctggccgccatctacgtgggccctgtggccaacctgcggcacaacctgaacaacgtcatcgccagcctgggctgcaccgtggagctgcagatcaacaacacccgggccgcctggaggatcagcacagcccccctgcgggccatgttcaaggacctgctgagcagcaaggagctgctgcgggcagagaccaggaacatcagcgccacctttgaggacctggatgcccaggtgaacagcgagaccggctacaccccagaggacaccatggattctggagaaacagcccagggccgggaggcccggcaggccccagccagccggctgcacctgagcacccagaagatgtatgagctgaagaccaagctgcgctgcagctatgtggtgaaccaggccatcctgagctgccgccgctggtttgacaggaagcatgagcagtgcatgaagcacatctgggtgcccctgctgacccacctgctgtgcctgcccatgaagttcaagttcttctgtggcatcgccaaggtgatggaggtgtggtgcaggaaccgcatccctgtggagggcaactttggccagacctatgacagcctgaaccagagcatccggggcctggatggagagttcagcgccaacatcgacttcaaggaggagaagcaggccggcgtgctgggcctgaacacctcctgggagcgggtgtccacagaggtgcgggactatgtgtaccggcaggaggcccggctggagtgggccctgggcctgctgcacgtgctgctgagctgcaccttcctgctggtgctgcacgccagcttctcctacatggacagctacaaccacgacatccgctttgacaacatctacatcagcacctacttctgccagattgatgacaggaggaagaagctgggcaagaggaccctgctgcccctgaggaaggccgaggagaagacagtcatcttcccctgcaagcccaccatccaggccagcgagatgagcaatgtggtgcgggagctgctggagaccctgcccatcctgctgctgctggtggtgctgtgtggcctggactgggccctgtacagcatctttgacaccatccgccaccacagcttcctgcagtacagcttccgcagcagccacaagctggaggtgaaggtgggcggggacagcatgctggcccggctgctgaggaagaccatcggggccctgaacaccagcagcgagaccgtgatggagagcaacaacatgccctgcctgccccagcctgtgggcctggatgcccgggcctactggagggctgctgtgcccatcggcctgctggtgtgcctgtgcctgctgcaggccttcggctaccgcctgcggcgggtgattgctgccttctacttccccaagcgggagaagaagaggatcctcttcctgtacaatgacctgctgaagaagagagctgccttcaccaagctgcggcgggccgccatcctgcggcgggagcggcagcagaaggcccctgtgttcacagagccccagttcctgcccctgaagaatggcaagacaggagagatctgcaaggcctgcagcctggagatcagcctggagtggtggagcggcgtgggcctgcgctgccagagggcctag

SEQ ID NO: 243647 - DNA, 2121 bp, Artificial Sequence
  derived and/or modified sequence
atggacatcaagcaccaccagaacggcacccggggccagcggcggaaacagccacacacaaccgtgcagaggctgctcacttggggactacccgtgtcttgttcttggtttctgtggaggcagcccggagagttccctgttactgctctgctacttggagcaggagcgggcgggctgctggctattggccttttccaactgctggtgaatcctatgaacatatacgaggagcagaagatcatgtttctctacagtctggtgggcctgggcgcgatggggtggggcacctccccccacatccggtgtgcatctctgcttcttgttccaaagatgttgggtaaggaagggcgactgtttgtcttgggatatgcactggccgcaatttatgtcggcccagtcgcgaatctgcggcacaacctaaataatgtcattgccagcttaggctgcacagttgaactgcagattaacaacactagggctgcatggcgcatcagtaccgcccccctgcgggccatgtttaaagaccttctgtcctctaaggaactgcttagggctgaaacacggaacatatctgcaactttcgaagacctggacgcacaagttaatagcgaaacgggatacacacctgaggatacaatggacagtggcgagaccgcccagggtagagaggccagacaggccccggctagcagactgcatttaagcacacaaaaaatgtatgaactgaagaccaaactgaggtgctcatacgtagtgaatcaagcaattctcagctgcaggcggtggtttgatcggaaacacgagcagtgcatgaaacacatctgggtgcctctgttgacccacctgctttgccttcctatgaagtttaagttcttctgtgggattgcaaaagtcatggaagtctggtgtaggaatagaatccctgttgagggtaattttggccagacctacgattctctgaatcagtcaattcgcggcctggacggtgaattttctgctaacattgactttaaagaggaaaaacaagccggcgtactgggtctgaacacgtcctgggaacgagtctcgaccgaagtgcgcgactacgtgtatcgccaggaggcacggctggaatgggccttgggcctgctgcatgtactgctcagctgcacatttctccttgtgttgcatgcttccttctcatatatggattcctacaatcacgatatccggttcgataacatttacatctctacatatttctgtcagatcgatgaccgaagaaagaagctgggaaaacgtaccctactacctctcaggaaggcagaagaaaagaccgtaatcttcccctgcaagccaacgatacaggcgagtgagatgagcaacgtcgtgcgagagttgcttgaaacactgcctattcttctgcttctcgtggtgctctgcggattagattgggccctttactctatttttgacacaatcagacaccatagtttcctgcagtattcttttaggtcaagtcacaagttagaggtcaaagtgggaggggactcaatgctagcccggctgctgaggaagaccattggggcattaaatacttcctctgaaaccgtgatggaaagtaacaacatgccctgtctgccccaacccgttggcctggacgcccgagcctactggcgtgcagccgtgccaatcggcttgttggtttgtctttgtctattacaggcctttgggtacaggctgcgccgtgtgatcgccgccttctattttcccaaacgggaaaagaagaggatattgttcctctataacgacttgctgaaaaagcgggctgccttcacgaagcttcgcagagccgccattttgcgccgtgagcgacaacagaaggctccacggcaccctttagccgatatcttacaccgcggctgcccgctgctgaggcgatggttatgtaggagatgcgtggtctgtcaagcaccagagacacctgaatcctatgtgtgtcggactttggattgtgaagcagtgtattgttggtcatgctgggatgatatgcgacagcgctgtcccgtgtgcactccaagggaggaactttctagtagcgcgttttccgattccaatgacgatactgcatacgctgggtag

SEQ ID NO: 243648 - DNA, 1995 bp, Artificial Sequence
  derived and/or modified sequence
atggacatcaagcaccaccagaacggcacccggggccagcggcggaaacagccccataccaccgtgcagagactattgacctggggattgccagtgtcctgttcatggttcctttggcgccagcctggtgagttcccggtaacggccctcttgctgggcgctggagccggcggcctcttagcgattggcctctttcagctcttggtgaatccaatgaacatttatgaagaacagaaaattatgttcctgtatagcttggtcggtcttggggcaatgggctggggtacttctccacatatcagatgtgcaagtctgctgcttgtgcctaagatgctgggtaaggaaggccgtctctttgtcctcggatacgcactagccgcaatctacgtcggtcccgttgctaatcttagacataatttgaataatgtgatcgctagtcttgggtgcactgtggaactgcagatcaacaatactagggctgcatggcgtataagtaccgcgccgttgcgcgcgatgttcaaagatttgctgtctagcaaagagctgctgcgtgcagagaccagaaacatctccgccaccttcgaggatctagatgcccaggtgaactctgagactggctacacccccgaggataccatggattccggggagacagcacagggccgagaagccaggcaggcccctgcttctagattgcacctgtcaacccaaaagatgtatgagctcaaaactaagttgagatgcagctacgttgtgaatcaagctattctgtcatgccgtcggtggtttgatagaaagcacgaacaatgcatgaagcatatctgggtgccactgctgactcacctactctgtttgcctatgaaatttaaattcttttgtgggattgccaaggtcatggaggtgtggtgcagaaataggatcccagtagagggaaatttcggtcagacctacgactctctgaatcagagcatcaggggcttggacggcgaattttcagccaacattgactttaaagaggagaagcaggccggcgtgctgggtttgaacacatcctgggagagggtgagtaccgaggtgcgggactacgtgtaccgccaagaggcaaggttggagtgggcattaggcctactacacgtgctgctgtcgtgcacctttctcctggtcctgcacgcaagcttctcctacatggacagttataaccacgatatccggtttgacaatatctacatctcaacctatttttgtcagatcgacgatcggaggaagaaattgggcaagcgcacactcctaccattacggaaagctgaagagaaaactgtcattttcccctgtaagcccaccatacaggcctcggaaatgtccaatgtcgtccgcgaactgctggaaaccctgcccatactcctcctgctcgtcgtcctgtgcgggctcgactgggcattatacagtatctttgacactatcagacaccattcattccttcaatactcatttaggtcttctcacaagctggaagtcaaggtgggtggcgacagcatgttggcacgtttactgaggaagacgattggggctctcaacacaagcagcgagaccgtgatggagagcaacaatatgccctgtttgccacagccggtgggtctggatgctcgagcctactggcgcgccgccgtgcccatcggactgttagtctgtctttgcttgctgcaagcttttgggtaccggctccgccgggtgattgctgccttttacttccccaagcgtgagaaaaagcgcattctgttcctctacaacgacttgctgaaaaagcgggcagccttcactaaactgagaagagctgcaatactgcgcagagaacgccagcagaaagcacctgtgtttaccgaacctcagttcctccccttgaagaacggtaaaaccggcgaaatatgcaaagcatgcagcctggagatatctcttgagtggtggtccggcgtggggctaaggtgtcagcgggcttag

SEQ ID NO: 243649 - DNA, 1995 bp, Artificial Sequence
  derived and/or modified sequence
atggacatcaagcaccaccagaacggcacccggggccagcggcggaaacagccccacaccaccgtgcagcggctgctgacttggggactgccagtctcctgttcttggttcttgtggcggcagcctggggagttccccgtcactgcactgctgctcggtgccggtgcggggggactactggccattgggctgtttcagctcttagtgaatcctatgaacatttacgaggagcagaagatcatgtttctttattccttagtgggcttgggcgccatgggctggggaactagtccccacattagatgcgcttctctgttgctggtgcccaaaatgctaggcaaggagggccggttgtttgtactaggttacgcccttgccgctatatacgtgggccccgtggcgaatctgagacacaatctgaacaatgtcatcgctagtctgggctgtactgtagagcttcagatcaataacacaagagccgcgtggcgcatatcgactgcccctctgagagcgatgttcaaagaccttctatcatctaaagaattgttgagagcggagacccgcaatatatcagccacattcgaagatctggatgcccaggtaaactcagagaccgggtatacccctgaagatactatggacagtggtgagacagcacaagggcgcgaggcccgtcaggccccagcctctaggttgcacttgagcacgcaaaaaatgtacgaactgaagaccaagctgcgatgctcttacgtagtaaaccaagctatcctcagttgccggaggtggtttgaccgcaaacacgagcagtgcatgaaacatatttgggttcccttattaacccacctgctatgccttccaatgaagtttaaattcttttgtggaattgcaaaagtgatggaagtctggtgtaggaatcggatcccagtggaaggcaattttggccaaacatacgatagcctgaatcagtcgatcagagggctcgacggagagttctctgcaaatatcgactttaaagaagaaaaacaggcaggcgtgctcgggttaaatacatcctgggaaagggtgtcaactgaagtgcgagattatgtttatcgccaggaagctcgcctcgagtgggcactgggcttactgcacgtgctgctgagctgtacatttctgctggtgttgcacgccagcttttcctatatggactcctataaccacgacatccggttcgataacatttatatcagtacttacttctgccaaatcgacgacagaaggaagaagctcggtaagcgcacattgctccctctccgcaaagccgaagaaaagactgtaatcttcccttgtaaacctactatccaggcgagcgagatgtccaacgttgtcagagagctgctggagacattacccattctgctcctgctcgtcgtgctgtgcgggctggattgggcactgtactcaatctttgacactatacgccaccactcattccttcagtactcattccgctccagccataaattagaggtcaaggtaggaggggattcaatgctggctagacttctacgtaaaaccatcggagccctcaatactagttctgagacagtgatggagtccaacaatatgccatgcctgccgcaaccggtggggttggatgcacgggcttactggcgtgctgcggtccccattggcctgctggtttgcctgtgcctgttgcaggcgtttggttaccggcttcgcagggtcattgctgctttttacttccccaagcgggagaagaaacgaatcctgtttctgtacaatgacctgctgaaaaagcgggctgctttcactaaactccgtagggctgccatcttgaggcgcgaaaggcagcaaaaggcgcctgtgttcacagagccccaatttttgcctctcaagaatggtaagacgggggagatctgcaaggcgtgctctctcgagatttctctggagtggtggtctggggtcggtttaaggtgtcaacgggcatag

SEQ ID NO: 243650 - DNA, 2121 bp, Artificial Sequence
  derived and/or modified sequence
atggatatcaaacaccaccagaatgggacaaggggccagagacgcaaacaacctcacacaaccgtgcaaaggctgctgacctggggactgcccgtgtcctgctcttggttcctttggcgacagccaggtgaatttcctgtgaccgcactcctgttgggagcgggtgccggagggttgctggctatcggactgtttcaattgcttgtcaaccccatgaatatctacgaagagcagaaaataatgtttctctacagcctggtgggtctcggggcaatgggctggggaacctctccacacatcagatgtgcttcactgctattagtgcctaaaatgctggggaaggaggggcgtctctttgttctcggatacgctttggctgcgatctacgtggggcctgtcgctaacctgcgtcataatctgaataatgtgattgcctctctgggctgcaccgtggagttgcagatcaataatacaagagccgcatggaggatatctaccgcacccttaagagccatgtttaaagacctcctttcttcaaaggaattacttagggccgagacgcggaacatcagcgccaccttcgaggatctggacgcccaggtgaatagtgagacgggctacacacccgaggacaccatggatagcggagagaccgcccagggtagggaggctcgacaggcccctgcaagtagactgcacctgagtactcagaaaatgtatgagctgaagacaaagctcaggtgctcttatgtcgtcaatcaagcaatactcagctgccggagatggttcgaccgtaagcatgagcagtgcatgaagcatatttgggttccgctgctcacgcacctgctgtgcctgccaatgaagtttaagttcttctgtggcatcgctaaggtgatggaggtatggtgtcgtaacagaatcccagttgagggcaatttcggacagacctacgattcactcaatcaaagtatccgcggattggatggagagttttccgccaatatcgattttaaagaagagaaacaggctggcgtactaggtctgaatactagctgggaacgcgtgtctacagaggttcgcgactacgtttaccgccaggaggctcggctggagtgggctctgggcttgcttcatgtgctcctgtcttgtacgttcctcctggttctgcatgcgtccttcagctatatggatagctacaatcatgacatccgctttgacaatatctatatttccacttatttttgtcagatcgacgacaggcgcaaaaaactgggaaagagaactctgctcccgctgcggaaggcagaagaaaagaccgtcatctttccttgtaaacccaccatacaggcgtccgaaatgtccaatgttgtccgggaactgcttgaaacgcttccgatccttctgttattggtcgttctgtgtggcctggactgggcactttactctatttttgacacaatccgccaccattctttcctacagtactcatttcggagctcacacaagctcgaggttaaggtcggcggagatagcatgttggcccgtttgcttagaaaaactatcggtgcccttaacacctcttccgagaccgtaatggaatcaaacaacatgccctgtctgcctcaacccgtcggcctcgatgcacgggcttattggcgggctgccgtcccgattggattgcttgtttgtctctgtcttctccaggccttcggttatcgcctgcgcagggtgatcgccgcattttacttcccaaagagggaaaaaaagcgaatactctttctctataatgatctgttgaagaagagagctgccttcacaaagcttcgtcgggctgcaatcctgcgtagagagcgccagcagaaagcccctcgtcatccacttgccgacatcctgcaccggggatgcccgttgctgaggcggtggctgtgtcggcgttgtgtcgtgtgccaggccccagagacgccggagagctatgtctgccggaccctagactgcgaggccgtatactgttggtcttgttgggacgatatgaggcaacggtgtcctgtgtgtacccctagggaagagctttctagctcagctttttcagacagtaacgacgacaccgcatatgctggttag

SEQ ID NO: 243651 - DNA, 1995 bp, Artificial Sequence
  derived and/or modified sequence
atggatattaagcaccatcaaaatggtaccagaggccaacgtcgcaagcagcctcatactaccgtgcaaagattgttaacttggggcctccctgtcagttgctcctggtttttgtggagacagcccggagaattcccagtcacggcacttttgctgggtgccggagcgggaggcctcctggcaatagggctctttcaactcctggttaaccctatgaatatctatgaggaacagaaaatcatgtttttgtattctctagtcggtcttggcgctatggggtggggaacatctccgcatatcagatgcgcatctctcttgctggttcccaaaatgctgggaaaagaaggacggctcttcgttttaggttatgccctcgccgcaatctacgtcgggccagtagctaatctgagacataacctgaacaatgtgattgccagcctgggctgtactgtggagctgcagataaataatacccgtgcagcttggcgcatctctaccgcgcctctccgggctatgtttaaagatctcctgagctccaaagagctccttcgcgcagagacccgcaacatttctgcaacgttcgaagacctggatgcccaggtgaattctgagactggttatacaccagaggacacgatggactccggggaaacggctcagggaagggaggccagacaggccccagcatccaggcttcacctttcaactcagaagatgtatgagctcaaaaccaagttacgatgcagctatgtagtaaatcaagccatcctgtcctgcagaagatggtttgataggaagcacgagcagtgtatgaagcacatctgggtgccactgctcacacatctgctctgtctgcccatgaagtttaaatttttctgtgggatcgcaaaggtgatggaagtctggtgcaggaatcggattccagtggagggcaactttggccagacttatgactcccttaaccagagcattcggggtctggacggagagtttagtgcgaatatcgacttcaaagaagagaagcaggccggtgtgttaggactgaacacctcctgggagagagtgagcactgaagtcagagattacgtctatagacaggaagctcgcctggaatgggccctgggattgcttcatgtactcctgtcctgtacattcctgcttgtgctccacgcctccttttcatatatggacagctataatcatgatattcggtttgataacatttacatctccacatatttctgtcagatcgacgacagaagaaagaaactcgggaaacggaccctgctccctcttcgaaaggctgaagagaaaaccgtgatattcccatgcaagcccacaatacaggcctctgaaatgtccaacgttgtacgcgagctcctggagacactgccaattcttctgctgctcgtggttctttgcggcctcgattgggcattgtactccatatttgataccatccggcaccactcttttttacaatacagcttccgatcctcacataagttagaagtgaaagttgggggtgattccatgctggctcgcctgctgcggaaaacaatcggtgccctcaatactagttccgagaccgttatggagagcaacaacatgccctgtttgccgcagcctgtcgggctggatgctcgcgcttactggagggctgccgtaccgattggcctcctggtttgtttgtgtctacttcaagcttttggataccggctccggagggtcatcgctgccttctactttcccaaaagggagaaaaaaagaattctgttcctatacaacgaccttctgaaaaagcgggctgctttcacgaagttacgaagggccgctatcctcagacgggagagacagcagaaagctcccgtgtttaccgagccgcaatttcttccactgaaaaatggcaagactggcgaaatctgcaaagcctgctctttggagatcagtttggagtggtggagcggcgtagggctgcgatgccagagggcttag

SEQ ID NO: 243652 - DNA, 1995 bp, Artificial Sequence
  derived and/or modified sequence
atggatattaagcaccatcagaatgggactcgaggccagagaaggaaacaaccccacacaaccgtgcagagacttctcacgtggggccttcctgtaagctgctcttggttcctgtggcggcagccaggtgagttccccgtcacggcattgctgttaggtgctggcgctgggggactcctggctattggactatttcagctcctggtgaaccctatgaatatttatgaagaacagaagattatgttcttgtattcgctggtgggacttggcgctatgggatgggggacgtccccccacataagatgcgcttcactcctcctcgtgcccaagatgcttggcaaagagggcagacttttcgtcttgggctacgctcttgctgctatctacgtggggccagtagcaaacttgcgtcacaacctcaataacgtgatagcaagcctgggatgcactgtggaactacagatcaataacacacgcgctgcctggcggatcagcacagcgccactcagagcaatgttcaaagacctgcttagttctaaagagctgctgcgggctgagacacgaaacatctctgctacctttgaagatttggacgcacaggttaatagcgaaacggggtacacacctgaagacaccatggattcgggagaaactgcccagggaagagaagctagacaggccccagcgagtaggctgcacttgagcacccagaagatgtatgagctgaagaccaaactccgctgctcgtacgttgtgaaccaggcgattctgtcctgtcgccgatggttcgaccgtaagcacgaacagtgcatgaagcacatatgggtgcccctgctgacacatttgctgtgcctccccatgaaattcaagttcttctgtggcatcgcaaaagtaatggaggtctggtgtcgaaacagaattccggtcgagggaaattttggccagacttacgattcattaaatcagagcataaggggattggatggcgagttttccgcaaacatcgattttaaagaagagaaacaggctggggtcctaggcctgaacacaagctgggaacgagtgtccacagaagtgcgggattacgtgtatcgccaggaagcgagattagaatgggctttgggcctcctccacgttctgctcagctgtaccttcctccttgtcctgcacgcatccttctcctatatggacagctacaatcacgacatcagatttgacaacatctacatatccacatacttttgccagatcgatgacagacgcaagaagctcggaaagcgaacactgctgcccctgagaaaggccgaagagaaaaccgttattttcccgtgcaagcctacaatccaggcttcagagatgagcaacgtggtgcgggagctgctggagacactcccaattctgttgctcctagtcgtgctgtgcggccttgattgggctctgtactctattttcgataccatacgccaccactcttttctgcagtattcatttagaagttcacataagttagaagtgaaggtgggaggggattcaatgttggcacggctgctgcgcaaaactatcggagccctgaacacaagttccgagaccgtcatggagagcaacaacatgccatgcctgcctcagcccgtgggtctggatgcaagggcctactggcgggctgcagtgccaatagggctccttgtatgtctttgtctgttacaagcattcggatatcggctgcgaagagtcattgccgctttttattttcctaaaagagagaaaaaacggatcctttttctgtacaatgatctgctcaaaaagcgcgctgcattcacaaagcttaggcgcgctgccatcttaaggagagagagacaacaaaaagcacccgtgtttactgagccccagtttttgcctctaaagaacggtaagacaggggagatctgcaaggcctgttccctcgaaatttctctggaatggtggtcaggggtaggactgaggtgccagcgggcttag

SEQ ID NO: 243653 - protein, 160 aa, Artificial Sequence
  derived and/or modified sequence
MAFTFAAFCYMLSLVLCAALIFFAIWHIIAFDELRTDFKSPIDQCNPVHARERLRNIERICFLLRKLVLPEYSIHSLFCIMFLCAQEWLTLGLNVPLLFYHFWRYFHCPADSSELAYDPPVVMNADTLSYCQKEAWCKLAFYLLSFFYYLYCMIYTLVSS

SEQ ID NO: 243654 - DNA, 2558 bp, Artificial Sequence
  derived and/or modified sequence
ccgggtcgcaccgctacagttctcgcagtggcaaaggcggcggcggcggcggcggcagcggcagcagcaggtggagcgagctacagcgtttggcctgaaacccactgctgcagccacccgggctggagttggcccgttgggtggagccagtgctcgccccggtccgacccccggtttccgggacacttgggttgcggaggccggctggccggagtcacggttggggacgggcgcgcctcggagcgcacggctgcgctggaagccgcgtctggggcgcaggaccaacgggacctacctcctcccggctacctaaagactccttctctcgggaaagagcgctgcccggctctgggatttgggaggagctcggaggccgctcgggcacctcgctggacactatccgtttgcgccccggtggcgcgggagggtccggagcggagcgctcgtctctcctcagcggtttagtggagaaaagcagagagctcttcctggggcgaatgggacctcctccctcggtcctccgtggagtcgtcgcatcgcttgtcgtgttggtctcgaggggctcacagcttggcactaatttgcaggtgttcgctgctgatttggtttcttcttcgatttgcggacggttccctccagcgactctcgacacacgttttcctgtcttcgccggagggccgggtctggggtcgccggagcctgcgggaatccagcgcttattcgctgaccctcgagtcgcttcgctagctgtgcgccctcctgggcactagcctggagaggagcgtgcagacgcggctccttggagggagtgcggtcctctagggaggcatcgggctcctaggggcttcttggcgtgtgtggtgggattggggtccgccggccatggccttcactttcgctgcgttctgctacatgctgtctctggtgctgtgcgctgcgctcatcttcttcgccatctggcacataattgcctttgatgagttaaggacagattttaagagccccatagaccagtgcaatcctgttcatgcgagggaacggttgaggaacatcgagcgcatctgcttccttctgcgaaagctggtgctgccagaatactccatccatagcctcttctgcattatgttcctgtgtgcgcaagagtggctcacgctggggctgaatgtccctctacttttctatcacttctggaggtatttccactgtccagcagatagctcagaactagcctacgacccaccggtggtcatgaatgccgacactttgagttactgtcagaaggaggcctggtgtaagctggccttctatctcctctccttcttctactacctttactgcatgatctacactttagtgagctcttaacgcaaagaccatgcacatcatcagagactgagatgggagaggcctgagacggagaggtgcatttctgctggtgactggaggagggaccagaatgaggatacgtgagaaatagacccggcaggcagtcagactgaatgggagctggaatcacgcagcagctgggagccgagttaaccctgcgtgtctgtgtcaccctgtttgtcaatctttggcattcgaattccacacacggggtcctagagcccttctgagcatcagtggtgtgggggagtaggtgacgaaacactagacctctcctgagagagaattgctgcttcctgaatccacttcattgaacagcaccttgcaagttcaaatgagttcctgggagcggaggctggaaggccacaaggtgcttgctaaggaacagaatgacccagagtcaaggccaagtctgcagggacctgttgaaagcctcgagaatgtcttggctgcccaagactcttgttgcctttcttccaagccatggccatgccctttttctcaaatgggaggggctggagggtgtgtgggatttgtcttcagctgcaaccagccttgagcctgctgggctattttcagctgaggaggggtgaatataggaaaaatgcatttttgaaacgtttgcaacatgatcaaggtgttagttctccaccacacaagttgtattcttcttttgccacctcaaaccatcacagagtctttaaatgcaaatcaattggtcaatgctagtcaaagctatgttcttacaaaaaccccagacagctcagagctcagaaaatcctgtggagtggctgctctgtaccgtgggcatccggcagccaggaagtgagacaacataattataactttgttttatgatgctgcatcatttgtactgtttaggtcgacgtgaggacatcatcttatttagaattttccgtttggcattctcttttgggtgggagttatgctgggggttgtaaataatgacaaggctgagatttttatgatgtttaaattgggcacaatgattttgaccttattccccaaacttcttttcttttctactgtttaacatacacaggctatttatacacgtccccagctcccatctgaaacctgtgactcaggtttatgaatggtgtttgtgtagcaacacattgtgtgctatgtttattaaaatgcagcgacaa

SEQ ID NO: 243655 - DNA, 483 bp, Artificial Sequence
  derived and/or modified sequence
atggccttcaccttcgccgccttctgctacatgctgagcctggtgctgtgcgccgccctgatcttcttcgccatctggcacatcatcgccttcgacgagctgagaaccgacttcaagagccccatcgaccagtgcaaccccgtgcacgccagagagagactgagaaacatcgagagaatctgcttcctgctgagaaagctggtgctgcccgagtacagcatccacagcctgttctgcatcatgttcctgtgcgcccaggagtggctgaccctgggcctgaacgtgcccctgctgttctaccacttctggagatacttccactgccccgccgacagcagcgagctggcctacgacccccccgtggtgatgaacgccgacaccctgagctactgccagaaggaggcctggtgcaagctggccttctacctgctgagcttcttctactacctgtactgcatgatctacaccctggtgagcagctag

SEQ ID NO: 243656 - DNA, 483 bp, Artificial Sequence
  derived and/or modified sequence
atggcattcacctttgccgctttctgttatatgctttctctggtactctgtgcagccttgatcttcttcgctatatggcacattatcgcatttgacgaactgcggaccgattttaaatccccaatcgaccagtgcaatccggtacacgccagggagcgcctcagaaatatcgagaggatttgcttccttctgaggaagctcgtcctgcctgagtatagtatccacagtctattctgcatcatgttcctgtgtgctcaggagtggctcactcttggcttgaacgtccctttgcttttttaccacttttggaggtattttcactgccctgcagacagcagtgaactcgcttacgacccacctgtagtgatgaatgcggacaccctgtcttattgtcaaaaggaagcatggtgtaagttggcattttatctccttagcttcttttattacctatattgcatgatttatacactcgtgtcaagttag

SEQ ID NO: 243657 - DNA, 483 bp, Artificial Sequence
  derived and/or modified sequence
atggccttcacctttgctgccttctgctacatgctgagcctggtgctgtgtgccgccctgatcttctttgccatctggcacatcatcgcctttgatgagctgaggacagacttcaagagccccatcgaccagtgcaaccctgtgcacgcccgggagcggctgagaaatattgagcgcatctgcttcctgctgaggaagctggtgctgcctgagtacagcatccacagcctcttctgcatcatgttcctgtgtgcccaggagtggctgaccctgggcctgaatgtgcccctgctcttctaccacttctggagatacttccactgcccagctgacagcagcgagctggcctatgacccccctgtggtgatgaatgctgacaccctgagctactgccagaaggaggcctggtgcaagctggccttctacctgctgtccttcttctactacctgtactgcatgatctacaccctggtgagcagctag

SEQ ID NO: 243658 - DNA, 483 bp, Artificial Sequence
  derived and/or modified sequence
atggccttcaccttcgccgccttctgctacatgctgagcctggtgctgtgcgcggcactgattttctttgctatttggcacattattgccttcgatgaactgaggaccgactttaagtcacctatcgatcaatgcaacccggtccatgcgcgggaacgcttgaggaacattgagcggatttgcttcctcctacggaagctggttttgcctgagtatagcattcactcactattttgcattatgttcctctgtgcgcaggagtggctcacacttggtctcaatgtgccgttactgttttatcatttctggcgatatttccactgtcctgccgactcttcggaactcgcgtatgacccacccgttgtgatgaacgccgacaccctcagctactgtcagaaagaagcttggtgcaaactggctttttatctgctgagtttcttctattacctttattgcatgatatacacactggtatccagctag

SEQ ID NO: 243659 - DNA, 483 bp, Artificial Sequence
  derived and/or modified sequence
atggctttcaccttcgcggcattctgctacatgttgtccttagtcctctgcgccgcactgatcttcttcgcgatatggcatatcatagcattcgacgagctcagaaccgactttaagagccccattgaccagtgtaacccagtgcacgcgcgagaacggctgaggaacattgagaggatctgcttcctgttgcggaagctggtgctcccggagtacagcatccacagcctgttttgcattatgtttctttgcgcacaagagtggctaacactaggcctgaacgtgccgctcctgttctaccatttttggcggtattttcactgtcccgctgattcttccgaactggcttacgaccctcctgtcgtaatgaatgcggacacgctcagttattgccaaaaggaagcttggtgtaagttggcattctatctgctctcttttttctattatctctactgcatgatctacactttggtgtcctcctag

SEQ ID NO: 243660 - protein, 492 aa, Artificial Sequence
  derived and/or modified sequence
MANNYKKIVLLKGLEVINDYHFRIVKSLLSNDLKLNPKMKEEYDKIQIADLMEEKFPGDAGLGKLIEFFKEIPTLGDLAETLKREKLKVANKIESIPVKGIIPSKKTKQKEVYPATPACTPSNRLTAKGAEETLGPQKRKKPSEEETGTKRSKMSKEQTRPSCSAGASTSTAMGRSPPPQTSSSAPPNTSSTESLKPLANRHATASKNIFREDPIIAMVLNATKVFKYESSENEQRRMFHATVATQTQFFHVKVLNINLKRKFIKKRIIIISNYSKRNSLLEVNEASSVSEAGPDQTFEVPKDIIRRAKKIPKINILHKQTSGYIVYGLFMLHTKIVNRKTTIYEIQDKTGSMAVVGKGECHNIPCEKGDKLRLFCFRLRKRENMSKLMSEMHSFIQIQKNTNQRSHDSRSMALPQEQSQHPKPSEASTTLPESHLKTPQMPPTTPSSSSFTKKDETHPGAQSSPANFRITSPTVAPPLSSDTSTNRHPAVP

SEQ ID NO: 243661 - protein, 150 aa, Artificial Sequence
  derived and/or modified sequence
MANNYKKIVLLKGLEVINDYHFRIVKSLLSNDLKLNPKMKEEYDKIQIADLMEEKFPGDAGLGKLIEFFKEIPTLGDLAETLKREKLKVANKIESIPVKGIIPSKKTKQKEVYPATPACTPSNRLTAKGAEETLGPQKRKKPSEEETGTK

SEQ ID NO: 243662 - DNA, 1479 bp, Artificial Sequence
  derived and/or modified sequence
atggctaacaattacaaaaagatagtgctacttaaggggctcgaggtgatcaatgattaccacttccgtattgttaaaagcctactgagcaacgacctcaagctgaatccgaaaatgaaagaggaatatgacaaaatccagattgccgatctgatggaagaaaagtttcccggggacgcgggtctgggaaagctgatcgagtttttcaaggaaatccccactctgggagaccttgcggagacactgaaaagagagaagttgaaggtcgccaacaaaatagaatccattccagtaaaaggcatcattccatctaagaagacgaagcagaaggaagtttaccccgctacacctgcctgcactcccagtaataggttgaccgccaaaggcgccgaggaaacactgggacctcagaagcgcaaaaaacctagcgaggaggagactggaaccaaaaggtccaagatgtctaaggaacagaccagaccatcatgtagtgccggcgctagcacttcaaccgcaatggggcgctccccaccacctcaaacctcgtcctctgcacctccgaatacctcttctactgaaagtctcaaacctctcgctaaccgtcatgcaaccgcatctaagaacattttccgcgaggacccgataatagcaatggtccttaatgccacgaaggtgttcaaatacgaatccagcgaaaacgaacagcgcaggatgtttcacgcaactgttgcaacccagacccaattcttccacgtcaaagtgctgaacattaatctgaagagaaagtttataaagaagagaattattattattagtaactattctaaaagaaactccctcctggaggtgaacgaggcatcctctgtgtcagaagccggacccgaccagacctttgaagtccccaaagatataatcaggcgggccaagaagatccctaagattaatatactccataagcagacatctggatacattgtgtacggactcttcatgttacatacaaaaatcgtgaaccgtaagaccactatatacgagatccaggataaaactggaagtatggccgtggtcggcaagggtgagtgccataatatcccctgtgagaaaggtgacaaactccgcctgttttgtttcaggttgcgaaaacgagagaatatgagtaaacttatgagcgagatgcattcttttatacagatacaaaaaaatacaaatcaaagatctcatgacagtcgctctatggctcttccacaggagcaaagtcagcaccctaaacctagcgaggctagtacgactctccctgaatcccatcttaagaccccacaaatgccccccaccaccccatcttccagttcctttaccaagaaggacgaaacccacccaggggcccaatctagcccagctaatttcagaatcaccagtcccacagtagcccctcctctgtcaagcgataccagtaccaatcgccaccccgctgtgccatag

SEQ ID NO: 243663 - DNA, 1479 bp, Artificial Sequence
  derived and/or modified sequence
atggccaacaactacaagaagatcgtgctgctgaagggcctggaggtgatcaatgactaccacttccgcatcgtgaagagcctgctgagcaatgacctgaagctgaaccccaagatgaaggaggagtatgacaagatccagattgctgacctgatggaggagaagtttcctggagatgctggcctgggcaagctgattgagttcttcaaggagatccccaccctgggggacctggccgagaccctgaagcgggagaagctgaaggtggccaacaagattgagagcatccctgtgaagggcatcatccccagcaagaagaccaagcagaaggaggtgtacccagccaccccagcctgcacccccagcaaccggctgacagccaagggagctgaggagaccctgggcccccagaagaggaagaagcccagcgaggaggagaccggcaccaagaggagcaagatgagcaaggagcagacccggcccagctgcagcgctggggccagcaccagcacagccatgggccgcagccccccaccccagaccagcagcagcgccccacccaacaccagcagcacagagagcctgaagcccctggccaacagacatgccacagccagcaagaacatcttccgggaggaccccatcatcgccatggtgctgaatgccaccaaggtgttcaagtatgagagcagtgaaaatgagcagaggaggatgttccacgccaccgtggccacccagacccagttcttccacgtgaaggtgctgaacatcaacctgaagaggaagttcatcaagaagaggatcatcatcatcagcaactacagcaagaggaacagcctgctggaggtgaatgaggccagctctgtgtctgaggccggccctgaccagacctttgaggtgcccaaggacatcatccggcgggccaagaagatccccaagatcaacatcctgcacaagcagaccagcggctacatcgtgtatggcctcttcatgctgcacaccaagatcgtgaacaggaagaccaccatctatgagatccaggacaagacaggctccatggctgtggtgggcaagggggagtgccacaacatcccctgtgagaagggggacaagctgcggctcttctgcttccggctgaggaagcgggagaacatgagcaagctgatgtctgagatgcacagcttcatccagatccagaagaacaccaaccagaggagccatgacagccgctccatggccctgccccaggagcagagccagcaccccaagcccagcgaggccagcaccaccctgcctgagagccacctgaagaccccccagatgccacccaccacccccagcagcagcagcttcaccaagaaggatgagacccaccctggggcccagagcagccctgccaacttccgcatcaccagccccaccgtggccccacccctgagcagtgacaccagcaccaacagacaccctgctgtgccctag

SEQ ID NO: 243664 - DNA, 1479 bp, Artificial Sequence
  derived and/or modified sequence
atggccaacaactacaagaagatcgtgctgctgaagggcctggaggtcatcaatgattaccactttcgcatagtcaagagtctgctgtcaaacgacctaaagctcaacccaaaaatgaaggaagagtatgataaaatacagatcgccgatcttatggaggaaaagtttcccggagatgctggcctggggaaactgatcgagtttttcaaagaaatccctacccttggcgacctggccgagaccctgaaaagggaaaagcttaaagtcgccaataaaatagagtctatccctgtaaaaggaataatcccctcaaagaagactaaacaaaaggaggtataccctgctacccccgcctgcacacccagcaatcggcttaccgctaagggcgcagaagaaacgctgggccctcagaaaaggaagaaaccatctgaagaggagacaggaactaagaggtccaagatgtccaaagagcagactaggccttcttgttcggccggcgcctctacgtccactgcgatgggccggagtccccccccgcagacatcctcctctgctccacctaatacgtccagcacggaatcattaaagcccctcgcaaatagacatgccacggcaagcaagaatatctttcgggaggatcccatcattgccatggtgttaaatgccactaaagtctttaagtatgaaagtagcgaaaatgagcagcggagaatgttccacgcgactgtagcgacccaaactcaattcttccatgtaaaagtgctgaatatcaatctaaaaagaaagttcatcaagaaaagaattattatcatatctaactactctaagcgaaattcactgctggaagtgaatgaggccagtagcgtgtcagaagcagggcccgaccagactttcgaagtgccaaaggatatcatacggagggccaagaagattcctaagattaatatcctccacaagcagacaagcggatacatagtgtacggcctgttcatgctgcataccaaaatcgtcaaccggaagaccacaatttacgaaatccaggacaaaactggatcaatggccgttgtggggaagggcgagtgccacaacatcccttgcgagaagggcgataagctcaggttgttctgcttccgcctgcggaaaagggaaaacatgtcaaagctcatgtctgaaatgcattcctttatacagatccagaagaacaccaaccagagatcacatgattcacggagcatggcattaccgcaagagcagtcacagcaccccaagccctcggaggcttctaccacactgcctgagagccacctaaaaacaccacagatgcctcctacaacaccctcgtcctcatccttcaccaaaaaggatgaaacacatccgggcgctcagtcttccccagctaattttcggattaccagcccaacagtcgccccacctttatcttccgacacgtcaaccaatcggcatccagccgtgccttag

SEQ ID NO: 243665 - DNA, 1479 bp, Artificial Sequence
  derived and/or modified sequence
atggcaaataattataaaaaaattgtgctcctgaaggggctggaagtcatcaatgactatcattttagaattgttaaatcacttttgagcaatgatttaaagctgaaccctaaaatgaaagaggagtacgataaaatccagattgccgacttaatggaggaaaagtttccgggagatgcaggcttaggcaaacttattgagtttttcaaagagatacccacactcggagaccttgcggagacgttgaagcgcgaaaaactgaaagtggccaacaagattgagtctatacccgtcaaaggcatcataccgagtaaaaagaccaaacaaaaagaggtctaccccgcaacgccagcctgtactccctcaaatagattaacagccaagggagccgaagagacactcggtccccagaagcgaaagaagccttcagaagaagaaaccggaacgaaacggagtaagatgtctaaggagcaaacaagacccagctgcagcgctggggcttccacaagcacagccatgggtaggagtccccctccacagaccagcagcagtgccccaccaaacacatccagcaccgagagtctaaaacccctggccaacagacacgcaacagcgagcaagaatattttccgcgaggatccaattatcgctatggtgctcaacgcgactaaggtgtttaaatatgaaagttccgagaacgagcagcggagaatgtttcacgccaccgtggctacccagacccaattcttccatgtgaaggtcctgaacatcaacttaaagcggaaattcataaagaaacgaatcattatcatcagtaattacagcaagcgtaactccctactcgaagtcaacgaagcttcctctgtgtccgaggcagggccagaccagacctttgaagtacctaaggacataattcgaagagcgaagaaaattcccaagattaacattctgcacaagcagacaagcgggtacatcgtgtatggccttttcatgctgcataccaaaatcgtgaacagaaagacaaccatttatgagattcaagataagacaggctctatggctgttgttgggaaaggggaatgccacaatatcccatgcgaaaaaggagacaagctgcggctgttttgtttccgcttgcggaagcgggagaatatgagtaagctcatgtcagaaatgcactcattcattcagatccagaaaaacactaatcagcgctcccatgactcccggagtatggctttgccacaggaacagtctcagcatccaaagccatctgaggccagcactaccttgccagagtcacatcttaagactccacagatgcctcctaccacccccagctccagttctttcacaaagaaagacgagacgcacccaggagctcagagcagcccggctaatttccggattacttctcccactgttgcgcctcctctgtcaagtgatacctccacaaataggcatccagctgtgccctag

SEQ ID NO: 243666 - DNA, 2083 bp, Artificial Sequence
  derived and/or modified sequence
agagtatgaggaagccagcactagtcaagtgactctaagaagggccattttcccttgttgtctttgaaaatacttcattttcttagcatttcaggagattataacatcctgtatttcagtttctgagagctttactgactgatttccctattcaaaacaatcctcatttcctacatttctgaagatctcaagatctggactactgttgaagaaattcccagtaaggctcacttatatctttagagatggcaaataactacaagaaaattgttctactgaaaggattagaggtcatcaatgattatcattttagaattgttaagtccttactgagtaacgatttaaaacttaatccaaaaatgaaagaagagtatgacaaaattcagattgctgacttgatggaggaaaagttcccaggtgatgccggtttgggcaaactaatagaattcttcaaagaaataccaacactgggagaccttgctgaaactcttaaaagagaaaagttaaaagttgcaaataaaattgaatccattccagtcaaaggaataatcccatctaaaaagacgaaacagaaagaagtgtatcctgctacacctgcatgcaccccaagcaaccgtctcacagctaaaggagcagaggagactcttggacctcagaaaagaaaaaaaccatctgaagaagagactggaaccaaaaggagtaagatgtccaaagagcagactcggccttcctgctctgcaggagccagcacgtccacagccatgggccgttccccacctccccagacctcatcatcagctccacccaacacttcctcaactgagagcctaaaaccattggccaaccgtcacgcaactgccagtaaaaatattttccgagaagacccaataatcgcgatggtactaaatgcaacaaaagtatttaaatatgaatcctcagaaaatgagcaaagaagaatgtttcatgctacagtggctacgcagacacagttctttcatgtgaaggttttaaacatcaacttgaagaggaaattcattaaaaagagaatcatcattatatcaaattattccaaacgtaatagtctcctagaggtgaatgaagcctcttctgtatctgaagctggtcctgaccaaacgtttgaggttccaaaggacatcatcagaagagcaaagaaaattccgaagatcaatattcttcacaaacaaacttcaggatatattgtatatggattatttatgctacatacgaaaattgtaaataggaagacgacaatctatgaaattcaggataaaacaggaagtatggctgtagtaggaaaaggagaatgccacaatatcccctgtgaaaaaggagataagcttcgactcttctgctttcgactgagaaagagggaaaatatgtcaaaactgatgtcagaaatgcatagtttcatccagatacagaaaaatacaaaccagagaagccatgactccaggagcatggcactaccccaggaacagagtcagcatccaaaaccttcagaggccagcacaaccctacctgaaagccatctcaagactcctcagatgccaccaacaaccccatccagcagttccttcaccaagaaggatgaaacccacccaggagcacagtcatcgcctgcaaactttagaatcacctcaccaactgtggcccctcctctttcttctgacacttccaccaaccgccatccagcagttccttaaataaggtcaccaaggacaaggatatcaaataactactgttcaatctttactcaagtgtggaaattttgcctgaagtcctccacctaaaaacctgatgccattggtaatgatgtttatgaagataagatcaaagcacagaaaataatatatgtatatatatctggttgaaatactatatatatatatatatatatatatatatatatatatatatatatataccagctattaattctaggaaatggagtattaagggtgcattttatttcattagttttacttttatgcattttcttcatatcatattttgcattcagaattttcataatttgaaaaaaaataaacttttttttcttaaa

SEQ ID NO: 243667 - DNA, 1479 bp, Artificial Sequence
  derived and/or modified sequence
atggccaacaactacaagaagatcgtgctgctgaagggcctggaggtgatcaacgactaccacttcagaatcgtgaagagcctgctgagcaacgacctgaagctgaaccccaagatgaaggaggagtacgacaagatccagatcgccgacctgatggaggagaagttccccggcgacgccggcctgggcaagctgatcgagttcttcaaggagatccccaccctgggcgacctggccgagaccctgaagagagagaagctgaaggtggccaacaagatcgagagcatccccgtgaagggcatcatccccagcaagaagaccaagcagaaggaggtgtaccccgccacccccgcctgcacccccagcaacagactgaccgccaagggcgccgaggagaccctgggcccccagaagagaaagaagcccagcgaggaggagaccggcaccaagagaagcaagatgagcaaggagcagaccagacccagctgcagcgccggcgccagcaccagcaccgccatgggcagaagcccccccccccagaccagcagcagcgccccccccaacaccagcagcaccgagagcctgaagcccctggccaacagacacgccaccgccagcaagaacatcttcagagaggaccccatcatcgccatggtgctgaacgccaccaaggtgttcaagtacgagagcagcgagaacgagcagagaagaatgttccacgccaccgtggccacccagacccagttcttccacgtgaaggtgctgaacatcaacctgaagagaaagttcatcaagaagagaatcatcatcatcagcaactacagcaagagaaacagcctgctggaggtgaacgaggccagcagcgtgagcgaggccggccccgaccagaccttcgaggtgcccaaggacatcatcagaagagccaagaagatccccaagatcaacatcctgcacaagcagaccagcggctacatcgtgtacggcctgttcatgctgcacaccaagatcgtgaacagaaagaccaccatctacgagatccaggacaagaccggcagcatggccgtggtgggcaagggcgagtgccacaacatcccctgcgagaagggcgacaagctgagactgttctgcttcagactgagaaagagagagaacatgagcaagctgatgagcgagatgcacagcttcatccagatccagaagaacaccaaccagagaagccacgacagcagaagcatggccctgccccaggagcagagccagcaccccaagcccagcgaggccagcaccaccctgcccgagagccacctgaagaccccccagatgccccccaccacccccagcagcagcagcttcaccaagaaggacgagacccaccccggcgcccagagcagccccgccaacttcagaatcaccagccccaccgtggccccccccctgagcagcgacaccagcaccaacagacaccccgccgtgccctag

SEQ ID NO: 243668 - protein, 307 aa, Artificial Sequence
  derived and/or modified sequence
MATAQLSHCITIHKASKETVFPSQITNEHESLKMVKKLFATSISCITYLRGLFPESSYGERHLDDLSLKILREDKKCPGSLHIIRWIQGCFDALEKRYLRMAVLTLYTDPMGSEKVTEMYQFKFKYTKEGATMDFDSHSSSTSFESGTNNEDIKKASVLLIRKLYILMQDLEPLPNNVVLTMKLHYYNAVTPHDYQPLGFKEGVNSHFLLFDKEPINVQVGFVSTGFHSMKVKVMTEATKVIDLENNLFRENSTTEIAHQGLDCDEEEECNDHIQRMNFVCSQQSSECSRKKRKVSEPVKVFIPNRK

SEQ ID NO: 243669 - DNA, 924 bp, Artificial Sequence
  derived and/or modified sequence
atggcgacagcacagctgtctcactgcatcacgattcacaaggcttccaaggagaccgtgttcccatcccagattaccaacgagcatgagtcattgaaaatggtgaagaaactgtttgccacctctatctcttgtattacatatttacgcgggctctttccggaaagcagttacggcgaaagacacctcgatgatctgtctttgaaaatattacgtgaggacaagaaatgtccaggctctctccatatcattcgatggatccaggggtgttttgacgctcttgaaaaacgctacctgaggatggctgtgctgacgctgtatactgaccctatgggttctgagaaagtcactgagatgtaccagtttaagttcaagtacacgaaggaaggagccaccatggatttcgactcacatagctcttcaacctcctttgaatcaggcacaaacaatgaagacatcaaaaaagccagtgtccttttaatacgcaagctgtacatactcatgcaggatctggagccgttgcctaacaacgtggtgctaaccatgaagctgcactactataacgccgtcacaccccacgactaccaaccactcggctttaaggaaggcgtcaacagccacttcctgcttttcgacaaagaacccattaatgtgcaagtgggctttgtgagcactggctttcacagcatgaaagtgaaggtgatgaccgaagcgaccaaggtgatcgacttagagaacaatctttttagagagaactccaccacagagatcgctcaccaaggactggattgtgatgaggaggaggagtgtaacgaccatatccagcgcatgaactttgtatgctcccagcagtccagcgagtgcagccgcaagaagaggaaagtttctgagccagtgaaggtcttcatccccaacaggaagtag

SEQ ID NO: 243670 - DNA, 924 bp, Artificial Sequence
  derived and/or modified sequence
atggctacagctcaactgagccattgcatcaccatccataaggcttccaaagagacggtttttcccagtcaaatcaccaatgagcacgaaagtttaaagatggtcaagaaattattcgcaacaagcatctcttgcatcacctacctccgaggcttgttccccgagagttcctacggagagagacaccttgatgacttgagcctgaaaatactgagggaagacaagaagtgccctggtagtctccatatcattaggtggattcagggctgcttcgacgctctggaaaaaaggtatttacgaatggctgttctgaccctgtataccgatcctatggggtcagagaaggtgactgagatgtaccaattcaagttcaagtacactaaggaaggtgccaccatggatttcgactcacattcctcctccacctccttcgagtctggcactaacaacgaagatatcaagaaggccagtgtgctgttaatcagaaagctgtacatcctgatgcaggacttggagcctctcccaaataacgtggtcttaactatgaagctgcactattataatgccgtgaccccgcacgattaccaacctcttggattcaaggaaggagtgaatagtcacttcctgctgtttgataaggaaccgattaatgtgcaagtggggttcgtgtcgaccggatttcattctatgaaagtgaaagtaatgactgaggcaactaaagtgattgacctcgagaacaatctgttccgtgagaatagcacgaccgagattgcacatcagggcctggattgtgatgaggaagaggagtgtaatgatcacattcagcgcatgaacttcgtgtgtagccagcagtcttcagaatgttcacggaaaaaacgaaaggtttcagaaccagtgaaggtgttcattcctaacaggaaatag

SEQ ID NO: 243671 - DNA, 924 bp, Artificial Sequence
  derived and/or modified sequence
atggccacagcccagctgagccactgcatcaccatccacaaggccagcaaggagaccgtcttccccagccagatcaccaatgaacatgagagcctgaagatggtgaagaagctgtttgccaccagcatcagctgcatcacctacctgcggggcctcttccctgagagcagctatggagagcggcacctggatgacctgagcctgaagatcctgcgggaggacaagaagtgccccggcagcctgcacatcatccgctggatccagggctgctttgatgccctggagaagcgctacctgaggatggctgtgctgaccctgtacacagaccccatgggcagcgagaaggtgacagagatgtaccagttcaagttcaagtacaccaaggagggcgccaccatggactttgacagccacagcagcagcaccagctttgagagcggcaccaacaatgaagacatcaagaaggcctctgtgctgctgatcaggaagctgtacatcctgatgcaggacctggagcccctgcccaacaacgtggtgctgaccatgaagctgcactactacaatgctgtgacccctcatgactaccagcccctgggcttcaaggagggcgtgaacagccacttcctgctgtttgacaaggagcccatcaacgtgcaggtgggctttgtgtccacaggcttccacagcatgaaggtgaaggtgatgacagaggccaccaaggtgattgacctggagaacaacctcttccgggagaacagcaccacagaaattgcccaccagggcctggactgtgatgaggaggaggagtgcaatgaccacatccagaggatgaactttgtgtgcagccagcagagcagtgaatgttccaggaagaagaggaaggtgtctgagcctgtgaaggtgttcatccccaacaggaagtag

SEQ ID NO: 243672 - DNA, 924 bp, Artificial Sequence
  derived and/or modified sequence
atggccaccgcccagctgagccactgcatcaccatccacaaggcctctaaggagaccgtatttccaagccaaatcactaacgagcatgagagtctaaagatggtgaagaaacttttcgcaaccagtataagttgcataacgtatctccggggtttatttcctgagtcctcatacggagaaaggcatctggatgatctgagcctcaagatcctccgtgaagacaaaaagtgcccgggctcgttgcacattattcgatggatacaggggtgcttcgacgctctggagaagcggtacttgcgcatggccgtgcttacactctacaccgatccgatgggttccgaaaaagtcacagagatgtaccaatttaaatttaaatacaccaaggagggtgccacaatggactttgactcacacagctcttcaacttcctttgaaagtggtacaaataacgaggatatcaagaaggctagcgtcttactgattcgaaagctgtacattctgatgcaagatctggagccactgccaaataatgtggtactcactatgaaactccactattataacgccgtcaccccccacgactatcagccactgggattcaaagaaggagtaaatagccactttcttttgttcgataaggaacctattaacgtccaggtgggattcgtgagcactggatttcacagcatgaaagtcaaagttatgactgaggcaacaaaagttatagatctggaaaacaatctgttccgtgagaacagtaccacggaaatcgcgcatcagggactggattgtgacgaggaagaggagtgtaacgaccacatccaacggatgaactttgtttgctctcaacagagctcggagtgtagccgtaagaaaaggaaggtgtctgaacctgtgaaagtgttcatccccaaccgtaagtag

SEQ ID NO: 243673 - DNA, 924 bp, Artificial Sequence
  derived and/or modified sequence
atggccaccgcccagctgagccactgcatcaccatccacaaggcctctaaggagacagtcttccctagtcaaatcacaaacgaacatgaaagcctgaaaatggtgaaaaaactttttgccacaagcatatcctgcatcacttatctcaggggactgttcccagaatcatcatacggggagcggcacctcgacgatctgtcacttaagatcttgcgggaagacaaaaaatgcccagggagcttacatataatcaggtggatccaaggctgttttgacgccctagaaaagaggtatctgagaatggccgtgttgaccctctacacagatcccatgggctccgagaaagtgaccgaaatgtatcagtttaagtttaaatacaccaaagaaggagcaacaatggatttcgactcccatagcagttctactagttttgagtcagggacgaacaatgaggatattaaaaaagccagcgtccttctcattcgaaaactttatatcttgatgcaggacttggaacccctccccaataacgtggtgctgactatgaagctccactattataatgctgtaactccacatgattatcagccactgggcttcaaggaaggggtgaactctcactttctgctgtttgataaagagcccatcaacgtccaggtgggattcgtaagtaccggcttccactcgatgaaggtgaaggttatgactgaggcaacaaaggttatcgacctggagaataacctctttagagagaacagtaccaccgagattgcccaccagggcctggactgtgatgaggaagaggagtgtaacgaccacatccagagaatgaacttcgtctgcagtcaacaaagttctgagtgtagtcggaagaagaggaaagtctcagagcctgtgaaagtgttcatccctaacagaaaatag

SEQ ID NO: 243674 - DNA, 924 bp, Artificial Sequence
  derived and/or modified sequence
atggcaacagcgcagctctctcactgcattacgatccacaaagcaagcaaggagacagtctttccaagccaaatcacaaacgaacatgagtccctgaaaatggtaaaaaagcttttcgctacatccatctcatgtataacttacctcaggggactctttcccgagtcttcttacggcgagaggcatctcgatgacctgtccctgaagatactgcgcgaggacaaaaagtgtcccggttcccttcacatcatccggtggatccagggatgcttcgacgccctcgaaaaacgctatctgcgcatggccgttctgaccctgtatacggatccaatgggaagtgagaaggtgaccgagatgtaccaattcaaatttaaatataccaaggagggcgctactatggatttcgattcacactccagtagtacttctttcgaaagtggaactaacaacgaagatataaaaaaagccagcgtcctgctgattaggaagctgtacattctcatgcaagacttggagcctctgcctaacaacgtcgtgttgacaatgaaactgcattactataatgctgtgaccccacacgactaccaaccattgggctttaaagagggagtcaattcccacttcctattatttgataaagaaccaataaacgttcaagttggctttgttagtactggctttcatagtatgaaagtcaaggtcatgactgaagcaactaaagttatcgatctcgagaacaacctcttccgggagaattctacaactgagattgcccaccaaggactcgattgcgacgaggaagaggagtgcaatgaccacattcagcgcatgaacttcgtctgcagtcagcagtcaagcgaatgttccaggaagaagcggaaagtcagtgagcctgtgaaagtgtttatacccaatcgcaaatag

SEQ ID NO: 243675 - DNA, 924 bp, Artificial Sequence
  derived and/or modified sequence
atggctacagcccagctgtcacattgcatcaccattcacaaagcctccaaagaaactgtttttccaagccaaattacaaatgaacacgaaagtctgaagatggtaaaaaaactctttgcgacatccatcagctgtattacctacttgaggggtttgttccccgagtcaagttacggcgagagacacctcgacgatctgtcattgaagatcctgcgcgaggataaaaaatgccccggatctcttcatataatccgctggattcaaggctgtttcgatgccctggaaaaacgctacttgagaatggcagttttaaccctgtataccgaccccatgggcagcgagaaggtcacagaaatgtaccagttcaagttcaaatacactaaggaaggcgcaactatggactttgactcccactcttcttcaacatcttttgagagcggcactaataatgaggacataaagaaagctagtgtgctactcatccgaaagctatacatcttaatgcaggacctcgagccgttgcctaacaacgtggtgttgactatgaaattacattattataatgctgtgacaccccacgattaccaaccactgggtttcaaggagggcgtcaacagccattttctgctcttcgacaaggagcctatcaatgtacaggttggctttgtaagcaccggattccactccatgaaggtcaaagtgatgactgaggcaactaaggtgattgatttggagaacaatctttttcgagagaattcaactacagaaatcgcccatcaagggctagattgtgacgaggaagaggaatgcaacgatcacatccagcggatgaactttgtctgctcccagcagtcgagcgagtgctctaggaaaaagcgcaaggtaagtgaaccagtgaaagtgttcatacctaatcgcaagtag

SEQ ID NO: 243676 - DNA, 924 bp, Artificial Sequence
  derived and/or modified sequence
atggccaccgcccagctgagccactgcatcaccatccacaaggccagcaaggagaccgtgttccccagccagatcaccaacgagcacgagagcctgaagatggtgaagaagctgttcgccaccagcatcagctgcatcacctacctgagaggcctgttccccgagagcagctacggcgagagacacctggacgacctgagcctgaagatcctgagagaggacaagaagtgccccggcagcctgcacatcatcagatggatccagggctgcttcgacgccctggagaagagatacctgagaatggccgtgctgaccctgtacaccgaccccatgggcagcgagaaggtgaccgagatgtaccagttcaagttcaagtacaccaaggagggcgccaccatggacttcgacagccacagcagcagcaccagcttcgagagcggcaccaacaacgaggacatcaagaaggccagcgtgctgctgatcagaaagctgtacatcctgatgcaggacctggagcccctgcccaacaacgtggtgctgaccatgaagctgcactactacaacgccgtgaccccccacgactaccagcccctgggcttcaaggagggcgtgaacagccacttcctgctgttcgacaaggagcccatcaacgtgcaggtgggcttcgtgagcaccggcttccacagcatgaaggtgaaggtgatgaccgaggccaccaaggtgatcgacctggagaacaacctgttcagagagaacagcaccaccgagatcgcccaccagggcctggactgcgacgaggaggaggagtgcaacgaccacatccagagaatgaacttcgtgtgcagccagcagagcagcgagtgcagcagaaagaagagaaaggtgagcgagcccgtgaaggtgttcatccccaacagaaagtag

SEQ ID NO: 243677 - DNA, 2187 bp, Artificial Sequence
  derived and/or modified sequence
gttgtataggtggcccaggctggcggcccctgaccgaaggtcgcgtcgggtcagtgtgcagcccgtggctgagaggcggctgctgaggggccgggcgggctaggggccggctagccgccgttcgcccctgctttgcatattcatgaagtctagcgaggccggtcgcccaggctagccgtggacgggtcatgaattattcatgaggaaacctctggtcccgcccagaaaggcctcgttgactattcatgagccgaggagcgggtttgggccggaaaaggccgttgacccccggtgggagggaagcgtcgacgagctgaggttggacttgttgaaataatcctgatacattcctacaatggccactgctcagctttctcactgcatcacaatacacaaggcttctaaggaaacagttttcccatcccaaatcactaatgagcatgagtcattgaaaatggtgaagaaactttttgctacttccatctcatgtataacatacctaaggggcctgtttccagagagctcttatggagaacgccatttggatgacctcagtttaaaaatcctccgagaagataaaaaatgtcccgggtcactgcatattatcagatggattcaaggttgttttgatgctttggaaaagagatacctacgtatggcagtactgacactttacacagatcccatgggatctgagaaggtgactgagatgtaccagttcaaattcaaatacacgaaagaaggagccactatggattttgacagtcatagcagcagtacaagctttgaaagtggaacaaacaatgaagatattaagaaagccagtgttctactgatccgtaaattgtatatactgatgcaggaccttgagccacttcctaataatgttgtacttactatgaaactccactactataatgcagtgaccccacatgattaccaacccctcggttttaaagaaggggtaaattcacacttcctgctgtttgacaaggagcctatcaacgtgcaagtgggatttgtctccactggctttcatagcatgaaagtaaaagtcatgacagaggctacaaaagtgattgatttggagaacaatctgtttcgggagaacagcactactgagatcgcccatcagggtctagactgtgatgaggaagaagaatgcaatgaccatattcaaagaatgaattttgtgtgcagtcagcaaagttctgagtgctccaggaagaagaggaaggtcagtgaaccagtgaaggtcttcatccctaacagaaaatgaaagctaaatattccttctacatttattttaaaataagtttattttgtaaaaacatgcataaactgtcttagcaggaaagtacattcctgttaccaaaacctttttctaaattttttgctcaattttttttgtcagttgctaagtgctaaattactggccaggtaggacgcgagtccactttgccataaggaaagcgggtcaatagggctgcctctggatagcattacttcaaagctgggttagagatgaggcaccttttatattatatttgtaaaagaaccacagcagctattttggaaagaagctgttgttctcaaaggaaagaaggatttttttgcataattaaactcttcagctatttagactactgtgaaatgttttgacttgttgtaacctgtatactggaatccctctctagctgtattaaaaattcccacagagttgcataggatgtgtggaggtgcttatccaggtgtgatttatgtgttaacctcagtcacgaggttgatcagctaattgtgggaccaaaatgtgccctgcctcaactctggccccaggccctgttctgttatccaatccgaaacacggaacatgctgcaattcaggagtctggctctcttcttaagacctatattaaatatttcccaagaagcacttcagtttatcagtctgtaacctgcaaatgatgctattagttccctccttattctggaagaatttggatagacttaattgatgattagtatgagatgaacaatagatgacttaaagtgttatttctattatttatataacatgagatttagtaacttataaaatgaggtttagtaatttaatttaaatggataggaccaataagttaaatattaagtgtgtgacttatggttaaataaaatgaaaatacaaga

SEQ ID NO: 243678 - DNA, 2115 bp, Artificial Sequence
  derived and/or modified sequence
actttagtgaggatttgccaattaatccctatggactttagttccctaaacagagggagagagtcttgaacctcaggattagccaatcgccaaaatgtgtccgagtacgcagggcactggacaggctgtgcagtacatcgtgtactcagctggtagaaatgaggggtggttctggcccctaaaggggtttttaatctcagcaggatcataatctaatttctcctccattggaccatcaatctgttgaggttggacttgttgaaataatcctgatacattcctacaatggccactgctcagctttctcactgcatcacaatacacaaggcttctaaggaaacagttttcccatcccaaatcactaatgagcatgagtcattgaaaatggtgaagaaactttttgctacttccatctcatgtataacatacctaaggggcctgtttccagagagctcttatggagaacgccatttggatgacctcagtttaaaaatcctccgagaagataaaaaatgtcccgggtcactgcatattatcagatggattcaaggttgttttgatgctttggaaaagagatacctacgtatggcagtactgacactttacacagatcccatgggatctgagaaggtgactgagatgtaccagttcaaattcaaatacacgaaagaaggagccactatggattttgacagtcatagcagcagtacaagctttgaaagtggaacaaacaatgaagatattaagaaagccagtgttctactgatccgtaaattgtatatactgatgcaggaccttgagccacttcctaataatgttgtacttactatgaaactccactactataatgcagtgaccccacatgattaccaacccctcggttttaaagaaggggtaaattcacacttcctgctgtttgacaaggagcctatcaacgtgcaagtgggatttgtctccactggctttcatagcatgaaagtaaaagtcatgacagaggctacaaaagtgattgatttggagaacaatctgtttcgggagaacagcactactgagatcgcccatcagggtctagactgtgatgaggaagaagaatgcaatgaccatattcaaagaatgaattttgtgtgcagtcagcaaagttctgagtgctccaggaagaagaggaaggtcagtgaaccagtgaaggtcttcatccctaacagaaaatgaaagctaaatattccttctacatttattttaaaataagtttattttgtaaaaacatgcataaactgtcttagcaggaaagtacattcctgttaccaaaacctttttctaaattttttgctcaattttttttgtcagttgctaagtgctaaattactggccaggtaggacgcgagtccactttgccataaggaaagcgggtcaatagggctgcctctggatagcattacttcaaagctgggttagagatgaggcaccttttatattatatttgtaaaagaaccacagcagctattttggaaagaagctgttgttctcaaaggaaagaaggatttttttgcataattaaactcttcagctatttagactactgtgaaatgttttgacttgttgtaacctgtatactggaatccctctctagctgtattaaaaattcccacagagttgcataggatgtgtggaggtgcttatccaggtgtgatttatgtgttaacctcagtcacgaggttgatcagctaattgtgggaccaaaatgtgccctgcctcaactctggccccaggccctgttctgttatccaatccgaaacacggaacatgctgcaattcaggagtctggctctcttcttaagacctatattaaatatttcccaagaagcacttcagtttatcagtctgtaacctgcaaatgatgctattagttccctccttattctggaagaatttggatagacttaattgatgattagtatgagatgaacaatagatgacttaaagtgttatttctattatttatataacatgagatttagtaacttataaaatgaggtttagtaatttaatttaaatggataggaccaataagttaaatattaagtgtgtgacttatggttaaataaaatgaaaatacaa

SEQ ID NO: 243679 - protein, 1274 aa, Artificial Sequence
  derived and/or modified sequence
MAVRQAATAGTPGPRREEEAALLFERAHYRHDPRWLLPVTPRLCLACALELLPDPGVSLVRKKHMLSCFQDALVRHTSLVTQLVSQDQRVCIHFISVLFGLLCSMEDGSVTDLCIEVLIQITTQLKLEQTIRCLLDECHKELCNMPSMRGSLATLTLLGKLVDAIPALADELVMEHGNLMEHLLRGLVYPSEGIQASVCYLYGKLYSSPVAAEMLSGHFREKLFPLFLSILDGAQTKELQINCLGLLRQLLKYDLFVSMIMNQDGLGESAKNIEGSSGNTSLPLVLKKLLLSRDETLQVASAHCITAVLVHSPAKHASAFIHADIPEFLFEHLSSSSEVLVWSSCNCLTLLVEEPLFFSKCHTVYGIEAVVRSLQGSLKMNNIELHKQGLLLFAEILTRQPEEIKLFTSSAMCRDAGRALQEAVSSPVLEVAAEALKATSAFLRKDHQSTPPVQYGELQALLEAMLNRCAEFSQTLLSRRPLGHASSRDSEKAILQRGKFLLSTLEGFRSACRLAIEFQSEPSAQENPFTAPSAKKEDTLEAFSEFLLSACDSLCIPMVMRHLEQTTHPALMEVFLSILHNLFVIVPHMKEKFSKKLASSSFIRLTLELKARFCSGLSHSALNQVCSNFLYYMCLNLLSAPEKTGPPSKEELSAVSELLQHGLPQISSRSPESLAFLSDRQYMEGAARQRQYCILLLFYLAYIHEDRFVSEAELFEAVQSFLLSLQDQGERPPLVVFKASIYLLAICQDKDNTLRETMVSAIRKFLEGIPDLQLVYTHHPLLLRFFLLYPELMSRYGHRVLELWFFWEESSYEELDDVTSAGQPALPASLVVLFQLLRSIPSILLILLDLIYSSPVDTAHKVLISLRTFLRRNEDIQVGGLIRGHFLLILQRLLVEHGASPSGASGNLPLLLSLLSLMQLRNVSEQELDSVAMKLLHQVSKLCGKCSPTDVDILQPSFNFLYWSLHQTTPSSQKRAAAVLLSSTGLMELLEKMLALTLAKADSPRTALLCSAWLLTASFSAQQHKGSLQVHQTLSVEMDQVLKALSFPKKKAALLSAAILCFLRTALRQSFSSALVALVPSGAQPLPATKDTVLAPLRMSQVRSLVIGLQNLLVQKDPLLSQACVGCLEALLDYLDARSPDIALHVASQPWNRFLLFTLLDAGENSFLRPEILRLMTLFMRYRSSSVLSHEEVGDVLQGVALADLSTLSNTTLQALHGFFQQLQSMGHLADHSMAQTLQASLEGLPPSTSSGQPPLQDMLCLGGVAVSLSHIRN

SEQ ID NO: 243680 - protein, 384 aa, Artificial Sequence
  derived and/or modified sequence
MGHPHQESSLFFTASGNLPLLLSLLSLMQLRNVSEQELDSVAMKLLHQVSKLCGKCSPTDVDILQPSFNFLYWSLHQTTPSSQKRAAAVLLSSTGLMELLEKMLALTLAKADSPRTALLCSAWLLTASFSAQQHKGSLQVHQTLSVEMDQVLKALSFPKKKAALLSAAILCFLRTALRQSFSSALVALVPSGAQPLPATKDTVLAPLRMSQVRSLVIGLQNLLVQKDPLLSQACVGCLEALLDYLDARSPDIALHVASQPWNRFLLFTLLDAGENSFLRPEILRLMTLFMRYRSSSVLSHEEVGDVLQGVALADLSTLSNTTLQALHGFFQQLQSMGHLADHSMAQTLQASLEGLPPSTSSGQPPLQDMLCLGGVAVSLSHIRN

SEQ ID NO: 243681 - DNA, 3825 bp, Artificial Sequence
  derived and/or modified sequence
atggccgtgagacaggccgccaccgccggcacccccggccccagaagagaggaggaggccgccctgctgttcgagagagcccactacagacacgaccccagatggctgctgcccgtgacccccagactgtgcctggcctgcgccctggagctgctgcccgaccccggcgtgagcctggtgagaaagaagcacatgctgagctgcttccaggacgccctggtgagacacaccagcctggtgacccagctggtgagccaggaccagagagtgtgcatccacttcatcagcgtgctgttcggcctgctgtgcagcatggaggacggcagcgtgaccgacctgtgcatcgaggtgctgatccagatcaccacccagctgaagctggagcagaccatcagatgcctgctggacgagtgccacaaggagctgtgcaacatgcccagcatgagaggcagcctggccaccctgaccctgctgggcaagctggtggacgccatccccgccctggccgacgagctggtgatggagcacggcaacctgatggagcacctgctgagaggcctggtgtaccccagcgagggcatccaggccagcgtgtgctacctgtacggcaagctgtacagcagccccgtggccgccgagatgctgagcggccacttcagagagaagctgttccccctgttcctgagcatcctggacggcgcccagaccaaggagctgcagatcaactgcctgggcctgctgagacagctgctgaagtacgacctgttcgtgagcatgatcatgaaccaggacggcctgggcgagagcgccaagaacatcgagggcagcagcggcaacaccagcctgcccctggtgctgaagaagctgctgctgagcagagacgagaccctgcaggtggccagcgcccactgcatcaccgccgtgctggtgcacagccccgccaagcacgccagcgccttcatccacgccgacatccccgagttcctgttcgagcacctgagcagcagcagcgaggtgctggtgtggagcagctgcaactgcctgaccctgctggtggaggagcccctgttcttcagcaagtgccacaccgtgtacggcatcgaggccgtggtgagaagcctgcagggcagcctgaagatgaacaacatcgagctgcacaagcagggcctgctgctgttcgccgagatcctgaccagacagcccgaggagatcaagctgttcaccagcagcgccatgtgcagagacgccggcagagccctgcaggaggccgtgagcagccccgtgctggaggtggccgccgaggccctgaaggccaccagcgccttcctgagaaaggaccaccagagcaccccccccgtgcagtacggcgagctgcaggccctgctggaggccatgctgaacagatgcgccgagttcagccagaccctgctgagcagaagacccctgggccacgccagcagcagagacagcgagaaggccatcctgcagagaggcaagttcctgctgagcaccctggagggcttcagaagcgcctgcagactggccatcgagttccagagcgagcccagcgcccaggagaaccccttcaccgcccccagcgccaagaaggaggacaccctggaggccttcagcgagttcctgctgagcgcctgcgacagcctgtgcatccccatggtgatgagacacctggagcagaccacccaccccgccctgatggaggtgttcctgagcatcctgcacaacctgttcgtgatcgtgccccacatgaaggagaagttcagcaagaagctggccagcagcagcttcatcagactgaccctggagctgaaggccagattctgcagcggcctgagccacagcgccctgaaccaggtgtgcagcaacttcctgtactacatgtgcctgaacctgctgagcgcccccgagaagaccggcccccccagcaaggaggagctgagcgccgtgagcgagctgctgcagcacggcctgccccagatcagcagcagaagccccgagagcctggccttcctgagcgacagacagtacatggagggcgccgccagacagagacagtactgcatcctgctgctgttctacctggcctacatccacgaggacagattcgtgagcgaggccgagctgttcgaggccgtgcagagcttcctgctgagcctgcaggaccagggcgagagaccccccctggtggtgttcaaggccagcatctacctgctggccatctgccaggacaaggacaacaccctgagagagaccatggtgagcgccatcagaaagttcctggagggcatccccgacctgcagctggtgtacacccaccaccccctgctgctgagattcttcctgctgtaccccgagctgatgagcagatacggccacagagtgctggagctgtggttcttctgggaggagagcagctacgaggagctggacgacgtgaccagcgccggccagcccgccctgcccgccagcctggtggtgctgttccagctgctgagaagcatccccagcatcctgctgatcctgctggacctgatctacagcagccccgtggacaccgcccacaaggtgctgatcagcctgagaaccttcctgagaagaaacgaggacatccaggtgggcggcctgatcagaggccacttcctgctgatcctgcagagactgctggtggagcacggcgccagccccagcggcgccagcggcaacctgcccctgctgctgagcctgctgagcctgatgcagctgagaaacgtgagcgagcaggagctggacagcgtggccatgaagctgctgcaccaggtgagcaagctgtgcggcaagtgcagccccaccgacgtggacatcctgcagcccagcttcaacttcctgtactggagcctgcaccagaccacccccagcagccagaagagagccgccgccgtgctgctgagcagcaccggcctgatggagctgctggagaagatgctggccctgaccctggccaaggccgacagccccagaaccgccctgctgtgcagcgcctggctgctgaccgccagcttcagcgcccagcagcacaagggcagcctgcaggtgcaccagaccctgagcgtggagatggaccaggtgctgaaggccctgagcttccccaagaagaaggccgccctgctgagcgccgccatcctgtgcttcctgagaaccgccctgagacagagcttcagcagcgccctggtggccctggtgcccagcggcgcccagcccctgcccgccaccaaggacaccgtgctggcccccctgagaatgagccaggtgagaagcctggtgatcggcctgcagaacctgctggtgcagaaggaccccctgctgagccaggcctgcgtgggctgcctggaggccctgctggactacctggacgccagaagccccgacatcgccctgcacgtggccagccagccctggaacagattcctgctgttcaccctgctggacgccggcgagaacagcttcctgagacccgagatcctgagactgatgaccctgttcatgagatacagaagcagcagcgtgctgagccacgaggaggtgggcgacgtgctgcagggcgtggccctggccgacctgagcaccctgagcaacaccaccctgcaggccctgcacggcttcttccagcagctgcagagcatgggccacctggccgaccacagcatggcccagaccctgcaggccagcctggagggcctgccccccagcaccagcagcggccagccccccctgcaggacatgctgtgcctgggcggcgtggccgtgagcctgagccacatcagaaactag

SEQ ID NO: 243682 - DNA, 3825 bp, Artificial Sequence
  derived and/or modified sequence
atggcagtgaggcaggcagctacagccggcacgcctgggccccggagggaagaggaggctgccttgctcttcgagcgggcacactatcgacacgacccaaggtggctcctgcctgttacaccacgactgtgccttgcttgcgctttggaacttttacctgaccctggcgtgtcactcgtgcgtaaaaaacacatgctgtcctgttttcaggacgctcttgttcgccacacatccttagttacccaactggtgtcccaagaccagagggtgtgtattcactttatatcggtgttgtttgggttgctttgcagcatggaagatgggtcagtcaccgatttatgcatagaggtattgattcaaattaccacacagctcaagctcgaacagacgatccgctgtctgttagacgagtgccataaggagctgtgcaatatgcctagcatgaggggcagcctcgccacacttacgctgctgggcaagttggtcgacgctatccccgccttagcagacgaactggttatggagcatggtaatctaatggaacacctactgcgtggtttggtctatcccagcgagggaatccaggcaagcgtgtgttatctctacggtaaactgtacagcagccctgtggccgccgagatgctcagcgggcattttcgggaaaagctgtttcccttatttctatcaattttagacggagcacagactaaagagttgcagataaattgcttaggcttgctaagacagctcttaaagtacgatctgttcgtttctatgattatgaaccaggacggactcggggaatcggccaagaatatagagggctcctcagggaacaccagtttaccattggtgctgaaaaaactgctgctcagccgggacgaaacactgcaagtggcctccgcccattgtatcactgccgtcttggttcattcacctgcaaagcacgctagcgccttcattcacgccgacatccctgaattcctgttcgaacatctcagttctagttctgaggtattggtctggtcaagctgcaactgcctcacactgttggtggaagaacccctgttcttttcaaaatgtcacacagtgtacgggattgaggctgtggttcgctccctacaggggagtctgaagatgaacaacatagagctccacaagcagggattactcctgttcgccgagattcttactcgtcagcctgaggagatcaagctgtttacctcctctgctatgtgtagggacgcaggtagggcgctgcaggaagctgtaagcagcccagtacttgaagtcgccgcggaagctcttaaagccacaagtgcattcctacgcaaggatcaccagagcacaccacctgtccagtatggagaactgcaggccctgctcgaggccatgctcaatagatgcgccgagttctcacagaccttactgtcccgtcgcccattaggtcatgccagctcaagagattccgagaaagccatcctccagagaggcaaattcctgctgtcaacactcgaagggtttagaagcgcgtgccggctggccatcgaatttcagtcggagcctagcgcgcaggagaacccgttcactgccccaagcgctaagaaggaagataccttggaagcgttctcagagtttctcctgtccgcttgcgattcgctctgtatacctatggtgatgcgccacctagaacagacaacacatcccgccttaatggaggtatttttgtcaattctgcacaacttgttcgtgatcgttccccatatgaaggagaaattcagcaaaaagctggcctcatcttctttcatccgccttactctcgaactgaaggctcggttctgttctggtctgagccacagtgctctaaaccaagtgtgtagtaactttctgtactacatgtgcctaaatcttttatccgccccagaaaagaccggccccccctccaaggaagagctgtctgcggtgtctgaattactccagcacggcttaccccagattagtagcagatcccctgaatccttggcatttctgtccgacagacagtacatggagggagctgctaggcagagacaatattgtatcctgttacttttttatctggcctacatccacgaagatcggttcgtgagcgaggccgagctattcgaggctgtccagtcctttctgctctccctgcaggatcagggcgaacgcccgccgctcgtggtgtttaaggctagcatatacctgctggcaatatgtcaggataaagacaacaccctgagggagactatggtctctgctattcggaagttcctcgaaggcatcccggacctgcagctagtctatacccaccaccctctgctcttgcggttcttcctcctttatcccgaactcatgtcgcggtacggtcatagggttctagagctttggttcttctgggaggaatcgtcctacgaggagctagatgatgtgacttccgcaggtcaaccggcgctgccagcaagcctggttgtgctatttcagctgctccgctccattccatcaatcctactaatacttctggacttaatctattcatcccccgtagatactgcacataaggtcttgatctcactacgcaccttcctacgcaggaacgaggatatccaggtggggggactgatccgtggtcacttcttgttaatactgcaacgactcttggtggagcatggagcctcgccttcgggagcttctggaaacctgccattgttgttgtcgctcctctccctgatgcagctgaggaatgtgtccgaacaggaactcgacagtgtggccatgaagctgcttcaccaggtttccaagttgtgtggtaaatgtagtccaaccgacgtcgatattctgcagcctagtttcaactttctttactggtctcttcatcaaacaaccccttctagtcagaaacgggccgcagccgtgctcctaagttctacaggactgatggagctcctggagaagatgcttgctcttactttggccaaggcagatagcccccgcactgcactgctttgtagtgcctggttactcactgcatccttcagtgcacagcagcataaaggatccttgcaggtgcatcagaccctgagtgttgaaatggatcaagtgctgaaagcattgtcgttcccgaagaaaaaagcagccctgttgtccgccgctatcctttgcttcttaaggacggcgcttaggcagtctttcagttccgccctcgtcgccttagttccttccggagctcagccacttcctgctactaaagatacagtgctggcccccctgaggatgtctcaggttaggtcactcgttattgggctgcaaaatctgctagtccagaaagatccgctgttgtcccaggcctgcgtgggttgcctcgaggcattactcgactacctggacgcacggtctccggatatcgccctgcacgtcgccagccaaccttggaaccggttcttattattcacgctgcttgatgccggggaaaattcgttcctgaggcccgagatcttacggctgatgactttgttcatgaggtacaggtccagtagcgtattaagtcacgaagaggtcggcgatgtgctccaaggcgtagctttggctgatctgagcactctgtccaatacaaccttgcaggctctacatgggttttttcaacagctgcagtcgatggggcatctcgctgaccactccatggcacagacactgcaagccagtctcgaagggctgcctccctccacttccagcggccaaccacccctccaagacatgttatgcctgggcggagtggccgtatccctgagtcacatccgaaactag

SEQ ID NO: 243683 - DNA, 3825 bp, Artificial Sequence
  derived and/or modified sequence
atggctgtgcggcaggccgccacagctggcaccccaggcccccggcgggaggaggaggccgccctgctgtttgagcgggcccactacagacatgacccccgctggctgctgcctgtgaccccccggctgtgcctggcctgtgccctggagctgctgcctgaccccggggtgtccctggtgaggaagaagcacatgctgagctgcttccaggatgccctggtgcgccacaccagcctggtgacccagctggtgtcccaggaccagagggtgtgcatccacttcatctctgtgctgtttggcctgctgtgcagcatggaggatggctctgtgacagacctgtgcatcgaggtgctgatccagatcaccacccagctgaagctggagcagaccatccgctgcctgctggatgagtgccacaaggagctgtgcaacatgcccagcatgaggggcagcctggccaccctgaccctgctgggcaagctggtggatgccatcccagccctggctgatgagctggtgatggagcacggcaacctgatggagcacctgctgcggggcctggtgtaccccagcgagggcatccaggcctctgtgtgctacctgtatggcaagctgtacagcagccctgtggccgctgagatgctgagcggccacttccgggagaagctgttccccctcttcctgagcatcctggatggagcccagaccaaggagctgcagatcaactgcctgggcctgctgcggcagctgctgaagtatgacctgtttgtgtccatgatcatgaaccaggacggcctgggggagagcgccaagaacatcgagggcagcagcggcaacaccagcctgcccctggtgctgaagaagctgctgctgagcagagatgagaccctgcaggtggccagcgcccactgcatcacagctgtgctggtgcacagccctgccaagcacgccagcgccttcatccatgctgacatccctgagttcctgtttgagcacctgagcagcagcagcgaggtgctggtgtggagcagctgcaactgcctgaccctgctggtggaggagcccctcttcttcagcaagtgccacacagtgtatggaattgaagctgtggtgcgcagcctgcagggcagcctgaagatgaacaacatcgagctgcacaagcagggcctgctgctgtttgctgagatcctgacccggcagcctgaggagatcaagctgttcaccagcagcgccatgtgcagagatgctggccgggccctgcaggaggccgtgagcagccctgtgctggaggtggccgctgaggccctgaaggccaccagcgccttcctgaggaaggaccaccagagcaccccacctgtgcagtatggagagctgcaggccctgctggaggccatgctgaacagatgtgccgagttcagccagaccctgctgagcagaagacccctgggccacgccagcagccgggacagcgagaaggccatcctgcagaggggcaagttcctgctgagcaccctggagggcttccgcagcgcctgccgcctggccatcgagttccagagcgagcccagcgcccaggagaaccccttcaccgcccccagcgccaagaaggaggacaccctggaggccttcagcgagttcctgctgagcgcctgtgacagcctgtgcatccccatggtgatgaggcacctggagcagaccacccacccagccctgatggaggtgttcctgagcatcctgcacaacctgtttgtgattgtgccccacatgaaggagaagttcagcaagaagctggccagcagcagcttcatccggctgaccctggagctgaaggcccgcttctgcagcggcctgagccacagcgccctgaaccaggtgtgcagcaacttcctgtactacatgtgcctgaacctgctgagcgcccctgagaagacaggcccccccagcaaggaggagctgtctgctgtgtctgagctgctgcagcacggcctgccccagatcagcagccgcagccctgagagcctggccttcctgagtgaccggcagtacatggagggcgccgcccggcagaggcagtactgcatcctgctgctcttctacctggcctacatccatgaagatagatttgtgtctgaggccgagctgtttgaagctgtgcagagcttcctgctgagcctgcaggaccagggcgagcggccccccctggtggtgttcaaggccagcatctacctgctggccatctgccaggacaaggacaacaccctgcgggagaccatggtgtctgccatcaggaagttcctggagggcatcccagacctgcagctggtgtacacccaccaccccctgctgctgcgcttcttcctgctgtacccagagctgatgagccgctatggccaccgggtgctggagctgtggttcttctgggaggagagcagctatgaggagctggatgatgtgaccagcgctggccagcctgccctgcctgccagcctggtggtgctcttccagctgctgcggagcatccccagcatcctgctgatcctgctggacctgatctacagcagccctgtggacacagcccacaaggtgctgatcagcctgcggaccttcctgcggagaaatgaagacatccaggtgggcggcctcatccggggccacttcctgctgatcctgcagaggctgctggtggagcacggggccagccccagcggggccagcggcaacctgcccctgctgctgagcctgctgagcctgatgcagctgagaaatgtgtctgagcaggagctggacagcgtggccatgaagctgctgcaccaggtgtccaagctgtgtgggaagtgcagccccacagatgtggacatcctgcagcccagcttcaacttcctgtactggagcctgcaccagaccacccccagcagccagaagagagctgctgctgtgctgctgagcagcacaggcctgatggagctgctggagaagatgctggccctgaccctggccaaggctgacagccccaggacagccctgctgtgcagcgcctggctgctgacagccagcttcagcgcccagcagcacaagggcagcctgcaggtgcaccagaccctgtctgtggagatggaccaggtgctgaaggccctgtccttccccaagaagaaggccgccctgctgtctgctgccatcctgtgcttcctgaggacagccctgcggcagagcttcagcagcgccctggtggccctggtgcccagcggggcccagcccctgcctgccaccaaggacacagtgctggcccccctgaggatgagccaggtgcgcagcctggtgattggcctgcagaacctgctggtgcagaaggaccccctgctgagccaggcctgtgtgggctgcctggaggccctgctggactacctggatgcccggagcccagacatcgccctgcacgtggccagccagccctggaaccgcttcctgctcttcaccctgctggatgctggggagaacagcttcctgcggcctgagatcctgcggctgatgaccctcttcatgagataccgcagcagctctgtgctgagccatgaggaggtgggagatgtgctgcagggcgtggccctggccgacctgagcaccctgagcaacaccaccctgcaggccctgcacggcttcttccagcagctgcagagcatgggccacctggccgaccacagcatggcccagaccctgcaggccagcctggagggcctgccccccagcaccagcagcggccagccccccctgcaggacatgctgtgcctgggcggcgtggccgtgtccctgagccacatcagaaattag

SEQ ID NO: 243684 - DNA, 3825 bp, Artificial Sequence
  derived and/or modified sequence
atggccgtgcggcaggccgccaccgccggcacccccggcccccggagggaggaagaggctgcgctgctgtttgagagagctcattaccgacacgacccacgatggttgctaccagtgactccacggttatgcttagcttgcgccctggaacttctacccgatcctggggttagcctggtgaggaaaaagcacatgctttcgtgctttcaggacgccctcgtcaggcatactagcttggtcacacaacttgttagtcaggaccagcgagtgtgcatccatttcatctcagttctgttcggtctgctctgttcaatggaagatgggtctgtcaccgacctctgcattgaagttcttattcaaatcacaacccagctgaagctggagcagactatcagatgtctccttgacgaatgtcacaaggagctgtgcaatatgcctagtatgagaggcagcttagcgactctcaccctgcttgggaaacttgtggatgcaattcctgccttagcggacgaattggttatggaacacggcaacttgatggaacacctgctgcgcggcctggtgtatccttcagaaggtatccaagcatccgtgtgttacctgtacggtaaattatattccagcccagtcgccgcggagatgctgtcaggacatttccgcgaaaagttgttccctctctttctttccatcctggatggtgcccaaacaaaagagctgcagattaactgccttggcctcctaaggcagctactgaagtacgacttgtttgtgtcaatgatcatgaaccaagatggtttgggggagagcgccaaaaacattgaagggtcgagcggtaacaccagcctgcctcttgtcttgaagaaactgcttctttcacgagacgagaccctgcaggtagcctctgcgcattgtatcaccgcagtgctggtgcactcccctgcaaaacacgccagtgcctttattcacgcagacatccctgagttcctttttgaacatctgtcaagctcttccgaggtcctggtttggagtagctgtaattgcttaactctgttagtagaggagcctctcttctttagcaagtgtcatactgtgtacggaatcgaagccgtggtgcggtccctccaaggctccttaaagatgaacaacatagaactccacaagcaagggctcctgttgtttgctgaaatcctgactcgccaacccgaggaaatcaaattatttacttcctcagctatgtgcagagatgccggccgagccttgcaggaggctgtgagttcccccgtgctggaggtggctgctgaggccctgaaagccacaagtgccttcctgcgcaaagaccaccagtccacccccccggtgcaatatggggaactgcaggccctcttggaggccatgcttaatcgttgtgccgagttctcgcaaaccctgctaagccggcggcctcttggtcatgcctcgtcgagagattctgaaaaggccatcctgcagaggggcaaattcctgctgagtaccctcgaagggtttcggagcgcatgtagactggctatagagtttcagtccgaaccctctgcccaagaaaacccgtttacagcgccatccgccaaaaaagaggacaccctcgaggctttctcagaatttttgttgtcggcctgcgactctctctgtatccccatggtcatgaggcatctcgagcagactactcatccagctctgatggaagtgttcctgagcatcctccataatctgttcgtgattgtgcctcacatgaaagaaaaattcagcaagaaactcgcttcaagttcgttcattcgattaaccctcgaattaaaagcccggttttgttcgggattatcccacagcgcgctgaaccaggtatgttctaattttctttattacatgtgcctgaatcttctgtccgcgcctgagaagactggaccaccctccaaagaagaactgagtgctgtttctgaactcttacagcatgggcttccacagatcagctcaaggagcccagagagcttagctttcctaagtgacagacagtatatggagggggctgcacgccaaaggcagtattgtatcctcctccttttttacctcgcgtatattcacgaagacaggttcgtgagcgaagcagagctatttgaggctgttcagtctttcctgctgtctctacaggatcaaggggagagaccccccctggtggtcttcaaggcatctatctacctgttggccatctgccaagacaaggacaataccttacgcgaaaccatggtgtcagccattaggaaattcctggaagggattccagacctccagctcgtttatacccatcaccccctgcttctaaggtttttcctgttatacccggagctgatgagtcgctacggtcaccgggtactggaactttggttcttctgggaagaaagctcttacgaggagttagatgatgtaacctctgcagggcaacctgcccttcctgccagtttggttgttttgttccaactgcttagaagcatacctagcatcctcttaattctcttggatctaatatactcaagccccgttgacaccgctcacaaggttcttatcagtttgcgaactttcttgcgccgtaatgaggacatccaggtcggcggcctgatcaggggacacttcctcctgattctgcagcggctccttgtggagcacggtgcctccccctcaggagcaagcggcaacctccccttgctgctgagcctccttagccttatgcagctaaggaacgtttccgagcaggagctggatagcgtggccatgaagttgctacatcaggtaagcaagctgtgtggaaagtgcagtcccacagatgtggatattctgcagcccagctttaatttcctgtattggagcctgcatcagactacaccctcctctcaaaaaagagcggccgccgtgcttctttctagtacgggactcatggagttgctagagaagatgctggcactgacacttgccaaagcagattcaccgcggactgcccttctgtgctcagcatggctgctgaccgccagcttctccgcccaacagcacaagggaagtctgcaagttcaccagaccctttccgtggaaatggaccaggtgctgaaggccttaagctttcctaagaagaaagccgctctcctgtctgctgccatcttgtgtttcctccggaccgccttgaggcagtcattttctagcgccctcgtcgccctggttcctagtggcgcacagccactgccggccacaaaagacactgtcttagctccactaaggatgtcacaagttcgaagcttggtgatagggcttcagaatttgctggttcagaaggaccccctcctgtcgcaagcctgcgtaggttgcctggaggcacttttggattacttggacgcccgtagcccagacattgctctacatgtggcatcccagccttggaatcgctttctgttatttaccctgctagatgctggagagaactcctttttaaggcccgaaattctccggcttatgacactgttcatgagatacagaagcagctcggtattgtctcacgaggaagtgggcgacgtactgcagggggtggcacttgccgatctctctacactgagtaatactacattgcaggccctgcacggcttctttcaacagctgcagtcaatgggccatctggctgatcactcgatggcccaaaccttgcaggcgtcactggaaggactcccaccatcgacctcctctgggcagcctcccctacaggatatgttatgtctgggaggggtggctgtcagcttaagccatattcgcaactag

SEQ ID NO: 243685 - DNA, 4020 bp, Artificial Sequence
  derived and/or modified sequence
gcgggaaagagtgccgcctcagctgagggcaagcgaggagatggctgtgaggcaggcggcgacggcgggcactcccgggcccaggagagaggaagaggcggcgcttctattcgagagggcccattaccggcacgacccgcgctggctgctgcccgtgaccccccgcctgtgcctggcctgcgcgctggagctgctgccggaccccggcgtgtcgttagtgcgcaagaagcacatgttgtcctgcttccaagatgcccttgtgaggcatacctccctggtcacgcaactggtgtctcaggatcagagagtctgcatccacttcataagtgtgctttttggactattatgcagcatggaagatgggagtgtgacagacctctgtattgaagtccttattcagatcacaacgcagctgaagctggagcagactatccgttgcctgctggatgagtgccacaaagagctgtgtaacatgccctccatgcgaggcagcctggccaccctgacccttcttggcaagttggtggatgccatccctgctctggcagacgagcttgtaatggagcatggcaacctgatggagcatctgttgagaggcttagtataccccagtgagggcatacaagcttctgtctgttacctttatgggaagctatactcctcaccagtggcagctgagatgctttcaggacacttccgtgagaagctttttcccctcttcctttccatcctggatggtgcccagacaaaggagctgcagattaactgcttgggtttgctgaggcagctgttgaagtatgatctctttgtgtccatgatcatgaaccaggatggactgggagaaagtgctaagaatatcgaagggtcatcaggaaatacctcactgcctttggtgctcaaaaagcttctcctctctagagatgaaaccctgcaggtggccagtgctcactgtataactgcggtgcttgtccactccccagcaaagcatgcgtcagccttcatccacgctgacatcccagagttcctctttgagcatctttcttcttccagtgaagtgctcgtctggtccagctgtaactgcttgacactcctggtagaagagccactctttttttccaagtgccacacggtgtatgggatcgaggcagtggtgaggagcctgcagggaagcctgaagatgaacaacatagagctgcacaagcagggcctgctgcttttcgctgaaatcctgacccggcagccagaggagatcaagctgttcacaagctcagccatgtgcagagatgctggccgtgccctccaagaagcagttagcagccctgtgctggaggtggctgctgaggccttgaaggccacttctgcttttctgaggaaggaccatcagagcactccacctgtgcagtatggggaactgcaggctttgctagaagccatgctaaaccgatgtgcggagttttcccagaccttgctgagcaggaggcccctgggccatgcctccagtagagattcagagaaggccattcttcaaaggggaaagttcctcctcagcactctggagggatttagaagtgcctgcaggttggctatagaattccagagtgagccttcagcccaggagaatccattcacagctcccagcgccaagaaggaagacaccttggaggccttctcagaatttcttctcagtgcctgtgactcgctgtgtatccccatggtgatgagacacttggagcagaccacccacccagctttgatggaagttttcctctcaattctacataacctctttgtcatcgttccccacatgaaggagaagttttccaagaagcttgcttcctcatccttcatacgactgaccctggagctgaaggccaggttttgcagtggtctgagtcactcagccctaaaccaggtgtgttccaatttcctctactatatgtgcctcaaccttctctcagctccagagaagacaggaccaccttccaaagaagaactctctgcagtgtctgagctcctgcagcatgggctgccccagataagcagcaggagccctgaaagccttgccttcctgtctgatcgccagtacatggagggagctgctcgccagagacagtactgcatcctgctcctcttctacttggcctacatccatgaagacaggtttgtctcagaggcagagttatttgaggctgtgcaaagcttcctcctgtcgctgcaggaccagggcgagcgccccccactggtggtcttcaaagcctccatctatctgcttgcaatctgccaggacaaagacaatacactacgtgagactatggtcagtgcaatcagaaaattcctagaaggcatcccagacctgcagctagtctatactcaccatccgctcctgctcaggttctttctgttgtatccagagctcatgagtaggtatgggcaccgtgtcctggaactttggttcttctgggaagagagcagctatgaggaactggatgatgtcacctctgctgggcagcccgcccttcctgccagcttagtagtcctgttccagttgctcagaagcatccccagcatcctgctcatcttgctggacctcatctattccagcccagtggacacagctcacaaggtactgattagcctgaggaccttcctgaggaggaatgaggatatccaagtgggcggtcttatccgaggccacttcctgctgatcctgcagcgtctgctagtggagcatggggcatccccatcaggagcctcggggaacctaccattgctgctgagcctcctctccctgatgcagctcaggaatgtgtcagagcaagaactggacagcgtggccatgaagctccttcaccaagtaagcaagctgtgtgggaagtgcagccccactgacgtggacatcctgcagccctccttcaacttcctgtattggagccttcatcagaccacacccagcagtcagaaaagagctgctgcagtgctcctgagcagcacaggcctgatggagcttctggagaagatgctggccctcaccttggcaaaggcagattctcccaggactgcactcctctgctctgcctggctgctcactgcctccttctctgcccagcagcacaagggcagtttgcaggttcaccagacactctctgtggaaatggaccaagtattgaaggctctcagctttccaaagaaaaaggctgcactactctcagctgccatcttatgcttcctgcggacagccctgcgacaaagcttttcctctgccctggtagccctggtgccctcaggggcccagccactgccagccaccaaggacactgtcctagctccactgcgaatgtcgcaagtccggtccctggtcattgggctgcagaacctcctggtgcagaaggaccctctattgtcccaggcctgtgttggctgcctggaggccttgcttgactacctggatgcccggagcccagacattgctctccacgtggcctcccagccttggaatcggtttttgctgtttaccctcttggatgctggagagaattccttcctcagacctgagattttgaggctcatgaccctgtttatgcggtaccggagtagcagtgtcctctctcatgaagaggtgggtgatgttctgcaaggtgtggctttggctgacctgtctaccctctcgaacaccacactccaggccctgcatggcttcttccagcagctccagagcatgggacacctggctgaccacagcatggcccagaccctgcaggcctccttggagggccttccccctagcacctcctcaggccagccacccctgcaggacatgctctgcctgggaggggtggctgtatccctgtcccacatcagaaactgatcctcaggacttgaaggcccagaagtggagagagaatgagacctggagacaaagggcataattgttggggaaatggatgacagctgaagctattcatatggagccatatactctattgttgaaatagaataaggaaataaaatgatacactcaca

SEQ ID NO: 243686 - DNA, 3825 bp, Artificial Sequence
  derived and/or modified sequence
atggcagttcgccaggctgccactgctggtacaccagggcctcggagagaagaggaagctgccctactcttcgaacgggcacactaccgccacgacccgcgttggttactgcctgtgacccccagactttgcctggcctgtgccctggagctgctgcccgaccctggggtctcgcttgttaggaaaaagcatatgctctcttgttttcaggatgcgctggtgcggcatacctctcttgtaacccaactggtgtcccaggaccagcgtgtttgtattcactttattagcgttctctttggactgctatgtagtatggaggatggaagtgtaaccgatctttgcatcgaagtcctcatccagatcaccacgcagctgaagctggagcagacaatcaggtgtctgctggacgagtgccacaaagaattgtgtaacatgcccagcatgagaggcagccttgcaactttaacactgctagggaagcttgtggatgccattcctgccctcgctgatgaactcgtgatggagcatgggaatttgatggagcacttgcttagagggctagtgtacccctctgaaggtatccaggccagtgtatgctacctttacggtaaattgtattcctctcctgtggctgcggagatgctaagcgggcacttcagagaaaaactctttcccctttttctgagcatcctggacggagcacagactaaggaattgcagatcaactgtctggggctactgcgccagctcctaaagtacgatctttttgtgtcaatgatcatgaatcaggatgggctgggtgagagcgcaaaaaacatagagggttccagcgggaacactagcctgcccctggtcctcaaaaagctgctgctttccagggatgagaccctgcaggttgcatctgcccattgcattacagcagtactggtccactcaccagcaaagcacgcatctgcgttcattcacgcagatatccccgaatttctcttcgagcatctgtctagctcctcagaagtactagtttggagcagttgtaattgtctgactttattggttgaggagccgctgtttttctcaaagtgccacaccgtgtatggcattgaagccgtcgtacgcagcctgcaaggcagtctgaagatgaacaacatcgagctgcacaagcagggccttctcttgttcgccgaaatcttaacaaggcaacctgaagagatcaagttattcacctcaagtgccatgtgcagggatgccggacgcgcactgcaggaagcagtgagttccccagttctcgaagtagccgctgaggctctgaaagccacctccgcctttcttagaaaagaccaccaatcaacgccgcctgtacaatacggagagttgcaagcacttctggaggcgatgctcaacagatgtgcagaattttcccagacccttctatctcgcaggccgctgggccacgccagtagccgggatagcgaaaaagcaattctgcagaggggtaagtttctactgagtactctggaaggattccgcagcgcctgcaggctcgcaattgagtttcaaagcgaacctagcgctcaggagaatcctttcacagcaccatccgctaaaaaagaagacactctcgaagcgttttccgagtttctgctgagcgcttgcgattccctctgcatacctatggtaatgcgacacctggaacagactacccaccctgcacttatggaggtatttttgtcaatcttgcataatctgttcgttatcgttcctcacatgaaggaaaaatttagcaaaaagcttgcctctagttctttcattcgcctgacgctggaacttaaggctcgtttctgctctgggctgtctcatagtgctctaaaccaggtgtgcagtaattttctgtactatatgtgcttgaatctgttgagcgccccagagaaaaccggcccaccttccaaagaggaattaagcgccgtaagtgagcttctacagcatggcctgccacagatatcttcaaggtcaccggagtcattggcttttctcagcgacagacagtacatggagggcgcagctcgacagcggcaatactgcatcttactgttattttatctagcttatatacatgaagaccggttcgtgtctgaagctgagctgttcgaggcagtgcaatcctttctcttgtccttgcaggaccagggtgagcgccctccactggtcgtctttaaggctagtatctatcttctcgccatatgtcaagataaggacaacaccctgcgcgagacaatggtcagcgctattcgcaagttcctcgagggaatacccgatcttcagttagtttatacccatcatcccctcctcttgcgcttcttcctgctgtatccggagctgatgtctaggtatggacacagggttctggagctgtggttcttttgggaagagtcctcatatgaggaattggacgatgtgacttcagccggacaacctgctctgcccgcttcacttgttgtcttgtttcagcttcttaggagtattccatctatcctcttaattctcctcgacctgatctacagtagccctgtggatactgctcataaggttcttataagtctgcggacttttctgaggaggaatgaggatatacaggtcggcggactgattcgaggccacttcttgttgatattacaaaggctgcttgtcgagcacggggcttcaccttctggtgccagcggcaatctgccactgctgctgagcctgctcagtctgatgcagctgaggaatgtctctgagcaggaactcgattcggtggccatgaaactgctgcaccaggttagcaagctttgcggaaaatgttcccctaccgatgttgatatcctgcagcctagctttaacttcctttattggagcctgcaccagactaccccatcatctcaaaaacgagcagccgctgtgctgttgtcctccaccggattgatggagctattggaaaaaatgctcgccttgacactcgccaaagccgatagccctagaaccgcgttgttgtgctctgcttggttgctcaccgcttcctttagcgcccagcaacataaggggagcctccaggtgcatcagactctttccgtggagatggaccaggtgctcaaggccctctcattcccgaaaaagaaagccgctctgctgagcgctgcaatcctgtgtttccttagaaccgctctaagacaatctttctcctcagccctcgttgccctggttcctagtggagcacagccattgcccgcaacaaaggatactgtgctcgccccattacggatgagccaggtgcggtcactggtgatcgggctgcagaaccttctggttcagaaggatccattacttagccaagcatgtgtcggatgcctggaagccctgttggattacctagatgcaaggagcccagacatcgccctacacgtcgcatcacagccttggaacaggttccttcttttcaccctgctagatgcaggcgaaaactcttttcttagacccgagatcctccgtctaatgacccttttcatgcggtaccgctcttcctcagtactctctcacgaggaggtgggcgacgtgttgcagggcgtcgccctagcggatctatcaactctgtccaatactacattgcaagctcttcacggctttttccagcagctgcagtcgatgggccacctcgcagaccactcgatggctcagactctgcaggcctcactggaaggcttgcccccttccacttcatccggccaaccccctcttcaggacatgttatgtctagggggtgttgccgtatccctctctcacatcaggaactag

SEQ ID NO: 243687 - protein, 745 aa, Artificial Sequence
  derived and/or modified sequence
MVGPGPTAAAAVEERQRKLQEYLAAKGKLKSQNTKPYLKSKNNCQNQPPSKSTIRPKNDVTNHVVLPVKPKRSISIKLQPRPPNTAGSQKPKLEPPKLLGKRLTSECVSSNPYSKPSSKSFQQCEAGSSTTGELSRKPVGSLNIEQLKTTKQQLTDQGNGKCIDFMNNIHVENESLDNFLKETNKENLLDILTEPERKPDPKLYTRSKPKTDSYNQTKNSLVPKQALGKSSVNSAVLKDRVNKQFVGETQSRTFPVKSQQLSRGADLARPGVKPSRTVPSHFIRTLSKVQSSKKPVVKNIKDIKVNRSQYERPNETKIRSYPVTEQRVKHTKPRTYPSLLQGEYNNRHPNIKQDQKSSQVCIPQTSCVLQKSKAISQRPNLTVGRFNSAIPSTPSIRPNGTSGNKHNNNGFQQKAQTLDSKLKKAVPQNHFLNKTAPKTQADVTTVNGTQTNPNIKKKATAEDRRKQLEEWQKSKGKTYKRPPMELKTKRKVIKEMNISFWKSIEKEEEEKKAQLELSSKINNTLTECLNLIEGGVPSNEILNILSSIPEAEKFAKFWICKAKLLASKGTFDVIGLYEEAIKNGATPIQELRKVVLNILQDSNRTTEGITSDSLVAETSITSVEELAKKMESVKSCLSPKEREQVTATPRIAKAEQHNYPGIKLQIGPIPRINGMPEVQDMKFITPVRRSSRIERAVSRYPEMLQEHDLVVASLDELLEVEETKCFIFRRNEALPVTLGFQTPES

SEQ ID NO: 243688 - protein, 580 aa, Artificial Sequence
  derived and/or modified sequence
MNNIHVENESLDNFLKETNKENLLDILTEPERKPDPKLYTRSKPKTDSYNQTKNSLVPKQALGKSSVNSAVLKDRVNKQFVGETQSRTFPVKSQQLSRGADLARPGVKPSRTVPSHFIRTLSKVQSSKKPVVKNIKDIKVNRSQYERPNETKIRSYPVTEQRVKHTKPRTYPSLLQGEYNNRHPNIKQDQKSSQVCIPQTSCVLQKSKAISQRPNLTVGRFNSAIPSTPSIRPNGTSGNKHNNNGFQQKAQTLDSKLKKAVPQNHFLNKTAPKTQADVTTVNGTQTNPNIKKKATAEDRRKQLEEWQKSKGKTYKRPPMELKTKRKVIKEMNISFWKSIEKEEEEKKAQLELSSKINNTLTECLNLIEGGVPSNEILNILSSIPEAEKFAKFWICKAKLLASKGTFDVIGLYEEAIKNGATPIQELRKVVLNILQDSNRTTEGITSDSLVAETSITSVEELAKKMESVKSCLSPKEREQVTATPRIAKAEQHNYPGIKLQIGPIPRINGMPEVQDMKFITPVRRSSRIERAVSRYPEMLQEHDLVVASLDELLEVEETKCFIFRRNEALPVTLGFQTPES

SEQ ID NO: 243689 - DNA, 1743 bp, Artificial Sequence
  derived and/or modified sequence
atgaacaacatccacgtggagaacgagagcctggacaacttcctgaaggagaccaacaaggagaacctgctggacatcctgaccgagcccgagagaaagcccgaccccaagctgtacaccagaagcaagcccaagaccgacagctacaaccagaccaagaacagcctggtgcccaagcaggccctgggcaagagcagcgtgaacagcgccgtgctgaaggacagagtgaacaagcagttcgtgggcgagacccagagcagaaccttccccgtgaagagccagcagctgagcagaggcgccgacctggccagacccggcgtgaagcccagcagaaccgtgcccagccacttcatcagaaccctgagcaaggtgcagagcagcaagaagcccgtggtgaagaacatcaaggacatcaaggtgaacagaagccagtacgagagacccaacgagaccaagatcagaagctaccccgtgaccgagcagagagtgaagcacaccaagcccagaacctaccccagcctgctgcagggcgagtacaacaacagacaccccaacatcaagcaggaccagaagagcagccaggtgtgcatcccccagaccagctgcgtgctgcagaagagcaaggccatcagccagagacccaacctgaccgtgggcagattcaacagcgccatccccagcacccccagcatcagacccaacggcaccagcggcaacaagcacaacaacaacggcttccagcagaaggcccagaccctggacagcaagctgaagaaggccgtgccccagaaccacttcctgaacaagaccgcccccaagacccaggccgacgtgaccaccgtgaacggcacccagaccaaccccaacatcaagaagaaggccaccgccgaggacagaagaaagcagctggaggagtggcagaagagcaagggcaagacctacaagagaccccccatggagctgaagaccaagagaaaggtgatcaaggagatgaacatcagcttctggaagagcatcgagaaggaggaggaggagaagaaggcccagctggagctgagcagcaagatcaacaacaccctgaccgagtgcctgaacctgatcgagggcggcgtgcccagcaacgagatcctgaacatcctgagcagcatccccgaggccgagaagttcgccaagttctggatctgcaaggccaagctgctggccagcaagggcaccttcgacgtgatcggcctgtacgaggaggccatcaagaacggcgccacccccatccaggagctgagaaaggtggtgctgaacatcctgcaggacagcaacagaaccaccgagggcatcaccagcgacagcctggtggccgagaccagcatcaccagcgtggaggagctggccaagaagatggagagcgtgaagagctgcctgagccccaaggagagagagcaggtgaccgccacccccagaatcgccaaggccgagcagcacaactaccccggcatcaagctgcagatcggccccatccccagaatcaacggcatgcccgaggtgcaggacatgaagttcatcacccccgtgagaagaagcagcagaatcgagagagccgtgagcagataccccgagatgctgcaggagcacgacctggtggtggccagcctggacgagctgctggaggtggaggagaccaagtgcttcatcttcagaagaaacgaggccctgcccgtgaccctgggcttccagacccccgagagctag

SEQ ID NO: 243690 - DNA, 2238 bp, Artificial Sequence
  derived and/or modified sequence
atggtgggaccgggacccactgcagccgccgctgtcgaagagcgccagcggaagcttcaagagtatttggccgccaaaggcaagcttaagtctcagaatactaagccctacctgaagtcaaagaacaattgtcagaatcagccaccaagtaaaagcacaatccggccaaagaatgacgtaactaatcacgtggtgctgcccgttaagccgaaacggagtatctcgatcaaactccagccccggccccctaatacagcgggcagccaaaagccaaagcttgagccgccaaagctcctgggtaaacgactaacatcagagtgtgtgagctcgaacccttacagtaaaccctcgtctaagtccttccaacagtgtgaagctggcagcagcaccaccggcgaactttccagaaagccagtgggtagtctaaatatcgaacagcttaagacaaccaaacagcagctcacagatcagggaaatggcaagtgcatcgactttatgaacaacattcacgtggaaaacgagagcctcgacaacttccttaaagaaactaacaaagagaacctgttggacatcttgactgaacccgagagaaagcctgatcccaaactgtacacgaggagtaaacccaagactgacagttacaatcagacgaaaaattcactggtcccaaaacaggctctcggcaaatcctctgtaaattcagccgtactgaaggatcgcgtgaataagcagtttgtgggtgagacacagagtcggacgtttcccgtgaagagccagcagctctcacggggagccgatctggcgaggcccggcgtgaaaccctcccgcactgtcccttctcatttcattagaactctctccaaagtccagagcagcaagaagcccgtggtcaagaatattaaggatattaaagtgaatcggagccagtatgaaagacctaatgagaccaaaattcggtcatacccagtgacagagcagcgcgtaaagcacactaagcccaggacctacccttctctgctgcagggcgagtacaataacaggcacccgaatattaagcaggaccagaagtcttcccaggtctgtatcccacagactagttgcgtccttcaaaagagtaaggccatctcccagcgccctaatctgaccgtgggacggttcaattctgctataccttccactcctagtattcgaccaaacggaactagcgggaacaagcacaacaataacggttttcaacagaaggcccaaacactagacagcaaactgaaaaaagccgtaccccagaaccacttcctgaataagaccgcccctaagacacaggctgacgttaccaccgtgaacggcactcaaactaatcctaacatcaagaaaaaggccactgcagaggaccggaggaaacagctggaagagtggcaaaagtcgaaaggtaaaacttacaaacgcccccctatggagcttaaaaccaagagaaaggtaattaaggagatgaacatttccttctggaagagtatcgagaaggaagaagaggaaaagaaggcccagctcgagttaagttcaaaaattaataacaccctgacagaatgtctaaacctcatagaaggtggcgtccccagcaacgagatcctgaacattctgtccagcatccctgaggccgagaagtttgcaaagttctggatctgtaaggctaaacttcttgcctcaaaaggaacattcgacgtcatcgggctgtacgaagaggccattaaaaacggtgctaccccaatccaggaattaaggaaggtcgttctgaacattctccaggattccaaccggaccaccgagggtattacctccgatagcctggtagcagagaccagtattacttctgtggaggagctcgccaagaagatggaaagcgttaagtcctgcctcagccccaaggaacgcgaacaggtgacagcaactccgcggattgctaaagccgaacagcataattatcctggcataaaactccagattggtcctattccacgtataaacggcatgcctgaggtccaagacatgaaattcatcacacccgtgaggcgcagcagccggattgagcgcgccgtgtctcggtaccctgaaatgctccaagaacacgacctggtggttgcctctctggacgaacttctcgaggttgaggagaccaaatgttttatattcagaaggaatgaagcgctgccagttactctaggttttcagacccctgaatcttag

SEQ ID NO: 243691 - DNA, 1743 bp, Artificial Sequence
  derived and/or modified sequence
atgaataatatccatgtcgagaacgagtccctcgacaacttcctgaaggaaactaataaggagaacctgctcgatattctgacggagcctgagcgaaaacccgacccaaagctttacacaaggtcgaagccaaagacagactcttacaaccagaccaagaattcactcgttccgaagcaggcactggggaagtcatcggtgaacagtgctgtgctgaaggatcgcgtcaacaaacagttcgtaggcgagacacagagccgcactttccccgtaaagagtcagcaactttccaggggagctgacctggcgcggccaggggtcaagccttctcggaccgtgccgagccacttcattagaacccttagcaaagtgcagtctagtaagaagcctgtggtaaagaatatcaaagatatcaaggttaacaggagtcagtatgaaagaccaaacgagaccaagattcggagctatcctgtgacagaacagcgtgtgaagcataccaagccccggacctatccaagcctcttgcagggagagtacaataataggcatcctaacattaaacaggatcagaaatccagccaggtgtgcatcccacagactagctgtgtgctccaaaagagtaaggcgattagccagaggccaaatctgaccgtgggccgattcaactcggccatcccttcgaccccaagcatccggcccaatggcacgtctggaaataagcacaataacaacggatttcagcagaaagctcagaccctggactcgaaactaaagaaggcggttccccagaatcactttttgaacaaaaccgcaccaaagacgcaggctgacgttacgaccgtcaatgggacccaaacaaatccaaacataaagaaaaaggctaccgccgaagacagacgcaagcagcttgaagagtggcagaagtctaagggcaaaacgtataagcgtcctcctatggagctgaagacaaagcgcaaggtgattaaggagatgaatattagcttctggaaatccatcgagaaagaggaagaagagaaaaaggcccagctggagctctcaagcaaaatcaataacacactgacagagtgcctgaatctaattgaggggggcgttcctagcaacgaaatcctgaacatcctgagcagtatccccgaggctgagaaattcgctaagttttggatttgtaaggcaaagttgttagcttcaaagggcacatttgatgtcatcgggctctacgaagaagccataaagaatggagctacccccattcaggagctgcgtaaagtagtcctgaacattctgcaagattccaaccgaacgactgaaggcattaccagcgattccctggtggctgaaacttctataacctctgtagaggaattagccaagaaaatggagtcggtcaaatcttgcctgtctccaaaagagcgggagcaagtgacagcaacacctcggatcgctaaggccgagcagcacaactaccctggaattaaacttcagattggccccatccccaggattaatggcatgcctgaggttcaggatatgaaattcattactcccgtgaggcgcagctcccgaatcgaacgggcggtgagccgctacccagagatgcttcaggagcacgatctggtggtggcatcgttagacgagttgctcgaggttgaggaaactaagtgcttcattttccgaagaaacgaggccctgcctgtcacgctgggattccaaactccagagagctag

SEQ ID NO: 243692 - DNA, 2238 bp, Artificial Sequence
  derived and/or modified sequence
atggtgggccctggccccacagctgctgctgctgtggaggagcggcagaggaagctgcaggagtacctggccgccaagggcaagctgaagagccagaacaccaagccctacctgaagagcaagaacaactgccagaaccagccccccagcaagagcaccatccggcccaagaatgatgtgaccaaccacgtggtgctgcctgtgaagcccaagaggagcatcagcatcaagctgcagccccggccccccaacacagctggcagccagaagcccaagctggagccccccaagctgctgggcaagaggctgaccagtgaatgtgtgagcagcaacccctacagcaagcccagcagcaagagcttccagcagtgtgaggccggcagcagcaccactggagagctgagcaggaagcctgtgggcagcctgaacatcgagcagctgaagaccaccaagcagcagctgacagaccagggcaatggaaaatgtattgacttcatgaacaacatccacgtggagaatgaaagcctggacaacttcctgaaggagaccaacaaggagaacctgctggacatcctgacagagcctgagaggaagccagaccccaagctgtacaccaggagcaagcccaagacagacagctacaaccagaccaagaacagcctggtgcccaagcaggccctgggcaagagctctgtgaacagcgctgtgctgaaggacagagtgaacaagcagtttgtgggggagacccagagcaggaccttccctgtgaagagccagcagctgagcagaggagctgacctggcccggcctggggtgaagcccagcaggacagtgcccagccacttcatccgcaccctgagcaaggtgcagagcagcaagaagcctgtggtgaagaacatcaaggacatcaaggtgaacagaagccagtatgaaagaccaaatgagaccaagatccgcagctaccctgtgacagagcagagggtgaagcacaccaagcccaggacctaccccagcctgctgcagggcgagtacaacaacagacaccccaacatcaagcaggaccagaagagcagccaggtgtgcatcccccagaccagctgtgtgctgcagaagagcaaggccatcagccagaggcccaacctgactgtgggccgcttcaacagcgccatccccagcacccccagcatccggcccaacggcaccagcggcaacaagcacaacaacaacggcttccagcagaaggcccagaccctggacagcaagctgaagaaggctgtgccccagaaccacttcctgaacaagacagcccccaagacccaggctgatgtgaccaccgtgaatggcacccagaccaaccccaacatcaagaagaaggccacagctgaggacaggaggaagcagctggaggagtggcagaagagcaagggcaagacctacaagaggcctcccatggagctgaagaccaagaggaaggtgatcaaggagatgaacatctccttctggaagagcattgagaaggaggaggaggagaagaaggcccagctggagctgagcagcaagatcaacaacaccctgacagaatgtctgaacctgattgagggcggcgtgcccagcaatgagatcctgaacatcctgagcagcatccctgaggccgagaagtttgccaagttctggatctgcaaggccaagctgctggccagcaagggcacctttgatgtgattggcctgtatgaggaggccatcaagaatggagccacccccatccaggagctgaggaaggtggtgctgaacatcctgcaggacagcaacagaaccacagagggcatcaccagtgacagcctggtggccgagaccagcatcacctctgtggaggagctggccaagaagatggagagcgtgaagagctgcctgagccccaaggagcgggagcaggtgacagccaccccaagaattgccaaggccgagcagcacaactacccaggcatcaagctgcagatcggccccatcccccgcatcaatggcatgcctgaggtgcaggacatgaagttcatcacccctgtgcggcgcagcagcagaattgaaagagctgtgagccgctacccagagatgctgcaggagcatgacctggtggtggccagcctggatgagctgctggaggtggaggagaccaagtgcttcatcttcagaagaaatgaggccctgcctgtgaccctgggcttccagaccccagagagctag

SEQ ID NO: 243693 - DNA, 1743 bp, Artificial Sequence
  derived and/or modified sequence
atgaacaacatccacgtggagaatgaaagcctggacaacttcctgaaggagaccaacaaggagaacctgctggacatcctgacagagcctgagaggaagccagaccccaagctgtacaccaggagcaagcccaagacagacagctacaaccagaccaagaacagcctggtgcccaagcaggccctgggcaagagctctgtgaacagcgctgtgctgaaggacagagtgaacaagcagtttgtgggggagacccagagcaggaccttccctgtgaagagccagcagctgagcagaggagctgacctggcccggcctggggtgaagcccagcaggacagtgcccagccacttcatccgcaccctgagcaaggtgcagagcagcaagaagcctgtggtgaagaacatcaaggacatcaaggtgaacagaagccagtatgagcggcccaatgagaccaagatccgcagctaccctgtgacagagcagagggtgaagcacaccaagcccaggacctaccccagcctgctgcagggcgagtacaacaacagacaccccaacatcaagcaggaccagaagagcagccaggtgtgcatcccccagaccagctgtgtgctgcagaagagcaaggccatcagccagaggcccaacctgactgtgggccgcttcaacagcgccatccccagcacccccagcatccggcccaacggcaccagcggcaacaagcacaacaacaacggcttccagcagaaggcccagaccctggacagcaagctgaagaaggctgtgccccagaaccacttcctgaacaagacagcccccaagacccaggctgatgtgaccaccgtgaatggcacccagaccaaccccaacatcaagaagaaggccacagcagaagatagaaggaagcagctggaggagtggcagaagagcaagggcaagacctacaagaggcctcccatggagctgaagaccaagaggaaggtgatcaaggagatgaacatctccttctggaagagcattgagaaggaggaggaggagaagaaggcccagctggagctgagcagcaagatcaacaacaccctgacagagtgcctgaacctgattgaaggaggagtgcccagcaatgagatcctgaacatcctgagcagcatccctgaggccgagaagtttgccaagttctggatctgcaaggccaagctgctggccagcaagggcacctttgatgtgattggcctgtatgaggaggccatcaagaatggagccacccccatccaggagctgaggaaggtggtgctgaacatcctgcaggacagcaacagaaccacagagggcatcaccagtgacagcctggtggccgagaccagcatcacctctgtggaggagctggccaagaagatggagagcgtgaagagctgcctgagccccaaggagcgggagcaggtgacagccaccccccgcatcgccaaggccgagcagcacaactacccaggcatcaagctgcagatcggccccatcccccgcatcaatggcatgcctgaggtgcaggacatgaagttcatcacccctgtgagaagaagcagccgcatcgagagagctgtgagccgctacccagagatgctgcaggagcatgacctggtggtggccagcctggatgagctgctggaggtggaggagaccaagtgcttcatcttcagaagaaatgaggccctgcctgtgaccctgggcttccagaccccagagagctag

SEQ ID NO: 243694 - DNA, 2238 bp, Artificial Sequence
  derived and/or modified sequence
atggtgggccccggccccaccgccgccgccgccgtggaggagcggcagagaaaattacaggagtatctggcggctaaggggaaacttaagagtcaaaacaccaaaccatacctcaaaagcaaaaacaactgtcagaaccagccaccgagcaagagcaccatcagaccgaagaatgatgtgacaaaccacgtcgtgctccctgtgaaacccaagagatccatcagcattaagctccagccaagacctcccaacactgctggctctcagaagcctaaactggagcctcctaaactcctggggaaacggctcacttccgagtgtgtcagctctaacccctacagtaaacctagtagcaagagcttccagcaatgtgaagccggtagcagtacgaccggcgaactgagccgtaagcccgttggctcactcaatattgagcagctcaagaccaccaagcagcagctgactgaccagggcaatggcaagtgcatcgacttcatgaacaacatccacgtggaaaacgaatcactggataacttccttaaggaaactaacaaggagaatctgcttgacatcttaacagagccagaaaggaagcccgaccctaagctgtacacacgttccaagcctaagactgactcttacaatcaaactaagaactctctggttccaaagcaggcactgggcaagtcttccgtgaactctgcagtactgaaggatagagtcaataaacagttcgtgggtgaaacacagtccaggacatttccggttaaatcccaacagctgagccggggcgcagatctggctcgcccgggcgtgaaaccttcgagaaccgtgccttctcacttcatccggaccctcagcaaggtgcaatccagtaagaagcctgtggtgaagaacattaaggacattaaggtgaaccgatctcagtatgaacgcccaaatgagaccaagatacgctcatatcctgtcacagaacagagggtgaaacacaccaaaccccgtacgtaccctagcctgctgcagggagaatacaacaatagacatccaaatatcaaacaagaccaaaaaagttcacaagtctgtattccccagacaagctgcgtgctgcagaagagcaaagccatatctcagcgccctaacctgaccgttggtaggtttaacagcgctattcctagcactccttcaatccgcccgaacggaacaagcggtaacaagcacaataataacgggttccaacagaaagctcagacactagattccaaactgaagaaggctgtgcctcagaaccatttcttgaacaagaccgcccctaaaacacaggcggatgtcaccactgtgaatgggacccagaccaatccgaatattaagaaaaaggctactgccgaggaccgtaggaaacagttggaggaatggcaaaaaagtaaaggtaaaacttataagcgacctcccatggagctcaagactaagagaaaagtcatcaaggaaatgaacattagcttctggaaatcgattgagaaggaagaggaagaaaaaaaagcacagttggagctttcttcaaagattaataacacattaactgagtgcctgaacctgatagaaggaggcgtcccctccaatgaaatcctcaatattctgagtagcatcccagaggctgagaagttcgctaaattctggatttgcaaagcgaaactcctcgctagtaagggtacctttgatgtcattgggttgtacgaagaggcgatcaaaaacggggcaactccaattcaggagctcaggaaggttgtcttgaacatccttcaggacagcaacagaaccacagaaggtatcacatctgatagccttgtagccgagacctcaatcacctcagtggaagagctcgcaaagaagatggagtctgttaagagttgcctgtcacctaaggaacgggagcaggtgaccgcaacacctagaattgccaaggcagaacagcacaactatcccgggattaagctccagattggacccatacctagaatcaacgggatgcctgaggtgcaggatatgaagtttattacaccagttagacgcagcagccgcatcgagcgagcggtgtcacggtatcccgaaatgctccaagaacacgatctggtggtcgctagcctggatgaattgctggaggtggaggaaaccaaatgtttcatttttcgccgtaatgaagctctgccagtaactcttggcttccagacccccgagagttag

SEQ ID NO: 243695 - DNA, 1743 bp, Artificial Sequence
  derived and/or modified sequence
atgaacaacatccacgtggagaacgagagcctggacaacttcctgaaggaaactaacaaggagaacctgttggatatcctcacagagccagagcgcaaacctgacccaaagctctacaccaggtccaaacctaagaccgacagttataaccagaccaagaatagtctcgtccctaaacaagctctaggtaaatcaagcgtcaactccgccgtgttgaaggatcgcgtaaacaagcagtttgtcggagagacccagtctcgaacatttccagtgaaatcacagcagctgtccagaggagccgacctggctcgcccgggcgtgaaaccttcacgcactgtcccttcacattttatccgaacgctctccaaagtacagtcaagcaagaagcccgttgtgaagaacataaaggatatcaaggtcaacagaagtcagtacgagcggccaaacgagaccaaaattcgctcctacccagttacagagcagcgcgtgaaacacaccaagccacgcacttacccaagcttgctgcagggagaatataataataggcacccaaatattaaacaggaccagaagagcagccaggtgtgtattcctcagacgtcttgtgttttacagaagtctaaagcaatctcacagagaccaaatctgacagtgggccggtttaacagcgccatcccatctacaccaagtatcaggccaaacggcacctctggtaacaagcacaacaacaatggttttcagcagaaggcacagacactggacagcaagttgaagaaagcggtgccgcagaaccacttcctgaataagaccgcccccaagacccaagccgacgttactaccgtcaatgggacacagaccaaccctaatataaaaaaaaaggccacagccgaggataggcgaaagcagttggaagagtggcagaagtcaaaaggaaagacttataaacggcctcctatggagttaaagaccaaacgaaaggtaatcaaagagatgaacataagtttttggaagtcaattgagaaggaggaagaagagaagaaggcccaacttgaactctcaagcaagatcaataatacgttaacagagtgccttaacttgattgagggcggggtccccagcaacgagatccttaatatcttatcttctattccagaggcagagaagttcgcaaagttttggatctgcaaggctaaactgcttgcgagtaagggcactttcgatgtcattgggctttacgaggaagccatcaagaacggagccacacctattcaggaactcagaaaggtcgtcctcaacatcttgcaggactctaataggacgactgagggcatcacgagcgactccctggtcgccgagacctctatcacttcggtggaagagttagcaaaaaagatggagagtgtcaaatcgtgcttgagccccaaggagagagaacaggtgaccgcaacaccacgaattgcaaaggccgagcagcacaactatcccggcattaaacttcagatcgggcccattccccgaatcaacgggatgcctgaggtgcaggacatgaaatttataacacccgtacgacgcagcagtagaatagagagggccgtctcccgctatccagaaatgctccaggagcacgacttggtggtggcttccctggatgagctactggaagtggaagagacaaagtgtttcattttccgcagaaatgaggctttgcctgtaacattgggattccagacaccagagagctag

SEQ ID NO: 243696 - DNA, 2238 bp, Artificial Sequence
  derived and/or modified sequence
atggtggggccagggccaacagccgctgccgctgtcgaagaacgacagagaaagctccaggaatacctggcagctaaaggcaagctgaagtctcagaacacgaagccttatttaaagagcaagaacaactgtcagaaccagcctcctagcaagtcaaccatacgcccaaagaacgatgtcacgaaccacgtcgtactcccggtcaaaccgaagagaagtatcagtattaagctgcagccgcgacctcctaacaccgccggttcacaaaagccaaagttggagcctccgaagctgttaggcaaacgactgacctcagagtgtgtttcctcaaacccttattcaaagccatctagcaaatctttccagcaatgtgaggcaggaagttctacgacgggggagctttctaggaaacctgtggggtcccttaacatcgagcaattaaagacaaccaaacagcagctcacggatcagggcaacggcaaatgtatagattttatgaataacattcacgtggagaacgaatccctggataacttcttgaaggagacgaacaaggagaatctcctggatatcctcacggagccagaacggaaaccagacccgaagctttacacaaggtccaagccaaagacggacagctacaatcagacaaaaaatagccttgttccaaaacaggcattagggaagtcgtccgtgaactcagctgtgcttaaggatagagtgaacaaacaatttgtcggagaaacacagtcacggaccttccccgtcaaaagccagcaactgagccgcggagcggatctggcgagacctggagtaaaaccctcccgaaccgtgccgagccattttatcaggactctatcaaaggttcaatcgagtaagaagcccgtcgtaaaaaacataaaagatattaaagtaaaccgaagtcagtacgagaggcccaacgaaaccaagattaggagttatcccgttacagaacagagagtgaaacatactaagcccagaacatacccttctttgctacaaggggagtacaataaccggcatcctaatataaagcaggaccaaaaatccagccaagtgtgcatcccccaaacttcctgcgtgttgcagaaatcaaaggccatcagccagagaccaaacctgacagttggcagattcaacagcgccatcccctcaacgccatccatccgtcccaacggcacctctgggaacaaacacaataacaatggatttcaacagaaggctcaaactctcgactccaaactgaaaaaggccgtgccccagaaccacttcctgaacaagaccgcccctaagacacaggctgacgtgaccactgtaaatggcacacagactaaccctaatatcaagaaaaaagcaacggcagaggatagacgcaaacagctagaggaatggcaaaaaagtaagggtaaaacgtataagaggcctcccatggagcttaagacaaaacgaaaggtgattaaggagatgaacatctctttctggaagtctatagagaaagaggaagaggagaagaaggcacagcttgagctgtccagcaaaattaacaacactctgacagagtgcctgaacctgatagaagggggagtcccatcgaatgagatcttaaacattttgtcgagcatccctgaggccgaaaagtttgctaagttttggatctgcaaagctaaactgctggcgagcaaggggacattcgatgtaatcgggctgtacgaagaggctattaaaaatggcgcaactccgattcaagaattacggaaggttgtgctcaacattctccaggactcaaatcgcaccacggagggaattacctcagacagtctggtcgccgaaactagcattactagtgtagaggagctggcgaaaaagatggagtccgttaaaagctgcctctcgccaaaagaacgggaacaggtgacggctacccctagaattgcaaaagctgaacaacacaactacccaggcatcaagctccagattggaccgattcctcggataaacggcatgccagaagtgcaggacatgaaatttataacccccgtcagaaggtccagtaggatagaaagggcagtcagccgatatcctgagatgcttcaggagcacgatctagtagtggcctctttggatgaacttctagaggtggaggagactaagtgtttcatctttaggcggaacgaggctctgccagtgacactggggtttcagaccccagaatcttag

SEQ ID NO: 243697 - DNA, 1743 bp, Artificial Sequence
  derived and/or modified sequence
atgaataatatacatgtcgaaaatgagtctctcgacaatttccttaaggaaaccaacaaggaaaacttgttggatatactgacagaacccgagaggaaacctgatccaaagctctataccaggtcaaaacccaagactgatagctacaatcagactaaaaactcattggtgcccaagcaggccctggggaaaagctccgttaacagcgccgtgctgaaagaccgcgtcaataaacaattcgtcggtgagacacagagccgcactttcccagtgaaaagccaacagctgtcccgtggcgctgatctggcgaggcctggcgtgaagccgtctcgaaccgtcccctcacatttcatccggacacttagtaaagttcagtcttcaaagaagccggtcgtcaagaatatcaaagacattaaggtcaatcggtcccagtacgagcgacccaatgaaacaaaaattagaagctatcccgtcacggagcagagggtgaagcataccaaaccccgtacatacccttctttgctgcagggggagtataataaccgacatccaaatattaagcaagaccagaagtcctcgcaggtgtgcatcccacagactagctgtgttctgcagaagtccaaagccatttcacagagaccaaatctgactgtcggaagatttaattctgctatacccagcactccttctatcagacccaacgggacatcgggaaacaaacataacaacaacggatttcagcagaaggcccagacactggatagtaaactgaaaaaggcggtgccacagaaccatttcctgaacaaaaccgcaccaaagacccaggcggacgttacgaccgttaatgggacacagactaatcccaatatcaaaaagaaagcaacggctgaggacaggcgaaaacagttggaggagtggcagaagtccaaaggcaagacatataaacgtccaccaatggaactcaagactaagcgcaaggtcattaaagagatgaatatctcattctggaaaagtatcgaaaaagaggaagaggaaaagaaggctcagctagaactcagttctaaaattaataacacattgacggagtgtcttaacctcattgaggggggtgtgcccagtaatgaaatccttaatattctatcgagcatccctgaggccgagaaattcgctaagttctggatctgcaaggccaagctgctggctagcaagggaacatttgacgtgataggattgtacgaggaggcgattaagaacggcgcaacacccattcaggagctccgcaaagtggttctgaacattcttcaagactctaacaggaccactgaggggatcacaagcgactctctcgtggccgaaacttccattacctccgttgaggagctggcaaagaagatggaaagcgtaaaaagctgtctgtctcccaaggagagagaacaggtgacagcaacacccagaattgccaaagccgaacagcacaactatcctggcatcaaattgcagatcgggcctatccccagaataaacggcatgccagaagtacaagatatgaagttcatcacacccgtgaggcggtctagcaggatcgaaagagcggtgagccggtatccagaaatgctccaggagcatgatctcgtggtggccagcttagacgagttgttggaggtggaggagactaaatgcttcatcttccggaggaacgaggcattacctgtgacacttgggtttcagacgccagagtcatag

SEQ ID NO: 243698 - DNA, 4737 bp, Artificial Sequence
  derived and/or modified sequence
gtttgaagaaaaactgtcactgaagagtcatggtggggcccgggcctaccgctgctgccgctgtcgaagagcggcagagaaagcttcaggagtaccttgcagccaagggaaaactgaagagccaaaacaccaagccttatctaaaatccaagaataattgccagaatcaaccaccttctaaatctactattagacccaaaaatgatgttaccaaccatgttgttttgcctgtcaaacctaaaaggtccatcagcattaaactccagcccagaccacctaatactgcagggtcccagaagccgaagttggagccaccaaaacttctgggcaaaaggctgacttcagaatgtgtttcttctaacccatactctaagccttctagcaagagttttcaacagtgtgaagctggatcgtccacaacaggagaactgtcaagaaaacctgtggggtcacttaatatagagcaattgaaaactacaaagcagcagttaacagatcaaggaaatggtaaatgtatagactttatgaataatatccatgttgaaaacgaatctttggataactttctaaaagaaacaaacaaagagaacttgctcgatatcttaacagaacctgagaggaagccagatcctaaattatataccagaagtaagccaaagactgactcttataatcaaaccaagaacagtttagttcctaaacaagccttgggcaaaagttcagttaatagtgctgttctgaaagatagggttaataaacaatttgttggagaaacacaaagcaggactttcccagtaaaatcacagcaactctctagaggagcagatcttgcaagaccaggagtaaaaccctcaaggacggttccctctcactttattcggacccttagtaaagttcagtcatcaaagaaaccagtagtcaagaacatcaaagatataaaggttaataggagtcaatatgaaagaccaaatgaaactaagatacggtcataccctgttactgaacagagagtgaagcacaccaaacccagaacataccccagtttgcttcagggtgaatataacaacagacatccaaacatcaagcaagatcagaagtccagccaagtttgtatacctcagacatcatgtgtactgcaaaagtcaaaagccataagccagaggcctaatttgacagttggcagatttaattcagccattccaagcacccctagcataagaccaaatggaaccagtggtaataaacataacaataatggctttcagcaaaaagcacagactttggactccaagttgaaaaaggctgttccccagaaccattttctgaacaagacagctcccaaaactcaagctgatgtcacaaccgtaaatgggacccaaacaaacccaaatattaaaaagaaggcaacagcagaggatcgaaggaaacaactagaagaatggcagaaatctaagggaaaaacctataaacggcctcctatggaacttaaaacaaaaagaaaagtaataaaggaaatgaatatttcattctggaagagcattgaaaaagaagaggaagaaaagaaagcacaactcgaactgtccagtaaaattaacaacactctgacagaatgtctgaacctcatcgaagggggtgtaccttctaatgaaatacttaacatattgtccagcattcctgaagctgaaaaatttgctaaattctggatctgcaaagcaaagttgttggcaagtaaaggcacctttgatgttattgggctatatgaagaggccattaaaaatggggcaacaccaatacaagagttgcggaaagttgttcttaatatcttgcaagactcaaacagaaccacagaagggattacttctgactctttagttgctgaaactagtataacatcagtggaagagctggccaagaagatggaatctgtgaagtcttgtctttctccaaaagagagggaacaagtcacggcgacaccccgaatagccaaggcagaacagcataattatcctggtatcaaattacagattggtccaatccctagaataaatgggatgccggaagtgcaagacatgaaatttatcactcctgtacggcgttcgtcgaggattgagcgagcagtgtcccgctacccagaaatgctgcaggaacacgatttagtagtggcttctcttgatgaactgttagaagtggaagaaacaaaatgttttatattccgtagaaatgaggcgctgcctgtaacattggggtttcaaacccctgaatcataatttcttgatgctttttttaaaaaaggtgtttcagaaccaacataagacaagaaatattcttgtccaagtgacctggaaaaaaagagaggcatcatggatgcagattatggacgctcaggacttaagtaattcactgggcttactctcaaattttctctccccatgggaaaatctttgctttatgtgtttaagaccagtttgccagttttacagtatacataaatttcaaacttttgaatatttaccctacaactatgataaatatttatactttattgatctactttaatcccaacatagttttttatatcagaaggttggtcccacaatataatgggacttttctttctgcatccaccttagcagagggcaagttctttcatcgtggaagatctgaactttgacgctagcttgacaggctgaatggaccttgacagatggccaagtcaaaacccctcattttacagatgagtttatgctagctgtgcctttgctcagagatcataaatttatgtgtgatctttgactttcatcacagtatccttgtaaatgagagagaattcttgttttttctatgccaggtctcctcagatgaaacacaatcctgaattggcatggtcgtctagcttttatattcaaacctagttttgcatttgttactcagaaacacttcaagtaacaaaaggggggcaggggagaggggtggggagtggacacttgcttcttcagttctttgctcagctagggtatagctggcctgagaaggcagtgcaagccccagagactgttgtaggttgctttttcttcctcctgggcaactatttgtggaaaggttttaccttagtcattatgtaaatataattgtgtagaaaaacctagtcaacacattttaaattttagctttcttaatatttaagtattatcttaaaacaacattaaatttctattagttcctgcttgtttatcttatttattatagaaaaccatgataatggctttgcatagagaattaggagtttgtctaaggatataccagttggctgtcctaagaaacaaggagcattcattaccaaggagaatggactttgatcaaaggtctatcagcctcatccaggaactagatttttttaagggaagcagatctatttctgaaagtcagatttataataaagctcaaaaaactgagctataaacctgtaataccagcagactttcaataagagactcttacaactcaattgtggaaaaactaataattaaaaatgggcaaaggacctgagcagacatttctccaaagaagacataagaaatggccagtaggtatagatatgaaaaggtgttcagcatcattaatcataagaataatgtaaattaaaaccactgtgagctatcacctcacatctataagaatggctattaacaagacatgagataaatgttgatgagattgtggagaaaagagaaccctagtacactgtttgtgggcgtgtagactggggcagccgttatggaaaacggtatggaggctcctaaagaaattaaaaatagaactgttatctgaccctcttctgagtaagtatgtacccaaagaagatgaaatcaccagctgggcgcagtgactcacacctgtaatcccagcactttggagtgggtgaatcacctgaggtcaggagttcaagaccagcttgaccaacatggtgaaaccccgtctctactaaaaatacaaaaagtaggcgggcatggtgacgggcacctgtaatcccagctacttgggaggctgaggcagaagaatcacttgaactcgggaggtggaggttgcagtgagccaaaattgcgtcactgcactccagcctgggttacagagcaagactccatctcaaaaaaaaaaaagatgaaatcatcacctcataaagatatctgcactcacatgtttgtggcagtgttattctcaatagccaagatgtggaaacaacctaaatgcccatcaatggacaaataaagaaaatacggcatatgcatgccgtggaatagtattcatccttggaaaagagggagttcttgccatttgccacaacatagatggacctggagaacattatgctaagtgaaataagccagacccaaggaaaaatactgcatgatctcacatatggaatatttaattttttaagaaagagctcaagtacacagagaaagtgcttaccacagattggggaagaggaaatggggagatgcaggccaaggatacaaaatagcagataaaatgaacaagtctagagatagggctaaagttaatacaattgtattagggatttttgttaaataagtagattttagctgctattatcacaaaaaaactgagatgataatgttaatctgcttcactatagcagccattttattatctatatgtatcccataacatcatgttgtaaatcttaaatatacctaataaaataaaattgtcacc

SEQ ID NO: 243699 - DNA, 4533 bp, Artificial Sequence
  derived and/or modified sequence
aatgaggacgcgtggacgcgcggcacgccggtcctggctacaggcgcggcgtttgaagaaaaactgtcactgaagagtcatggtggggcccgggcctaccgctgctgccgctgtcgaagagcggcagagaaagcttcaggagtaccttgcagccaagggaaaactgaagagccaaaacaccaagccttatctaaaatccaagaataattgccagaatcaaccaccttctaaatctactattagacccaaaaatgatgttaccaaccatgttgttttgcctgtcaaacctaaaaggtccatcagcattaaactccagcccagaccacctaatactgcagggtcccagaagccgaagttggagccaccaaaacttctgggcaaaaggctgacttcagaatgtgtttcttctaacccatactctaagccttctagcaagagttttcaacagtgtgaagctggatcgtccacaacaggagaactgtcaagaaaacctgtggggtcacttaatatagagcaattgaaaactacaaagcagcagttaacagatcaaggaaatggtaaatgtatagactttatgaataatatccatgttgaaaacgaatctttggataactttctaaaagaaacaaacaaagagaacttgctcgatatcttaacagaacctgagaggaagccagatcctaaattatataccagaagtaagccaaagactgactcttataatcaaaccaagaacagtttagttcctaaacaagccttgggcaaaagttcagttaatagtgctgttctgaaagatagggttaataaacaatttgttggagaaacacaaagcaggactttcccagtaaaatcacagcaactctctagaggagcagatcttgcaagaccaggagtaaaaccctcaaggacggttccctctcactttattcggacccttagtaaagttcagtcatcaaagaaaccagtagtcaagaacatcaaagatataaaggttaataggagtcaatatgaaagaccaaatgaaactaagatacggtcataccctgttactgaacagagagtgaagcacaccaaacccagaacataccccagtttgcttcagggtgaatataacaacagacatccaaacatcaagcaagatcagaagtccagccaagtttgtatacctcagacatcatgtgtactgcaaaagtcaaaagccataagccagaggcctaatttgacagttggcagatttaattcagccattccaagcacccctagcataagaccaaatggaaccagtggtaataaacataacaataatggctttcagcaaaaagcacagactttggactccaagttgaaaaaggctgttccccagaaccattttctgaacaagacagctcccaaaactcaagctgatgtcacaaccgtaaatgggacccaaacaaacccaaatattaaaaagaaggcaacagcagaggatcgaaggaaacaactagaagaatggcagaaatctaagggaaaaacctataaacggcctcctatggaacttaaaacaaaaagaaaagtaataaaggaaatgaatatttcattctggaagagcattgaaaaagaagaggaagaaaagaaagcacaactcgaactgtccagtaaaattaacaacactctgacagaatgtctgaacctcatcgaagggggtgtaccttctaatgaaatacttaacatattgtccagcattcctgaagctgaaaaatttgctaaattctggatctgcaaagcaaagttgttggcaagtaaaggcacctttgatgttattgggctatatgaagaggccattaaaaatggggcaacaccaatacaagagttgcggaaagttgttcttaatatcttgcaagactcaaacagaaccacagaagggattacttctgactctttagttgctgaaactagtataacatcagtggaagagctggccaagaagatggaatctgtgaagtcttgtctttctccaaaagagagggaacaagtcacggcgacaccccgaatagccaaggcagaacagcataattatcctggtatcaaattacagattggtccaatccctagaataaatgggatgccggaagtgcaagacatgaaatttatcactcctgtacggcgttcgtcgaggattgagcgagcagtgtcccgctacccagaaatgctgcaggaacacgatttagtagtggcttctcttgatgaactgttagaagtggaagaaacaaaatgttttatattccgtagaaatgaggcgctgcctgtaacattggggtttcaaacccctgaatcataatttcttgatgctttttttaaaaaaggtgtttcagaaccaacataagacaagaaatattcttgtccaagtgacctggaaaaaaagagaggcatcatggatgcagattatggacgctcaggacttaagtaattcactgggcttactctcaaattttctctccccatgggaaaatctttgctttatgtgtttaagaccagtttgccagttttacagtatacataaatttcaaacttttgaatatttaccctacaactatgataaatatttatactttattgatctactttaatcccaacatagttttttatatcagaaggttggtcccacaatataatgggacttttctttctgcatccaccttagcagagggcaagttctttcatcgtggaagatctgaactttgacgctagcttgacaggctgaatggaccttgacagatggccaagtcaaaacccctcattttacagatgagtttatgctagctgtgcctttgctcagagatcataaatttatgtgtgatctttgactttcatcacagtatccttgtaaatgagagagaattcttgttttttctatgccaggtctcctcagatgaaacacaatcctgaattggcatggtcgtctagcttttatattcaaacctagttttgcatttgttactcagaaacacttcaagtaacaaaaggggggcaggggagaggggtggggagtggacacttgcttcttcagttctttgctcagctagggtatagctggcctgagaaggcagtgcaagccccagagactgttgtaggttgctttttcttcctcctgggcaactatttgtggaaaggttttaccttagtcattatgtaaatataattgtgtagaaaaacctagtcaacacattttaaattttagctttcttaatatttaagtattatcttaaaacaacattaaatttctattagttcctgcttgtttatcttatttattatagaaaaccatgataatggctttgcatagagaattaggagtttgtctaaggatataccagttggctgtcctaagaaacaaggagcattcattaccaaggagaatggactttgatcaaaggtctatcagcctcatccaggaactagatttttttaagggaagcagatctatttctgaaagtcagatttataataaagctcaaaaaactgagctataaacctgtaataccagcagactttcaataagagactcttacaactcaattgtggaaaaactaataattaaaaatgggcaaaggacctgagcagacatttctccaaagaagacataagaaatggccagtaggtatagatatgaaaaggtgttcagcatcattaatcataagaataatgtaaattaaaaccactgtgagctatcacctcacatctataagaatggctattaacaagacatgagataaatgttgatgagattgtggagaaaagagaaccctagtacactgtttgtgggcgtgtagactggggcagccgttatggaaaacggtatggaggctcctaaagaaattaaaaatagaactgttatctgaccctcttctgagtaagtatgtacccaaagaagatgaaatcaccagctgggcgcagtgactcacacctgtaatcccagcactttggagtgggtgaatcacctgaggtcaggagttcaagaccagcttgaccaacatggtgaaaccccgtctctactaaaaatacaaaaagtaggcgggcatggtgacgggcacctgtaatcccagctacttgggaggctgaggcagaagaatcacttgaactcgggaggtggaggttgcagtgagccaaaattgcgtcactgcactccagcctgggttacagagcaagactccatctcaaaaaaaaaaaagatgaaatcatcacctcataaagatatctgcactcacatgtttgtggcagtgttattctcaatagccaagatgtggaaacaacctaaatgcccatcaatggacaaataaagaaaatacggcatatgcatgccgtggaatagtattcatccttggaaaagagggagttcttgccatttgccacaacatagatggacctggagaacattatgctaagtgaaataagccagacccaaggaaaaatactgcatgatctcacatatggaatatttaattttttaagaaagagctcaagtacacagagaaagtgcttaccacagattgggga

SEQ ID NO: 243700 - DNA, 2238 bp, Artificial Sequence
  derived and/or modified sequence
atggtgggccccggccccaccgccgccgccgccgtggaggagagacagagaaagctgcaggagtacctggccgccaagggcaagctgaagagccagaacaccaagccctacctgaagagcaagaacaactgccagaaccagccccccagcaagagcaccatcagacccaagaacgacgtgaccaaccacgtggtgctgcccgtgaagcccaagagaagcatcagcatcaagctgcagcccagaccccccaacaccgccggcagccagaagcccaagctggagccccccaagctgctgggcaagagactgaccagcgagtgcgtgagcagcaacccctacagcaagcccagcagcaagagcttccagcagtgcgaggccggcagcagcaccaccggcgagctgagcagaaagcccgtgggcagcctgaacatcgagcagctgaagaccaccaagcagcagctgaccgaccagggcaacggcaagtgcatcgacttcatgaacaacatccacgtggagaacgagagcctggacaacttcctgaaggagaccaacaaggagaacctgctggacatcctgaccgagcccgagagaaagcccgaccccaagctgtacaccagaagcaagcccaagaccgacagctacaaccagaccaagaacagcctggtgcccaagcaggccctgggcaagagcagcgtgaacagcgccgtgctgaaggacagagtgaacaagcagttcgtgggcgagacccagagcagaaccttccccgtgaagagccagcagctgagcagaggcgccgacctggccagacccggcgtgaagcccagcagaaccgtgcccagccacttcatcagaaccctgagcaaggtgcagagcagcaagaagcccgtggtgaagaacatcaaggacatcaaggtgaacagaagccagtacgagagacccaacgagaccaagatcagaagctaccccgtgaccgagcagagagtgaagcacaccaagcccagaacctaccccagcctgctgcagggcgagtacaacaacagacaccccaacatcaagcaggaccagaagagcagccaggtgtgcatcccccagaccagctgcgtgctgcagaagagcaaggccatcagccagagacccaacctgaccgtgggcagattcaacagcgccatccccagcacccccagcatcagacccaacggcaccagcggcaacaagcacaacaacaacggcttccagcagaaggcccagaccctggacagcaagctgaagaaggccgtgccccagaaccacttcctgaacaagaccgcccccaagacccaggccgacgtgaccaccgtgaacggcacccagaccaaccccaacatcaagaagaaggccaccgccgaggacagaagaaagcagctggaggagtggcagaagagcaagggcaagacctacaagagaccccccatggagctgaagaccaagagaaaggtgatcaaggagatgaacatcagcttctggaagagcatcgagaaggaggaggaggagaagaaggcccagctggagctgagcagcaagatcaacaacaccctgaccgagtgcctgaacctgatcgagggcggcgtgcccagcaacgagatcctgaacatcctgagcagcatccccgaggccgagaagttcgccaagttctggatctgcaaggccaagctgctggccagcaagggcaccttcgacgtgatcggcctgtacgaggaggccatcaagaacggcgccacccccatccaggagctgagaaaggtggtgctgaacatcctgcaggacagcaacagaaccaccgagggcatcaccagcgacagcctggtggccgagaccagcatcaccagcgtggaggagctggccaagaagatggagagcgtgaagagctgcctgagccccaaggagagagagcaggtgaccgccacccccagaatcgccaaggccgagcagcacaactaccccggcatcaagctgcagatcggccccatccccagaatcaacggcatgcccgaggtgcaggacatgaagttcatcacccccgtgagaagaagcagcagaatcgagagagccgtgagcagataccccgagatgctgcaggagcacgacctggtggtggccagcctggacgagctgctggaggtggaggagaccaagtgcttcatcttcagaagaaacgaggccctgcccgtgaccctgggcttccagacccccgagagctag

SEQ ID NO: 243701 - protein, 190 aa, Artificial Sequence
  derived and/or modified sequence
MAAGELEGGKPLSGLLNALAQDTFHGYPGITEELLRSQLYPEVPPEEFRPFLAKMRGILKSIASADMDFNQLEAFLTAQTKKQGGITSDQAAVISKFWKSHKTKIRESLMNQSRWNSGLRGLSWRVDGKSQSRHSAQIHTPVAIIELELGKYGQESEFLCLEFDEVKVNQILKTLSEVEESISTLISQPN

SEQ ID NO: 243702 - protein, 159 aa, Artificial Sequence
  derived and/or modified sequence
MAAGELEGGKPLSGLLNALAQDTFHGYPGITEELLRSQLYPEVPPEEFRPFLAKMRGILKSIASADMDFNQLEAFLTAQTKKQGGITSDQAAVISKFWKSHKTKIRESLMNQSRWNSGLRGLSWRVDGKSQSRHSAQIHTPVAIIELELGKYGQVHCNQ

SEQ ID NO: 243703 - protein, 190 aa, Artificial Sequence
  derived and/or modified sequence
MAAGELEGGKPLSGLLNALAQDTFHGYPGITEELLRSQLYPEVPPEEFRPFLAKMRGILKSIASADMDFNQLEAFLTAQTKKQGGITSDQAAVISKFWKSHKTKIRESLMNQSRWNSGLRGLSWRVDGKSQSRHSAQIHTPAAIAEAEAGKYGQESEFLCLEFDEVKANQIAKTASEAEESISTLISQPN

SEQ ID NO: 243704 - protein, 211 aa, Artificial Sequence
  derived and/or modified sequence
MAAGELEGGKPLSGLLNALAQDTFHGYPGITEELLRSQLYPEVPPEEFRPFLAKMRGILKSIASADMDFNQLEAFLTAQTKKQGGITSDQAAVISKFWKSHKTKIRESLMNQSRWNSGLRGLSWRVDGKSQSRHSAQIHTPAAIAEAEAGKYGQESEFLCLEFDEVKANQIAKTASEAEESISTLISQPNPKKKRKVPKKKRKVPKKKRKV

SEQ ID NO: 243705 - protein, 211 aa, Artificial Sequence
  derived and/or modified sequence
MAAGELEGGKPLSGLLNALAQDTFHGYPGITEELLRSQLYPEVPPEEFRPFLAKMRGILKSIASADMDFNQLEAFLTAQTKKQGGITSDQAAVISKFWKSHKTKIRESLMNQSRWNSGLRGLSWRVDGKSQSRHSAQIHTPVAIIELELGKYGQESEFLCLEFDEVKVNQILKTLSEVEESISTLISQPNPKKKRKVPKKKRKVPKKKRKV

SEQ ID NO: 243706 - DNA, 570 bp, Artificial Sequence
  derived and/or modified sequence
atggcggccggcgaacttgagggcggaaaacccttgtcaggacttttaaatgctctggctcaggacaccttccacggctacccgggcatcactgaggaactgttgcgaagccagctgtaccctgaagtgccccccgaggagtttagacccttccttgctaaaatgcgtgggatactaaagtccatcgcctccgcagacatggactttaatcaactcgaagcattccttactgcccagacaaagaaacagggaggaatcacttcagaccaggccgccgttatctctaagttctggaaatcgcacaaaacgaaaatcagagagtccttaatgaaccagtcaagatggaattcagggctcagaggtctaagttggcgcgtagatggcaaatctcagagtcggcactctgcgcaaattcatactccagtggcaatcatcgaactagagctggggaaatatggacaggagtccgaattcctttgcctggagtttgacgaggtcaaggtcaatcagatcctcaagacgctgagtgaagtcgaggagagcatctccaccctgatctctcagccaaat

SEQ ID NO: 243707 - DNA, 570 bp, Artificial Sequence
  derived and/or modified sequence
atggcggcgggagaactggaaggaggaaagcctctttcaggactgctgaacgcactggcacaggacacgttccacgggtatcccggtattaccgaggagcttctccggtcccagttgtaccctgaggtccctccagaggaattccgtccatttctggcaaagatgcgcggcattcttaagtcgatagcctccgcagacatggactttaaccaattggaggcctttcttaccgcacaaactaagaaacaaggaggtataacctcagaccaagcagcagtcatctcgaaattctggaaaagccacaagacgaagatcagagaatcgctgatgaatcagtcccggtggaattccggacttagaggtttgagctggagggtggatggtaagagtcagagcagacattcggcccagatccacactcctgtcgccatcattgaactcgaacttggcaagtacggtcaagaatcggaatttctgtgtctcgaatttgatgaggtgaaggtgaatcaaatcctcaaaaccctctccgaggtcgaggaaagtatatcgactcttatcagccaaccaaac

SEQ ID NO: 243708 - DNA, 570 bp, Artificial Sequence
  derived and/or modified sequence
atggctgctggggagctggaaggcggcaagccgctgagcggcctgctgaacgctctggctcaggatacctttcatggatatcctggtatcacggaagagctactgcgtagccagctgtaccctgaggtgccgccggaggaattccgcccattcctggcaaaaatgcgcggcattctgaaaagtatcgcgagcgctgacatggactttaatcagctagaagccttcctgaccgctcagaccaagaagcaaggcggtatcactagtgaccaagcagccgtcatttccaaattttggaaaagccacaagaccaagattcgcgagtcactgatgaatcaatcgcgttggaactcaggtctgcgcggtcttagctggcgcgtggacgggaaatctcaaagccgacactctgctcagattcataccccagtggcgattatcgagcttgaactgggcaaatacggtcaggaaagcgagttcctgtgcttggagtttgacgaggtgaaggtcaaccagattctaaaaactctgagcgaggttgaagagtccatctccactctgatttctcaaccgaac

SEQ ID NO: 243709 - DNA, 570 bp, Artificial Sequence
  derived and/or modified sequence
atggcagccggggagttggaaggcggaaagcctttaagcggactgctcaatgcgctagcccaggatacttttcacggctaccctggtatcacggaggagctgctccgtagccaactgtatccggaggttccgccggaggagttccgccctttcctggccaagatgcgcggcatcttaaaaagcatcgcctcagcagacatggacttcaaccagctggaggccttcttgaccgcgcagactaagaaacagggcgggatcactagcgatcaggccgcggtgatctctaagttttggaagtcgcacaagaccaagatccgtgagagtctgatgaaccagagcaggtggaactccggtcttcgcgggctaagctggagggtggacggcaagtcgcaatcccgtcattccgcccaaatacacacgcccgttgccattatcgagcttgagctgggtaagtatggtcaggagagcgagttcctgtgtttggagttcgacgaggtgaaggtcaatcagatcttgaagaccctttcagaagtcgaggagtctatttctacgctcatcagtcagcccaac

SEQ ID NO: 243710 - DNA, 570 bp, Artificial Sequence
  derived and/or modified sequence
atggcggcgggcgaactggaaggaggcaagcccttgtcgggactgcttaacgcgttggcacaagacactttccatggctatcctgggattaccgaagaactcctgcggtcccaattgtacccggaagtcccgccagaagagtttcgcccttttcttgccaagatgcgggggatactgaagtcaatcgcctctgcggacatggatttcaaccagctggaggcattcctcaccgcccagactaagaagcaaggtggtatcacgagtgatcaggctgctgtcatctcgaaattctggaaatcccacaaaaccaaaatcagagagtctctgatgaatcaaagtagatggaactcaggactcagagggctgtcatggcgggtggacggtaagagccagtctcgccactccgctcagatccatactccggtggctattatcgaactggagctgggaaaatacggccaggagtcagagttcctctgtcttgagttcgatgaggtgaaggtgaaccagatcctcaagactctttcagaagtcgaagagtcgatcagcaccctgatctcacaaccgaat

SEQ ID NO: 243711 - DNA, 570 bp, Artificial Sequence
  derived and/or modified sequence
atggccgccggggaactggaaggaggcaaacccctcagcgggctgctgaatgctctggcccaggataccttccatgggtaccccggtatcactgaagaactgcttcgctcgcagctgtacccagaggtcccccccgaagaatttaggccattcctcgccaaaatgcgagggatcctgaaaagcattgcctctgccgatatggacttcaaccagctggaagcttttctgacggcacaaacgaagaagcaaggcggtattacgtcagatcaggcggcagtcatcagcaagttttggaaaagccacaagacaaaaatccgcgaatcactgatgaaccagtccagatggaattctggcctaaggggacttagttggagagtagatgggaaaagccagtcaagacacagtgcacagattcacacccctgttgctatcatagagctggaacttggtaagtatggtcaggagagcgagttcctttgcctggagttcgatgaagtgaaggtgaaccagatcctgaagacgctgtctgaggtggaagagagcattagtacattgatcagccagccaaac

SEQ ID NO: 243712 - DNA, 570 bp, Artificial Sequence
  derived and/or modified sequence
atggcggcaggtgaactggaaggcgggaagccacttagcggactgcttaacgccctggcgcaggataccttccatggataccccggaataaccgaagaacttctccgcagccaactgtacccggaggtgccccctgaagaattccggccgttccttgcaaagatgcggggaatcttgaagtccatcgcctcggcagatatggatttcaaccagctggaagcattcctgaccgcacagacgaagaagcagggaggaattacttcggatcaagcggcggtgatttcgaagttctggaaatcccacaagaccaagatcagggaaagccttatgaaccaatcgagatggaatagtggactcagaggactttcgtggagagtggacgggaagtcccagtcacgccattcggcacagatacacactcctgtcgctatcatagagcttgaacttggaaaatacggtcaggagagcgaatttctttgcctggagtttgatgaagtgaaggtcaaccagattctcaagaccctgagcgaggtcgaagaaagcatcagcactctgatttcccaacctaat

SEQ ID NO: 243713 - DNA, 570 bp, Artificial Sequence
  derived and/or modified sequence
atggccgcaggtgagctggagggaggaaagcctctgtcaggacttctgaatgcgctggcgcaggatacctttcacggctatccaggaattactgaggagctgcttcggtcgcaactgtaccctgaagtgcccccagaagaatttagaccttttcttgcaaagatgagaggtattctgaaatcaattgcctctgcagatatggactttaatcaactggaagccttcctcaccgctcagacgaagaaacagggaggcattacgagcgatcaggcagcagtgattagtaaattctggaagtcgcataagaccaaaattcgcgagtctctcatgaaccagagcagatggaactccggacttcggggactctcctggcgggtcgacggtaaatcgcagtcgcgccacagcgcacaaatccatactcctgtggcaatcatagaactggaactcggaaagtacgggcaggaatcagaattcttgtgccttgaatttgacgaagtcaaagtgaatcaaatcctcaagaccctctcggaggtggaagaatctatctcaactctgattagccagccgaat

SEQ ID NO: 243714 - DNA, 570 bp, Artificial Sequence
  derived and/or modified sequence
atggccgccggggaactggagggcggcaaaccactgagtggtcttttgaatgccctggcacaggatacgttccatggttaccccggcattacagaggagctgcttcgtagccagctgtaccccgaggtgccaccagaggaattccggccattcctcgctaagatgagagggatccttaaaagcatcgcatccgctgatatggatttcaaccagctggaagcttttctgaccgcacagacaaagaagcagggcggcattacgagtgatcaagccgccgtgatttccaagttttggaagtctcataaaacaaaaatacgagagagtctgatgaaccaaagcagatggaattccggcctccgagggttatcatggcgtgttgatggcaaaagtcagagccgccactccgctcagatccatactccagtcgccattattgagttagaactaggtaaatacggtcaggaatctgaatttctatgcctggaattcgacgaagtgaaggtaaaccaaatactcaaaaccctgagcgaagtcgaagagagcatatctacgcttatctcgcaacccaat

SEQ ID NO: 243715 - DNA, 570 bp, Artificial Sequence
  derived and/or modified sequence
atggcggcgggagagctggaaggaggcaagccgctgagcggactcttgaacgccctggcccaagacaccttccacggatacccggggattactgaggaacttctgagatcgcaactctacccggaggtgcctcctgaagaattccgcccattccttgctaagatgcgcggcatcctgaagtcaatcgcatccgccgatatggactttaaccagctcgaggcatttctcactgcgcaaaccaaaaaacaggggggaatcacgtctgatcaagccgccgtgatctcgaagttctggaagtcccacaagactaaaatcagagagagtttgatgaatcagtcacgatggaactcgggattgcggggcctgtcctggagggttgacggtaagtcccagtcgcggcattcagcacagattcatactcccgtcgctatcatcgaactggagctgggtaagtacggacaggaaagcgagttcctctgcctggaattcgacgaagtgaaagtcaatcagatcctcaagaccctgtcggaagtggaggaatccatcagcaccctgattagccagccaaac

SEQ ID NO: 243716 - DNA, 570 bp, Artificial Sequence
  derived and/or modified sequence
atggcagcaggcgagttagaaggcggtaaacccctgtcaggtctactaaacgcactcgcacaagatacatttcatggctacccaggtattacagaggaattgctcaggtcacagctgtatcccgaagtgccacctgaggaattccgaccattcctggctaaaatgcgcggaattctgaagtctattgcctctgccgacatggactttaatcagctggaggcctttctgaccgctcagactaagaagcaggggggcataacttctgaccaggccgcagttatatcaaaattctggaagtctcacaaaactaagatccgcgaatcactgatgaatcagagccgctggaacagcggtctgagagggctgtcctggcgtgttgatggaaaaagccagagtcgccatagcgcacagattcacacccctgtcgcaatcatcgaactcgagctgggcaaatatggccaagaatctgagttcctgtgtttagagtttgatgaggtgaaggttaaccagattcttaagacactgtccgaggtggaagaatctatttctactcttatttcccagcctaac

SEQ ID NO: 243717 - DNA, 570 bp, Artificial Sequence
  derived and/or modified sequence
atggcggcgggagaactggagggtggaaagccgttgagcggactgctgaacgcactcgcgcaagacactttccatggatacccaggcatcaccgaagagctgcttcgctcccagttgtacccggaggtgccgccggaggagttcaggccgttcctcgctaagatgagaggaattctcaagagcatcgcttcggcagatatggatttcaatcaactggaagcattcctcaccgcgcagaccaagaagcaaggagggatcacgtcggaccaggccgccgtgatctcgaagttttggaagtcccacaagaccaagatccgcgagtcgctgatgaaccagtcccgctggaactcgggcctgagaggactgtcttggcgcgtggatggtaagtcccaatcccggcattcagcccaaatccatacccccgtcgccatcatcgagttggagctgggaaaatacggccaggaaagcgagtttctgtgtctggagttcgatgaagtgaaggtgaaccaaattcttaagaccctgtccgaagtggaggaatcgatctcgaccctgatttcacaaccgaat

SEQ ID NO: 243718 - DNA, 570 bp, Artificial Sequence
  derived and/or modified sequence
atggcagctggggaattggagggaggcaagcccttgagcgggctgctgaatgctttagcgcaggacacgttccatggttatccgggaatcaccgaggaattgctgagatcccaattgtacccagaggttcctcctgaggagttcagacccttcttggcgaagatgcgtggaatcctgaaatcaatcgcctccgcagacatggatttcaatcagctggaagccttcctgactgcccaaaccaaaaaacagggcgggatcacaagtgaccaggccgcggtcatcagcaagttttggaaatctcataagacgaaaatccgcgagagcctgatgaatcagtccagatggaacagcggtctcagaggactgtcatggagggtggatggcaagtcccagtcaagacattccgcacaaatccacaccccggtggctataattgagttggagctcggaaagtacggtcaggaatccgagtttctgtgtctcgaatttgatgaggttaaagtgaaccagatcttgaaaacgctgagtgaagtcgaagagagtatcagcacgttgattagccagccaaac

SEQ ID NO: 243719 - DNA, 570 bp, Artificial Sequence
  derived and/or modified sequence
atggctgctggtgagctcgaggggggtaagcctttgagcggtctactgaacgccttggctcaggacacctttcatgggtaccctggcatcacagaagaactgcttcgatctcagctatacccggaagtacccccagaagagttcaggccatttcttgccaagatgagggggattttgaagtcaatcgcatcagccgacatggactttaatcagttagaagccttcctcacagcccaaactaagaagcagggggggattacaagtgatcaggccgcggtgatcagcaaattctggaagtcacataaaaccaagatcagggagtcactgatgaaccaatcgcgttggaactccggactgaggggactctcctggagggtggatggaaaatcccaatcccgccattccgctcaaatccatactcctgtggcgattatcgagttggagcttgggaaatacggacaggagtccgagttcctttgtctcgagttcgatgaagtgaaggttaatcagatactgaagacgctcagtgaggtggaagagtctataagtaccttaatcagtcagccaaac

SEQ ID NO: 243720 - DNA, 570 bp, Artificial Sequence
  derived and/or modified sequence
atggccgccggggagctggagggggggaaacccttgtctggactgctcaatgctttggctcaggatacattccatggatatcccgggatcacagaggagctcctgaggtcacagctttaccccgaagtgccaccagaggaattcagacctttccttgcgaagatgaggggaatactcaagagtattgcctccgccgatatggatttcaaccagctcgaagcattcttgacagcgcaaacaaagaaacagggaggaatcacatcagatcaagcagccgttatctccaagttctggaaatcacacaaaacaaaaataagagaatcccttatgaatcagagtagatggaattccgggcttcgaggacttagttggcgagtcgacggaaagtcacaaagtaggcattcagcacagatacacactccagtagctatcatagaactggaactcgggaaatatgggcaggaaagtgaatttttatgcttagaattcgatgaagtcaaagtcaatcagatactgaaaacactatctgaagtcgaagagtcaatctccactctgattagtcagcccaac

SEQ ID NO: 243721 - DNA, 570 bp, Artificial Sequence
  derived and/or modified sequence
atggcggccggagagctcgagggtggaaaacccctttccggactcctcaatgcactggcgcaagatacttttcatggatacccaggaattacggaagaactgcttcgatctcagttgtaccctgaagttccaccggaggaatttaggccattcttggcgaagatgcgtgggattttgaaatcgattgcctctgcggacatggacttcaatcaattggaagcatttctcaccgcacaaacgaaaaaacaaggaggaatcacgagcgatcaagcagcagtcattagtaaattttggaaatctcacaaaacaaaaattagggaaagtttgatgaatcaatcacgatggaacagcggattgcgaggtctgagttggagagtcgatggaaaatctcagagccgtcattccgcacaaatacatacaccggtggccatcattgaacttgaactgggtaaatatggacaagagagtgaatttctttgtttggagttcgatgaagttaaggtgaaccagatcttgaagacgcttagtgaggtggaagaatctattagcaccttaatcagtcagccgaat

SEQ ID NO: 243722 - DNA, 570 bp, Artificial Sequence
  derived and/or modified sequence
atggctgctggcgagcttgagggagggaagcctctgtccggacttctaaacgcgctggcgcaagataccttccatggatatcccggtatcacagaggaactgctacgatctcaactttacccggaagtgccgcccgaggagttcaggccctttctggcgaagatgagaggaatactgaaaagtatcgcatcggcggatatggactttaatcagctggaagcgttcttgacggcgcagactaaaaagcagggcggtattacttcggatcaggccgccgtaatctcaaaattctggaaatcacataaaacaaagatcagagaaagtctgatgaaccagtcacggtggaatagtggcctacgaggtctctcatggcgtgttgatgggaagtcacagtcgcgccattccgcccagatccacacacctgtcgcaattatcgagctagaactgggcaagtatggacaggaatcagagttcctctgcctcgaattcgacgaggttaaagtgaatcagatcctcaaaactctgtcagaagtagaggagtcaatcagcaccctgatttcgcagccgaat

SEQ ID NO: 243723 - DNA, 570 bp, Artificial Sequence
  derived and/or modified sequence
atggccgcaggagagctggaggggggaaagccgctctcggggctcctcaatgctctcgcccaggatacctttcatggttacccgggaattactgaggaactgctgagatcccagctctacccggaggtcccaccagaggaatttcggccattcctggccaagatgcgcgggatcctgaagtcaatcgcctcggcagacatggatttcaaccagctggaggcgttcctgactgcccagaccaagaagcagggaggaatcactagcgatcaagcagccgtcatctccaagttttggaaatcacacaagactaagatccgcgagtccctcatgaatcaatccagatggaactcgggtttgcgcggattgtcgtggagggtcgacggaaagtcacaatcgcggcattccgctcagatccacaccccggtggccatcatcgaactggaactgggaaagtatggacaagagtccgagttcctgtgcctggaattcgacgaggtcaaggtgaatcagatccttaagaccctgtccgaagtggaagaatctatctcgaccctgatttcacagcctaac

SEQ ID NO: 243724 - DNA, 570 bp, Artificial Sequence
  derived and/or modified sequence
atggcagcgggggaactcgaaggcgggaagccattgagtggtttactaaatgcactagctcaagacacctttcacggctatcccggtataaccgaggagttgctaaggagccaactatatcccgaggtgccccccgaagaattcaggccattcctcgcgaaaatgcggggtatcctgaaatcgatagcatcggctgatatggactttaatcagttggaagcgttcctaactgcgcagacaaagaagcagggtggcatcacttcggatcaggctgctgtgatttcaaagttttggaaatcacacaagacgaagattagagagtcactgatgaatcagagccgttggaattccggactgcgtgggctgtcctggcgcgtcgacgggaagtctcagagtaggcactccgcacagattcataccccagtggcaatcattgagcttgagctcggcaaatacggccaggagagcgaattcttatgtctcgaatttgatgaagtgaaagtgaaccagatactgaagaccctctcagaggtagaagaaagcatctccacactgatttctcaacccaac

SEQ ID NO: 243725 - DNA, 570 bp, Artificial Sequence
  derived and/or modified sequence
atggctgccggcgagctggaaggtggaaagccgttgagcggccttctcaacgcactggcccaagacaccttccatggataccccggtatcactgaagaactgctgcggagccagctgtaccccgaagtgccacccgaggagttcagaccgttcctcgccaaaatgagaggcatcctcaaatcgatcgctagcgcagatatggatttcaatcaactcgaggcgttcctgactgcacaaactaagaagcaaggaggaatcacctcggaccaagccgctgtcatctccaagttctggaaaagccacaagactaaaatcagagaaagcctcatgaaccagtcacggtggaactcgggactccgcggactgtcatggcgcgtggacgggaagtctcagtcacgccactcggcacaaatccacacccctgtggccatcatcgagctggagctcgggaagtacggacaggagtcggagtttctctgcctggaattcgatgaagtgaaggtgaatcagatcctcaagactctgtccgaggtcgaggaatcgatcagcaccctcatctcgcagcccaac

SEQ ID NO: 243726 - DNA, 570 bp, Artificial Sequence
  derived and/or modified sequence
atggccgcaggagagctggaaggaggtaaacctctgagcggtctgctgaatgctctggcgcaggataccttccatggttaccctggaattactgaagaactgcttcgctcacaactgtacccagaagttccaccagaggagttcagaccatttctcgcaaagatgagagggatcttgaagtcgattgcgtccgcagatatggatttcaatcaacttgaagcgtttctcaccgcacagacgaaaaaacaggggggcattacttcagatcaggcagcagtaatctcgaagttttggaagagccataagactaagattcgcgaaagcctcatgaaccagtcgaggtggaactcaggacttcgaggtctgtcgtggcgcgtcgatggaaaaagccagagccgacattcagcccaaattcacactccggtcgcaatcatcgaactggaattgggtaagtacgggcaagaatccgaatttctctgtcttgaatttgacgaggtgaaggtgaaccagatccttaagacgctctcagaggtggaagaatctatttcgaccctgatttcccagcccaac

SEQ ID NO: 243727 - DNA, 570 bp, Artificial Sequence
  derived and/or modified sequence
atggccgcgggtgaactcgagggcgggaagcctctttcaggactgcttaacgctctggcacaagatactttccacgggtacccgggcattaccgaggaactgcttcgttcgcaactgtaccccgaggtgcctcctgaagagtttcgcccttttctggctaagatgagggggatcctgaagtcgatcgcgagcgccgacatggatttcaatcagctggaggcatttctgaccgcgcaaactaagaagcagggagggattacctccgatcaggctgcggtcatctctaaattctggaagtcccataaaaccaaaattcgggaatcactgatgaatcagtcgagatggaattccggactgcggggactcagctggcgtgtggatggcaagtcccaatcaaggcattcggcacagatccatacccccgtcgccattatagagcttgagttgggaaaatacggtcaggagtcggaatttctgtgcctggaatttgatgaggtgaaggtgaaccagattcttaagacgctgtcagaagtggaagaatcgatatctactttgatttcccaacctaat

SEQ ID NO: 243728 - DNA, 570 bp, Artificial Sequence
  derived and/or modified sequence
atggcagccggtgagctagagggtgggaagcctctgagtgggcttctgaatgcccttgctcaggacactttccacggatatcccgggattaccgaggagctcctccgatcgcagctgtatcccgaggtgccaccagaggagttccgtccttttctggcaaaaatgcgtggcatcctgaagagcattgcctcagcagatatggacttcaaccagctcgaggcttttctgacagcacagacaaaaaaacaggggggcataacgagtgatcaggctgccgtaatttccaaattctggaagagtcacaagaccaaaatccgagagagcctaatgaaccagagtcgatggaactcaggcttaagaggcctgtcatggcgagttgacggtaaaagccagtcaaggcacagcgcacagatccatacccccgtagcgataatcgagctggaactcgggaagtacgggcaggagagtgagttcctgtgtctcgagtttgatgaagtgaaagtgaaccaaatactcaaaactctgagcgaagtggaagaatctatctctacgctgatctctcagcctaac

SEQ ID NO: 243729 - DNA, 570 bp, Artificial Sequence
  derived and/or modified sequence
atggccgccggtgagctcgagggaggcaagcctttgagcggcctgctgaatgctttagcgcaggatacattccacggctacccaggcatcaccgaagagctgctacgttcccagctgtaccccgaggtgccgccggaggagtttcgcccctttttggccaagatgcggggcatcttgaagtccatcgcgagcgccgacatggatttcaaccagctagaggccttcctcactgcccagacgaagaagcagggcggcataacaagcgaccaggctgccgtgatttctaaattctggaagtctcataagacaaaaatccgggagtccctaatgaatcaatccaggtggaactcggggcttcgcggtctctcttggcgagtggatggcaagtcacagagcaggcattcggcccagatacacacgcccgtggctatcatcgagctggagctgggtaagtacggccaggagagcgagttcctttgcctggagtttgacgaggtaaaggtgaatcaaatcttgaaaacgttgtccgaagtggaagagtctatctccacgctgattagccaacctaac

SEQ ID NO: 243730 - DNA, 570 bp, Artificial Sequence
  derived and/or modified sequence
atggccgccggcgaactggaaggggggaagccactgtcgggtctgctgaatgcccttgcgcaggacacctttcacggataccccggaatcaccgaagaattgctgcgttcgcagttgtacccggaagtgccgccagaggagttccgaccgttcctggcaaagatgcgggggatcctcaaatccatcgcctccgcggacatggatttcaaccagctggaggctttcctgaccgctcaaactaagaaacagggaggtattacgtcggatcaagcagctgttatctccaaattctggaaaagccataagaccaagatcagagagtccctcatgaaccaatcgcgctggaacagcggactgcgcggtctgagctggcgggtggatggaaagtctcaatccagacactccgcgcagattcacactcccgtcgcgatcatcgaactcgaactgggaaaatacggacaggaatcggaattcctttgcctggaattcgatgaggtgaaggtcaaccagatcctgaaaaccctgagcgaagtggaagagtctatctcgaccctgatctcccagcctaac

SEQ ID NO: 243731 - DNA, 570 bp, Artificial Sequence
  derived and/or modified sequence
atggctgccggagagctggaaggaggcaaacccttgagcggcctgttaaacgctttagcccaggatacattccacgggtatccaggcatcacggaggagctgctcaggagccagctttatcccgaggtacccccagaggaattccgaccattcctagccaagatgcgggggatcctcaagagcatagcctccgccgacatggattttaatcagctagaggccttcttgacagcccaaaccaagaaacagggtggtatcaccagtgatcaagccgccgtcattagcaagttttggaaatcccacaagacaaagatcagggaatccctgatgaatcagtccaggtggaactctgggcttaggggacttagctggagagttgacggaaaatcccagtctcggcattctgcccagatccacacacccgtggcaatcatcgagctagaattggggaagtacggacaggaatctgaattcctatgcttagaattcgacgaggtgaaagtaaaccagattctgaagaccctatccgaagttgaggagtccatctccaccctgatcagccagccgaac

SEQ ID NO: 243732 - DNA, 570 bp, Artificial Sequence
  derived and/or modified sequence
atggccgcaggagagctggaaggaggaaagcccctttcgggattactcaacgctctggcccaggacaccttccacggttaccctggcattaccgaggaactccttcgtagccagctgtacccagaggtgccgcccgaggagttcagaccctttctggccaaaatgagagggatcctcaaatcaatcgccagcgctgacatggacttcaaccaactggaggcatttctcaccgcccagactaaaaaacagggcgggatcactagtgatcaggctgccgtcatatcgaagttctggaagagccataagactaaaattagagagtctctgatgaatcagagccgttggaattccggactccgcgggctctcctggagggtggatggtaagagtcagtcccgtcactccgctcagatccacactccagtcgccatcattgaattggagcttggcaagtatgggcaggagtctgaattcttatgcctggagttcgatgaggtgaaggtgaaccagattctgaagaccctgagtgaggtcgaggaaagcatatcaaccctcatctcacagccaaat

SEQ ID NO: 243733 - DNA, 570 bp, Artificial Sequence
  derived and/or modified sequence
atggcggcaggcgagctggagggaggaaagccactgtccggtcttttaaatgcacttgctcaggatacctttcacggataccctgggatcaccgaggagttgctccggagccagctttaccccgaggtcccgcccgaagaatttaggcctttcctcgcaaagatgagagggatacttaaatctattgcttcggcagacatggactttaaccaattggaagccttcctcaccgctcaaacaaaaaagcaggggggcatcacaagcgatcaggccgccgtcatttctaagttctggaaaagccataaaactaagatccgtgaatcgctcatgaaccagtcaaggtggaacagcggcctgcgcgggctttcttggcgtgtggacggaaaaagccagtcaagacatagcgctcaaatccatactccagttgctatcatcgaattagaattgggcaaatacggccaagaatcagagttcctgtgcctggaatttgacgaggtgaaagtgaaccaaatcttaaagacactgagtgaggtggaggagtccatcagcactctgatctcgcaaccaaac

SEQ ID NO: 243734 - DNA, 570 bp, Artificial Sequence
  derived and/or modified sequence
atggccgctggagagcttgaaggaggcaagcccttgtctggtctgttgaacgctctggcacaagatacctttcatgggtaccccggaatcaccgaagaactgctaaggagtcagctctaccccgaggtgcctcccgaggagttcaggccttttctggcgaagatgaggggtatactgaaatccattgcctctgcagacatggacttcaaccaactggaggcatttctgaccgcacaaacaaagaaacagggtggaattacatcagatcaagccgctgtcatttccaaattttggaagtcacacaaaactaaaatcagggaaagcctgatgaaccaatccaggtggaactctggtttgcgcggcttgtcatggagggtcgatggtaagagccaaagcaggcacagtgcccaaatccatactcctgtggctatcatcgaactggagctgggaaagtatggacaggaaagcgagttcctttgcctggagtttgacgaggtgaaggtgaaccaaattctgaagaccctgagcgaggtggaagagagtatctccacactgatcagccagcctaac

SEQ ID NO: 243735 - DNA, 570 bp, Artificial Sequence
  derived and/or modified sequence
atggcggcaggtgaacttgagggtggaaagcccctttccggcttgctgaacgcccttgcacaagataccttccacggataccctgggattacggaggaactgctccggagccaactgtatcccgaagtgccacctgaagaatttcgaccttttcttgccaaaatgaggggtattctgaaatcgatcgcatccgccgatatggactttaaccagctggaggcatttctcactgcacagaccaagaaacaggggggaattacgtcggatcaagcagcggtgatctccaagttctggaagagccacaaaaccaagatcagggaaagccttatgaatcaatcccgctggaacagcggattgcgcggcctcagctggcgggtcgacggaaaatcgcaatcgcggcattcggcacagatccacacgccggtggcgatcatcgaacttgaacttggtaaatacggacaagagtcggagtttctgtgcctggaattcgacgaggtcaaggtgaatcaaattctcaagaccctttccgaagtggaggaatccatatccacccttatctcccaaccaaat

SEQ ID NO: 243736 - DNA, 570 bp, Artificial Sequence
  derived and/or modified sequence
atggctgctggagaattggaaggtggtaagccactgtcaggactgctgaacgccttggcccaggacacattccacgggtacccaggcatcaccgaagagctcctgaggagccaactttaccctgaggtgccgcccgaggaatttcgcccattcctagccaagatgagaggaatccttaagtcaatcgcaagcgccgatatggacttcaatcaactggaggcctttctgactgcacaaactaagaagcagggcggtataacatccgaccaggccgccgtgatctccaaattctggaaaagtcataaaaccaagattcgtgaatctcttatgaaccagtctagatggaatagtgggcttaggggactctcttggcgagtagatggcaaatcccagagtagacatagtgcacagatacacacccctgtggctataatcgaactggagctgggaaaatacggacaggagagcgagttcttgtgcctagaatttgatgaagtgaaagtcaaccagattctgaaaacccttagcgaggtggaagaatcaattagcaccttgatcagccagcccaat

SEQ ID NO: 243737 - DNA, 570 bp, Artificial Sequence
  derived and/or modified sequence
atggctgccggcgagctggagggtgggaaacccctaagtgggttgctgaacgcgctggcccaggacacttttcacggctaccccggaatcacagaagagctgcttaggagccagttgtacccagaagtacccccagaggaatttcgacccttcttggctaaaatgcggggcatactgaaaagcatagcttccgctgatatggatttcaaccagctcgaggcctttctaactgcgcagactaagaagcagggcggcattacctctgatcaggcagccgtaatcagtaagttttggaaatctcacaaaaccaaaatccgcgaaagtctgatgaatcagtcacgttggaactcaggactccgcggcctgtcatggagagtggacgggaagagtcagtccagacacagcgcacagatccacaccccagttgctattatagaactggagctgggaaaatacggccaggagtctgaatttctgtgtcttgaattcgacgaggttaaggtgaaccagattctcaaaaccctctccgaagtcgaggaatcaattagcacactgatctcccagcctaac

SEQ ID NO: 243738 - DNA, 570 bp, Artificial Sequence
  derived and/or modified sequence
atggctgccggtgagttagaaggcggcaaacccctgtcgggattgttgaatgccctcgcccaggatacgtttcacgggtatccagggattacagaggaactcctcaggagccagctatatcctgaagtgccccccgaggagtttcgacctttcctggctaaaatgcggggcatacttaagtctattgcgtcggccgatatggactttaatcagctggaggcatttcttacagcgcagaccaagaagcagggtggtatcacgagtgatcaggctgcggtcatttctaagttctggaaaagtcacaagaccaagatcagggaatctctcatgaaccaaagtaggtggaacagcgggctgcgggggctgtcctggcgggtagacggtaagtcccagtccaggcatagtgcgcagattcatactccagtcgccattattgaactggagctggggaaatatggacaggagagcgaatttctttgcctggaattcgacgaggtgaaagtgaatcagattctaaaaacactctcagaggtggaagaatccatctccaccctcattagccagcccaac

SEQ ID NO: 243739 - DNA, 570 bp, Artificial Sequence
  derived and/or modified sequence
atggcggctggggagttggaggggggaaaacctctgtctggccttttgaatgccttggctcaagatacattccatgggtacccgggaattactgaagaacttctacggagtcaactttaccccgaagtgcctcctgaagaatttagaccttttttggctaaaatgcgaggaattttgaagtctatagcaagtgcagatatggattttaaccagttggaggcatttcttactgcacagacgaagaaacagggtggtattacaagcgatcaggccgccgtcatctcaaaattttggaaatcgcataagactaaaatacgagagtccctaatgaatcaaagtagatggaattctggtctgcgtggattatcttggagggtggatggtaagtctcagagtcgtcatagtgctcaaattcatacccctgttgccattatagaacttgagttgggaaagtacggtcaagagagcgagtttctttgtctcgaattcgatgaggtcaaagtcaatcagatacttaaaacattatctgaggtcgaggagtctatctccactctaatttcacaacccaac

SEQ ID NO: 243740 - DNA, 570 bp, Artificial Sequence
  derived and/or modified sequence
atggccgccggcgagctggagggtggcaagcctctgtcagggctgctcaacgctctggcccaggataccttccacggctaccccggaattactgaggaactgctgcgctctcagctatatccagaggttcccccagaggagtttagacccttcctggccaagatgcgcggaatcctaaagtctattgcgtcagcagacatggacttcaaccagctggaggcttttcttaccgcccagacaaagaagcagggcgggatcacatcggatcaagccgccgttattagtaaattttggaaaagccacaagaccaaaattcgcgagagcctgatgaatcagagcagatggaactcaggcctgcgcggcttatcctggcgcgtggacgggaaaagccagtcgagacactctgcgcagatacacacgcctgtggcaattatcgaattagaactggggaaatacggccaggagtccgaatttttgtgtctagaattcgatgaagtaaaagtcaatcagattctcaaaacactgtctgaagttgaagagagcatatctacactgatctcacagccgaat

SEQ ID NO: 243741 - DNA, 570 bp, Artificial Sequence
  derived and/or modified sequence
atggcagctggagagctagaaggaggcaagccactgtccgggctgttgaatgcactcgcccaagatacctttcacggctaccccggcattaccgaagaactccttaggtctcagctctacccagaagtccctcctgaggaattccgcccttttctggctaagatgaggggtatactcaagagcatagcatctgcagatatggacttcaaccagttagaagccttcctcacggctcaaacaaaaaaacagggtggtatcacgtcagaccaagccgccgttatttccaagttctggaagtctcacaagactaaaatcagagaatctttgatgaatcaatctcgctggaattctgggttgagaggtctgtcatggcgcgtggatggcaagtctcagagtcgtcattctgcccagattcacaccccagtggccataatcgagcttgagcttgggaagtatggtcaagagtctgaattcctgtgcctggagtttgatgaggtgaaagtcaatcagatcctcaagactctttctgaggtggaagagagtataagcaccctgatctcccagcccaac

SEQ ID NO: 243742 - DNA, 570 bp, Artificial Sequence
  derived and/or modified sequence
atggcagcgggagagctagagggcggcaagcctctttcaggcctgctgaatgctctggcccaggacacttttcacgggtaccctgggatcacggaggaattactgaggtctcaactgtacccggaggtaccgcccgaggaattcaggccatttcttgcgaaaatgaggggtatcttaaaatccatcgccagtgcagacatggatttcaatcagctggaagccttcctcactgctcaaactaaaaagcagggtggaatcacaagcgatcaggcagccgtgatctctaagttctggaagtcccataagacgaagatacgcgaatcactgatgaatcagtccagatggaactccggcctgagaggattgtcctggagagtggatggaaagtcccagtcccgccactctgcccagatccacaccccggtggccatcatcgagctggaactggggaagtacggtcaggaatccgagtttctttgtcttgagtttgacgaggttaaagtgaatcagattctcaaaacgctgtctgaagtggaagagtctatctctactctaattagtcaaccaaat

SEQ ID NO: 243743 - DNA, 570 bp, Artificial Sequence
  derived and/or modified sequence
atggccgcgggagaactggaaggcggcaagccgctctccggactcctgaacgccctggcacaagacactttccacgggtaccctgggatcactgaggaactgctgcgctcacagctctacccggaggtccctccagaagagttcagaccgttcctggcgaaaatgcgcggaatcctcaagtcaatcgcgagcgctgatatggattttaaccaactggaagccttcttgaccgcccaaaccaagaagcagggcgggatcacgagcgaccaagcggcggtcatctcgaagttctggaagtcgcacaagaccaagatcagggaaagcctgatgaaccagtcccgctggaactcgggactccgcggcttgtcgtggcgcgtggatggaaagtcgcagtcgcgccacagcgcccagatccacaccccagtggcgatcatcgagctcgaattgggtaagtacggacaagaatccgaattcctgtgcctggagttcgacgaagtgaaagtgaaccagatcctcaagacgctgtcggaggtggaggaatcaatcagcaccctgatctcgcagccgaat

SEQ ID NO: 243744 - DNA, 570 bp, Artificial Sequence
  derived and/or modified sequence
atggctgctggagaactggaaggcggcaagccactgagcggtctcctcaacgccctggcccaggacacctttcacggctatcccggcatcaccgaggaacttctgaggtcccagctgtatccagaagtgccacctgaggaattccgtccttttctggctaagatgagaggaatcttgaagagtatcgcctccgcagatatggacttcaaccagcttgaggccttcttgactgcccagaccaagaagcagggcggtataaccagcgaccaggccgcagtgatctctaagttctggaagagccataagactaagatacgtgagtccttgatgaaccagtctcgctggaatagtggtctgaggggattgtcctggcgtgtggacggaaagagccagtcaagacacagtgctcagatccatacaccagtggccattattgaattggagctgggcaagtacggccaagagtctgaatttctgtgccttgagtttgacgaggtaaaagtgaatcagatcctcaagaccctgagtgaagtcgaagaaagcatcagtaccctgatctcccagccaaac

SEQ ID NO: 243745 - DNA, 570 bp, Artificial Sequence
  derived and/or modified sequence
atggccgcaggtgagctggaaggcggcaagccactctccggtcttctgaacgcgctggcccaagacaccttccacggttaccccggcatcactgaagagcttttgaggtctcaactttacccagaagtgcccccagaggaatttaggccattcctcgccaagatgagaggtattctgaagagcatcgcctctgccgacatggacttcaaccagcttgaggcattccttaccgctcagactaaaaaacaaggaggaatcacatcagaccaggccgctgtcatatctaagttttggaaatcacacaagactaaaatacgcgaatcactgatgaaccagagccgctggaattcaggcctgcgcggactctcatggagagtggacggtaaatcccagagtagacactctgctcaaattcacactcctgtggccatcatcgaactggagcttggtaagtacggtcaagagagcgagttcctgtgcctcgaatttgacgaggtgaaagtcaatcaaattctgaagactctgtccgaagtggaagagagcatttccaccctgatctctcagcctaac

SEQ ID NO: 243746 - DNA, 570 bp, Artificial Sequence
  derived and/or modified sequence
atggctgcaggtgagctggaaggcggtaagcctctgtcgggactcctgaatgccctcgcccaggacaccttccacggctaccccggcatcaccgaggagctgctcagatcccagctttacccggaggtgcctccggaagagttcagaccattcctggccaagatgagagggatcttgaaatccatcgcgagcgcggatatggactttaaccaactcgaagcctttctcactgcacagaccaagaagcagggcggcatcaccagcgatcaagcggccgtgatctcaaaattctggaagtcccataagaccaaaatccgcgagtcgcttatgaatcaatcgcgctggaactccggcctgcgaggactgtcttggcgggtcgacggtaagtcccagtcaagacactcagcgcaaatacataccccagtagcaatcatcgagctcgagttgggaaagtatggtcaggaatcggaattcctgtgcctggaattcgacgaggtcaaggtgaatcagatcctcaaaactctgtccgaagtggaagaatcaatttcgactctgatcagccagccgaac

SEQ ID NO: 243747 - DNA, 570 bp, Artificial Sequence
  derived and/or modified sequence
atggccgcgggtgagttagaaggaggtaagccactgtcagggctactgaatgcgctggcccaggacacctttcacgggtatcccggtatcacagaggaattgcttcggtcccagttgtatcccgaagtgccacccgaagaattcaggccattcctagctaagatgaggggaattctgaaaagtatcgcttctgccgacatggattttaaccagctggaagcattcctcaccgcacagacaaagaagcaaggtggaattacatctgaccaagcagccgtaataagtaagttctggaaatctcacaagacaaaaatcagggagtccctaatgaatcagtcacgatggaatagcggactgcgcggcttatcctggagggttgatggaaaatcccagtctaggcattctgctcagattcacactcctgtggcgattatcgagctggagctgggcaagtacggtcaggaaagtgagttcctctgtttggaattcgatgaggtcaaagtgaatcagatcctgaagaccctcagcgaggtggaggaaagcatatctaccctaatctcccagcctaac

SEQ ID NO: 243748 - DNA, 570 bp, Artificial Sequence
  derived and/or modified sequence
atggcagccggtgaactggaaggcggcaagccgttgtcgggtctgttgaacgcccttgcacaggatacctttcatggttacccaggaataaccgaggaactgctgagatcccaattgtaccccgaggtccctccagaggaattccgcccttttctggcaaagatgcggggcatactgaaatcgatcgcatcggctgatatggatttcaaccaactggaagccttccttaccgcccaaactaagaagcaagggggtatcactagcgaccaggcagcggtgatctctaagttttggaaatcccataaaaccaagattagggaaagcctcatgaaccagtcacgatggaactccggactgcgtggactgagctggcgtgtggacggtaaatcccaatcgagacactctgcacaaatacatactcctgttgctattatcgaattggaactcggaaagtacggccaagagtcagaatttctgtgtctcgaattcgatgaagtgaaggtgaatcaaattctcaaaacgctttccgaggtggaagaatcaattagcacccttatctcccaacctaac

SEQ ID NO: 243749 - DNA, 570 bp, Artificial Sequence
  derived and/or modified sequence
atggctgcaggagaactggaaggtgggaagcctctctcgggacttctcaacgcattggcacaagatacctttcacggatacccaggaattactgaggaacttcttagatcgcaactctatcccgaagtcccacccgaggagttccggccgttccttgccaagatgcgtgggattctgaagtcgattgcatcggcagacatggactttaatcaactggaggcctttctcactgcgcagactaaaaagcagggtgggataaccagcgaccaagccgctgtgatttcaaagttctggaaatcgcataaaactaagatccgagaatcgctcatgaaccaatcgcgatggaactccggccttcgcggtcttagctggagagtggatgggaagtcacagtcgagacattcagcacagatccatacgcctgtggcaattatcgagctggaacttggcaagtacgggcaggagagcgaattcctgtgccttgaatttgatgaggtcaaagtgaaccagatccttaagaccctttccgaggtggaagaatcaatcagcaccctgataagccaaccgaac

SEQ ID NO: 243750 - DNA, 570 bp, Artificial Sequence
  derived and/or modified sequence
atggctgcaggcgagctagaaggagggaaacccctatctgggctgcttaacgcactggcgcaggatacatttcacggctacccgggcatcactgaagaactcctgagaagccagctgtaccccgaggtccctccagaagagttcaggccatttctggctaagatgaggggcattctcaagagtatagcctccgctgacatggactttaatcagttagaagcatttctcacagctcagaccaagaagcagggcggaatcacgtcagatcaggctgctgtgatttctaagttctggaagtcacacaagactaagatacgcgagtccctgatgaaccagtcaagatggaattccggattgcgtggcctttcatggagagtggatggtaagtcccagtcaaggcacagtgcccaaatacacaccccagtggctataattgaactggagctcggtaagtacggccaggaaagtgagttcttatgtctggaattcgacgaggttaaagtgaatcagattctaaagaccctttctgaggtagaagagtccatttctacactaatttctcagccaaac

SEQ ID NO: 243751 - DNA, 570 bp, Artificial Sequence
  derived and/or modified sequence
atggctgctggagagctggagggcggcaagcctcttagcgggctgctcaatgccttggcgcaggatacttttcacggctacccaggaataacagaagagctgctgcgatctcagctctaccctgaggtgccaccggaggagttcagaccgtttctggctaaaatgcgaggaatactgaagtctattgctagtgcagatatggacttcaatcagctggaagcgtttctgactgctcaaactaaaaaacaaggcggaattaccagcgaccaggctgcagtaataagcaaattctggaaatcccacaagaccaagatccgcgaatctctgatgaatcagtcaaggtggaatagtgggttgagaggcctctcctggcgagtggacggaaaatctcagagccgacactcagcgcagattcacacccctgttgcaatcattgagctcgaactgggcaaatacgggcaggagagcgaattcttgtgcctcgaatttgacgaggtgaaggtaaaccagatcctgaagaccctgagtgaagtcgaggaatcaataagtacccttatttcccagccaaac

SEQ ID NO: 243752 - DNA, 570 bp, Artificial Sequence
  derived and/or modified sequence
atggctgccggcgagctggaggggggtaagcctcttagcgggctgctgaacgcgctggcgcaagatacttttcacgggtatcccggcatcaccgaggagctcctgagaagccagctgtatccagaggttccgcctgaagagttccggccctttctggctaaaatgcggggaatcctgaaatcaattgccagtgcggatatggacttcaaccagttggaggctttccttaccgcccagaccaaaaagcagggaggaattactagcgatcaagcagctgtgatatcaaagttttggaagagccacaagaccaagatccgagagtcactgatgaaccagagtaggtggaactccggacttcgcggtctgtcctggcgggttgacggcaaatcacagagtcggcactctgcccagatccataccccagtggcaattattgaactggaattgggcaaatatggacaagaaagcgagtttctgtgcctggagttcgatgaagtaaaggttaaccagatcctcaagacactttccgaagtcgaagaatcaatttccacgctgatctcacagcctaac

SEQ ID NO: 243753 - DNA, 570 bp, Artificial Sequence
  derived and/or modified sequence
atggcggcgggtgaattagaaggtggtaaaccgttatcgggtttattaaatgcgctagcgcaagatacgtttcatggttatccgggtataacggaagaactactacgttcgcaattatatccggaagttccgccggaagaatttcgtccgtttctagcgaaaatgcgaggtatattaaaatcgatagcgtcggcggatatggattttaatcaactagaagcgtttctaacggcgcaaacgaaaaaacaaggtggtataacgtcggatcaagcggcggttatatcgaaattttggaaatcgcataaaacgaaaatacgagaatcgctaatgaatcaatcgcgatggaattcgggtttacgtggtctatcgtggcgagtagatggtaaatcgcaatcgcgtcattcggcgcaaatacatacgccggtagcgataatagaattagaattaggtaaatatggtcaagaatcggaatttttatgtctagaatttgatgaagtaaaagtaaatcaaatactaaaaacgttatcggaagtagaagaatcgatatcgacgttaatatcgcaaccgaat

SEQ ID NO: 243754 - DNA, 570 bp, Artificial Sequence
  derived and/or modified sequence
atggcagctggggagcttgagggagggaaaccactcagtggacttttgaatgccctggcccaggatacttttcatgggtaccctggaattactgaagaactcctgcggtcccagctgtaccccgaagtcccaccagaagaatttcgcccgttcctggcaaaaatgcggggaattcttaagtcaattgcttcggcagatatggactttaaccaacttgaagcattccttactgcacaaaccaaaaagcagggcggaatcacttcagaccaggccgcggtgatatccaagttctggaagtcacacaaaaccaagatcagagagtcccttatgaaccaatcgaggtggaattccggactgcgaggactctcctggcgcgtggacgggaagtcgcagagccgacattccgcacaaattcatactcctgtggccatcatcgaattggaactgggcaagtacggccaggagtccgaatttctctgtctggagtttgatgaagtcaaggtgaatcaaattcttaaaacgctgtcggaagtggaagagagcatttcaaccttgatctcgcagcctaac

SEQ ID NO: 243755 - DNA, 570 bp, Artificial Sequence
  derived and/or modified sequence
atggccgccggggaattggagggaggcaagcctctgtcgggattgcttaatgcactggcacaggatacttttcacggataccccggaatcactgaagagctcctccggtcccagctgtacccagaagtgccaccagaggagttcagaccatttctggccaagatgcgggggattctcaagtcgatagcgtcggcagatatggatttcaatcaactcgaagcctttcttacggctcaaaccaagaaacagggcggaatcacttcagatcaggcagcagtgatatcaaagttctggaaatcgcacaagactaagattcgggaatccctgatgaatcaatcgagatggaactccggacttagaggtctttcgtggagggtggatggtaaatcgcaatccaggcattccgctcagatccacaccccagtggcaataatcgagctggagcttggtaaatacggacaagagtcggagtttctctgcctggaattcgacgaagtgaaggtgaaccagattcttaagaccctttcagaagttgaggagagcattagcactttgatctcacagccgaac

SEQ ID NO: 243756 - DNA, 570 bp, Artificial Sequence
  derived and/or modified sequence
atggccgcaggagaactggagggaggcaagccgttgagcggactcctgaacgcccttgcacaagacactttccacgggtaccctgggatcactgaggaactgctgcggtcacaactgtacccggaagttccgccagaagaatttcggccgtttttggccaagatgcgcggaatccttaagagcatcgcttcagccgacatggactttaaccagctggaggcattcctgactgcccagaccaagaaacaggggggaatcacctccgaccaggccgcagtgatcagcaagttctggaagtcgcataagacgaaaatccgcgagtctttgatgaaccagtcccggtggaattccggcctcagaggtttgtcctggagagtggatggaaagagccaatcccggcatagcgcacagatccacacccccgtcgccatcatcgaactcgagctgggaaaatacggacaagagagcgagttcttgtgtttggaattcgatgaagtgaaggtcaaccaaatcctgaaaaccctctccgaggtggaagaaagcatttccactctgatctcccagccaaac

SEQ ID NO: 243757 - DNA, 570 bp, Artificial Sequence
  derived and/or modified sequence
atggctgctggtgaactcgaagggggaaaacccctaagcggtctcctgaatgcactagcacaggatacatttcatgggtatcctggaataactgaggagcttctgagaagccagctctatcctgaagtgcctcccgaggaatttagacccttcttggccaaaatgcgaggaatcctcaagtcaattgcgagtgcagacatggacttcaaccagctggaagctttccttaccgcgcagacaaagaagcaggggggaataacgagtgatcaggccgcagttatcagcaagttctggaagagccacaagaccaagatacgggaatcccttatgaaccagagtaggtggaacagtggacttcgcggactgtcctggcgagtggatggtaagtcgcagagccgccactcagctcagatccacactcctgtggcaatcatcgagctcgagctcggaaagtatggacaggagtccgagttcctatgcctggagtttgatgaggtgaaggtcaatcaaatcctcaagactctgtccgaagtagaagaatcgatcagcacccttatttcgcagcccaac

SEQ ID NO: 243758 - DNA, 570 bp, Artificial Sequence
  derived and/or modified sequence
atggcagcaggcgaactggaaggcggaaagccccttagcgggcttcttaatgccctggcacaagatacctttcacggatacccagggatcactgaggaattgcttagatcacaactttacccagaagtcccaccagaagaatttcggccttttctcgccaagatgcgtggcattctgaagagcattgcgtctgcggatatggatttcaaccaactcgaagccttcctgacggcccagactaaaaagcaagggggtatcacttcagaccaagcagctgtgatcagtaagttttggaagagccataagactaagattagagaaagcctcatgaaccaatcacgttggaattccggcctccgcggactttcgtggagagtcgatggtaagtcacagtccaggcattcggcgcagattcatacccccgtggcgattatcgaactggagctggggaaatacggtcaggagtcggaatttctctgtctggaattcgatgaagtgaaagtcaaccagattctcaaaactctgtcagaagtggaggaatcaatctcgacgctcatttcacaacctaac

SEQ ID NO: 243759 - DNA, 570 bp, Artificial Sequence
  derived and/or modified sequence
atggccgccggagaactggaaggaggaaagccgctgtccggactgttgaacgcgcttgcacaagataccttccatggatacccgggaattaccgaagaactcctgagatcgcaactgtacccagaggtgccaccggaagagtttaggccattcctggctaagatgcgcggcatcctgaagtcaatcgcttctgccgatatggacttcaatcagctcgaagcgttcctcactgcacagacgaaaaaacagggcggtattacttcagaccaggccgctgtgatctcaaaattctggaaatcccacaagaccaagatccgcgagtccctgatgaatcagtcgcggtggaacagcggtctgcggggactctcctggcgtgtggatggaaaatcgcagtcaaggcattcggcacagatccatactcccgtggccatcatcgagctggagctgggcaagtacggtcaagagtcggaattcctctgtctggaatttgacgaagtgaaagtgaaccagattctcaaaactctgtccgaggtcgaggagtccatctccacgttgatctcacaaccgaac

SEQ ID NO: 243760 - DNA, 570 bp, Artificial Sequence
  derived and/or modified sequence
atggccgcgggagagctggaaggaggcaagccgctgtcggggctcctcaatgctcttgcccaggacaccttccatggctacccgggaatcaccgaggagctcctgaggagccaactgtacccagaggtgcccccagaagagtttcgcccgttcctggctaagatgcgcggcattcttaagtcaatcgcttccgctgacatggacttcaatcagctcgaagcgttcctgactgcccagactaagaagcaaggaggaatcacttccgatcaggccgccgtgatctccaagttctggaagtcgcacaagaccaagatccgggagtccctgatgaaccagtcacgctggaacagcggactcagagggctctcctggcgggtggatgggaagtcgcagagcaggcattcggcgcagatccataccccggtggcgatcattgaattggagctcggtaagtacggacaggaatcggagtttctctgcctggaattcgacgaggtgaaggtcaatcagattttgaaaactctgtctgaagtggaagaatccatctcaaccctcatttcccagccgaat

SEQ ID NO: 243761 - DNA, 570 bp, Artificial Sequence
  derived and/or modified sequence
atggctgccggagaactggaaggggggaaaccgctgtctgggttactcaacgccctagctcaagatacattccatggatatccaggaattactgaagaactcttgaggtcccagctgtatcccgaagtcccccctgaagaattcaggccctttctagcgaaaatgcggggaatcctgaaatctatcgcttctgccgatatggattttaaccagctagaggctttccttacagcacagactaaaaaacagggaggaataactagtgatcaggcagctgtgatatctaaattctggaaaagtcacaaaactaaaatacgcgagtctctgatgaatcagtcccggtggaactctggactaagaggactttcatggcgggtggatggaaagtcccagagtcgacattcagcacagattcatacacccgtggccattatagaattggaactggggaaatatgggcaggagtcggaatttctgtgtctcgaatttgatgaagtaaaagttaaccagattttgaaaacactgtctgaagtcgaggagtcaatctcaacactcatctcgcagcctaac

SEQ ID NO: 243762 - DNA, 570 bp, Artificial Sequence
  derived and/or modified sequence
atggctgccggcgagctcgaggggggcaagcctctgagtgggctgctgaatgccttggctcaagacacattccatggctacccaggaatcacagaagagctgcttagaagccagttataccctgaagtgcctcctgaagagtttcggccttttctggccaagatgagaggaatcctgaaaagtatcgcatcggccgatatggatttcaaccagctggaggcctttctaactgcccagaccaagaaacagggtggtatcacttcagaccaagctgctgtgatcagcaagttctggaaatcccacaagactaaaatcagggagagcctcatgaatcagtctaggtggaactctggcctccgggggctctcctggcgcgttgacggaaagagtcagagccgacattctgctcaaattcacacgcccgtggcgatcattgagctcgaactcggcaaatatggccaagagtcagaatttttgtgcctcgagttcgacgaggtgaaagttaaccagatcctgaagaccctttctgaggtcgaggagtccatctccactctgatatctcagcctaat

SEQ ID NO: 243763 - DNA, 570 bp, Artificial Sequence
  derived and/or modified sequence
atggcagccggagaactcgaagggggaaagcctttgtcggggctgctcaatgccctggcgcaggacactttccacggttacccgggcatcactgaagaactgctgcggtcacagctgtaccctgaggtcccaccggaagaattccgcccatttctggccaagatgagaggaatattgaaatcaattgcgtcagctgatatggatttcaaccagttggaggcattcctcaccgctcaaaccaagaagcaagggggtatcacctcagatcaggcggccgtgatttcgaagttctggaagtcacacaagaccaaaatcagagagtcgctgatgaaccaatcgagatggaattcgggactccggggactctcgtggcgggtggacggaaaatcacagtcccgccatagcgcgcagatccacactcccgtcgcgatcatcgagctggaactgggaaagtacggacaggaatcagaattcctctgcctggagtttgatgaggtgaaagtgaatcagatccttaagactctgagcgaggtggaagagtcgatctccacccttatctcccagcctaac

SEQ ID NO: 243764 - DNA, 570 bp, Artificial Sequence
  derived and/or modified sequence
atggctgcaggggagctcgaggggggcaagcccctgtccggcctgctgaacgcgctggcccaggatacatttcacgggtacccaggaatcactgaggagttgcttaggtcccaattatacccagaggttcctccagaggaattcaggccttttctggccaaaatgcgaggcatcttgaagtccatcgccagtgccgatatggacttcaatcagttagaagcattcctcacagctcagacaaagaagcagggcgggatcaccagcgaccaggcggccgtgatcagcaagttttggaagagtcataagactaagattcgcgagagtctcatgaatcagagcagatggaattctgggctgcgcggtctctcttggcgggtggacggaaaatcacagagccggcatagtgcacagatccacaccccggtggctatcattgaactagagctcgggaagtacggccaggaaagcgagttcctgtgtcttgagtttgatgaagttaaggtgaatcaaattctcaagactctgtccgaagtggaagagtccatttctactctaatttcacagccaaat

SEQ ID NO: 243765 - DNA, 570 bp, Artificial Sequence
  derived and/or modified sequence
atggctgcaggagaattagaaggtggaaagccattaagtggacttttaaatgcacttgctcaagacacattccatggatatccaggaattacagaagaattattacgttcacaactttatccagaagttccaccagaagaatttagaccattccttgctaaaatgagaggaattttgaaaagtattgcctcagctgatatggattttaaccaattagaagcatttcttactgctcaaactaagaagcaaggaggaattacttcagatcaagcagccgtaattagtaaattttggaaatcacataaaacaaaaattagagagtcattgatgaaccaaagtaggtggaattcaggtttgcgaggattatcatggagagttgatggtaaatcacaatcaagacattctgcacaaattcatacaccagttgctattatagaacttgagcttggtaaatatggacaagaatcagaatttttatgtcttgaattcgatgaagttaaggttaatcaaattcttaagacattaagtgaggtagaagaatcaatatcaactttaatctcacaaccaaat

SEQ ID NO: 243766 - DNA, 570 bp, Artificial Sequence
  derived and/or modified sequence
atggcagcgggagaacttgaggggggtaaacctctttccggacttctcaatgcactcgcacaggacactttccacgggtaccctgggattacggaagaacttctcaggtcacaactttaccctgaagtgcccccagaagaatttcggccttttctggctaagatgagaggaattcttaagagcattgcatcggcagatatggatttcaatcagttggaagcgtttctgaccgcgcagactaagaagcaaggaggaattacttccgaccaggcagcagttatttcaaagttctggaagtcgcataagaccaagatcagggagtcactcatgaaccagtcgcgctggaactccggattgagaggactgtcgtggcgagtggatggaaaaagccagtccagacattcggcgcaaattcacactcccgtcgccattatagaactggagctgggcaagtatggacaggaaagcgaatttctgtgtctggaattcgatgaagttaaggtgaatcaaatcctgaaaaccctttcagaagtggaggagtcgatttccactctcatctcgcagccgaac

SEQ ID NO: 243767 - DNA, 570 bp, Artificial Sequence
  derived and/or modified sequence
atggccgccggggaactcgaggggggaaaacctcttagtgggctgctgaatgctctggcccaagataccttccatggctaccctgggataaccgaagagctactcaggagccagctgtaccccgaggtgcctccggaggaatttaggccattcctggctaaaatgcgcggcattctcaagagcatcgccagcgctgacatggatttcaaccagctcgaagcctttttaaccgcacagacaaagaaacagggaggtatcaccagcgaccaggctgccgtcatttctaagttttggaagtcgcataagacaaaaataagggaatccctgatgaaccaatctcgatggaatagcgggctccgggggctttcatggcgggtcgacggcaagagccaaagtcggcactcagcccagatacacacaccggtggcaatcatcgagctggaactggggaaatacgggcaagaatctgaattcttgtgtctcgaatttgacgaagtaaaggtcaaccagattctcaagactctatccgaagtggaggagagtatttctacactaatttcccagccaaac

SEQ ID NO: 243768 - DNA, 570 bp, Artificial Sequence
  derived and/or modified sequence
atggcggcgggggagctcgaaggtgggaagccactgtccggccttttgaacgcccttgcccaggacactttccacggataccccggtatcaccgaggaacttctgcggtcccaactctaccctgaggttccgccagaagaattccgcccctttctggccaagatgaggggaatcctcaagtcaatagcatcagcagatatggatttcaaccagctggaggcgtttctcaccgcccaaaccaagaaacaaggaggaatcacttcagaccaggcggctgtgatctcgaaattctggaagtcccacaagactaagatccgggaatcactcatgaatcagtcacggtggaattccggattgagaggactctcgtggcgcgtggatgggaagtctcaatctaggcatagcgcgcaaattcatactccggtggcaatcattgagttggaactgggcaagtacggccaggaaagcgaatttctttgcctggaattcgacgaggtcaaagtcaaccagattttgaaaaccctgtcagaagtggaggagagcatctcgaccctcatctcgcagcccaac

SEQ ID NO: 243769 - DNA, 570 bp, Artificial Sequence
  derived and/or modified sequence
atggccgcaggggaattggaaggaggaaagccactgagcggactgcttaacgcactggcccaagacacttttcatgggtaccctggcatcaccgaagaattgcttcgcagccagctgtacccagaggtgccgccggaggaattcaggccgttcctggcgaagatgcgcgggatcctgaaatccatcgccagcgctgacatggactttaatcagctggaagcgttcctcaccgcccagaccaaaaaacaaggaggaattacctccgaccaagcggccgtgatctctaagttctggaagagtcacaagacgaagatccgcgagtcgctcatgaatcagtcgcgatggaactcggggctgcggggcctctcgtggcgggtggatggcaagtcgcagagccggcattcggctcagattcacactcccgtggcaatcattgaactggaattgggaaaatacggacaggagagtgagttcctctgcctggaattcgatgaggttaaggtcaaccaaatccttaagaccctgtcagaagtcgaggaatccatctcgaccttgatatcacaacccaac

SEQ ID NO: 243770 - DNA, 570 bp, Artificial Sequence
  derived and/or modified sequence
atggctgctggcgagcttgagggcggtaaacctctcagcggcttgttaaacgctcttgctcaagacaccttccatggttaccctggcataacggaggagctgttgcgaagccagctctatccagaggtgcctcctgaggaattccgcccttttctggccaagatgagaggtatactaaaatccattgcttcagccgatatggactttaaccaacttgaggctttcttgactgcgcaaaccaaaaaacaggggggcataacatccgatcaggctgcggttatcagtaagttttggaaatctcacaagaccaaaattcgggagagcctgatgaaccaatcccgctggaacagtggcttgagaggactctcatggcgcgtggatgggaaaagccagtctcgacattctgcccagatccacacaccagtggcaatcattgaactagagcttgggaaatatggccaggagagcgaatttctctgtctcgaatttgacgaagtaaaggtcaaccagattctgaagacattgtccgaagttgaagaatcgatttccaccttgatctctcagcctaac

SEQ ID NO: 243771 - DNA, 570 bp, Artificial Sequence
  derived and/or modified sequence
atggctgccggggagttagaaggcggaaaacctctgtccggcctgttgaacgcgctggcgcaggatacgttccacggataccctggtataacagaggaattactgagatcacagctctacccagaagtcccccccgaggaatttcggcccttcttagctaagatgcgggggatcttgaaatccatagcaagcgctgatatggacttcaatcagctcgaggcatttctgaccgctcagacgaaaaaacagggcgggatcaccagcgaccaggccgccgttataagcaagttctggaaaagtcacaaaaccaagattagggagtcactgatgaaccagtcaaggtggaatagcggtctacgtggattgtcttggcgtgtagatggcaagtcccagagtagacactcagctcagatccacactcccgtagcgataatcgagctggagttgggcaagtatggccaagagtccgaattcttgtgccttgagttcgatgaagtgaaagtcaaccaaatcttgaagacactgagcgaggtcgaggagtctatctcgactctgatttcccaacctaac

SEQ ID NO: 243772 - DNA, 570 bp, Artificial Sequence
  derived and/or modified sequence
atggcggctggggagttggagggcggtaagccactctccggcctgctgaacgctctggcccaggataccttccacggatacccgggcatcaccgaagagctgctgcgcagccagctgtaccccgaagtgcctcctgaggaattccggccgtttctggcgaagatgcgcggcattctgaagagcatcgcgagcgccgacatggacttcaaccaactggaagcgtttcttactgcgcagaccaaaaagcagggtggaattactagcgaccaggccgcagtgatcagcaagttctggaagtcccataaaaccaagatcagggagagccttatgaatcagagccgatggaacagcggactgcggggactgtcatggagggtcgatggaaagtcgcagagcagacactctgcccagatccatacccctgtggccatcattgaactcgagctcggtaaatacggacaagaatcggagttcctgtgcctggagtttgacgaggtgaaggtgaaccaaatactcaagacgctgtccgaggtggaagaatccatttccacgctgatctcacagcctaat

SEQ ID NO: 243773 - DNA, 570 bp, Artificial Sequence
  derived and/or modified sequence
atggccgcaggggagttggaaggagggaaacccctcagcgggctgctgaatgctttggcccaggatacctttcacgggtatccaggcatcactgaagagcttcttagaagccaactgtatccagaggtgcctcctgaagagtttaggccctttctggcgaaaatgcgcgggatcctgaaaagtattgcatctgctgatatggacttcaaccagctcgaggcattccttaccgcccagacgaagaagcagggcggcatcactagtgatcaggctgctgtcatcagcaagttttggaagagccataagacgaagattagagagtccctgatgaatcaatcaagatggaacagcggcctgaggggcctgtcctggagagtcgacggaaagagccaaagtcggcattctgcccagatccacacaccagttgctatcattgagctcgagttgggcaagtatggtcaggagagcgagtttctctgtcttgagtttgacgaggtgaaggtgaaccagattttgaagactttgtctgaagtggaagagtccatttctacactgatttcacagccgaac

SEQ ID NO: 243774 - DNA, 570 bp, Artificial Sequence
  derived and/or modified sequence
atggctgccggagagctagaaggagggaaacccctgagtggcctgttgaacgctctcgcccaggacactttccacggttatccgggaataacagaagagctgttgagaagccagttgtacccggaggtgcctcctgaagaatttcgacctttcctcgccaaaatgcggggcatacttaagtcaatcgcgtctgcggatatggacttcaaccagttagaagctttcctgaccgcgcaaacaaaaaagcagggcggtatcacatccgatcaagccgctgtaatctcgaagttttggaagagccataaaaccaagattcgcgagtccttaatgaatcagtcccggtggaactcaggcctccgcggtctttcctggagagttgacggcaagtcacagtcaagacactcagcacagatccacacccccgtggccatcattgagcttgagctgggcaagtacggccaggagagcgagttcctatgtctcgaattcgacgaagtgaaggtgaatcaaatcctgaagacactgagcgaagtggaggagagcatttctactctcatttcccaaccaaat

SEQ ID NO: 243775 - DNA, 570 bp, Artificial Sequence
  derived and/or modified sequence
atggcagctggtgagcttgaggggggaaagcccctgtccgggcttcttaacgctttggcccaagatacttttcatggatacccaggaataactgaagagctccttaggtcgcaactttacccggaagtccccccagaggaatttaggccatttcttgcaaagatgagaggtattcttaaatcaattgccagcgccgacatggatttcaaccagcttgaagcattccttactgcacaaaccaagaaacagggaggtataacttcggatcaagcagccgtgattagcaagttttggaagtcacataaaaccaagatccgtgaatcactgatgaatcaatccagatggaatagcggtctgagaggactgtcctggcgcgtggatgggaagtctcaatcgcgtcactcagctcagatccatactccagtcgcaatcattgaacttgagctgggaaagtacggtcaggaatcggagttcctgtgccttgaatttgacgaggtgaaggtgaaccaaattctgaaaactctgtcggaggtggaagaatccatttcaaccctgatttcccagccaaac

SEQ ID NO: 243776 - DNA, 570 bp, Artificial Sequence
  derived and/or modified sequence
atggcggccggggagctggaaggggggaagccactgtcgggactactgaacgctttggcccaagatacctttcatggatatccagggattacagaggaactgctcagatcgcagctctacccggaggtccctcctgaagaatttcgcccatttttagcgaagatgaggggcattttaaaaagtattgcgagtgcagatatggattttaaccagctggaagcattccttacagcgcagacaaagaaacaaggaggaatcacttcagaccaagctgctgtcatctcaaaattttggaaatctcataagacgaaaatccgtgagtcattaatgaaccagtcccgatggaatagcggacttagaggcttgtcatggagagttgacggtaaatcccagagtaggcacagcgcacaaatccatacgccagtcgccatcatcgaactggaactgggaaaatacggacaagagtcggagttcctgtgcctggagtttgacgaggtcaaggtgaaccaaatcctcaagacccttagtgaagtcgaagaaagcatatctacgctgatttcgcagcccaac

SEQ ID NO: 243777 - DNA, 570 bp, Artificial Sequence
  derived and/or modified sequence
atggcagcaggcgagcttgaaggcggaaaaccactgtccggcctcttgaacgcactggcacaagatacgtttcatggttaccccggtatcactgaagaacttctgagaagccaattgtacccggaggtgccccccgaggagtttcggccatttcttgccaagatgcgaggaattttgaagagtatcgcctccgcggacatggatttcaaccaactggaggcgttccttaccgcacagaccaagaagcaagggggtatcacgagcgaccaagcggcagtcatttccaagttctggaaaagccacaaaaccaagattagggaaagccttatgaatcagtcccgttggaactcaggacttagaggactgtcgtggagagtggatggcaagagccagtcccgccacagcgcacagattcatactccggtggctattatcgagcttgaactcggcaaatacggccaagaatcggagttcctctgtcttgagtttgacgaagttaaagtcaatcaaatcctcaagaccctcagcgaggtggaagaatcaatatctactctcatttcacagcctaac

SEQ ID NO: 243778 - DNA, 570 bp, Artificial Sequence
  derived and/or modified sequence
atggccgcgggcgagttggagggtggtaagcctctcagtgggctcctgaacgcgctcgcgcaggacactttccacggatacccgggaatcactgaggaattgctccgtagtcagctttaccccgaagtcccacctgaggagttccgtccattcctggctaagatgagaggaatcctgaagtcgatcgcttccgccgacatggatttcaatcaacttgaggcatttctgacggcacagactaagaagcagggaggaatcaccagcgaccaagccgcagtgatctcgaagttctggaagtcgcataaaaccaagatccgcgaatcgctgatgaaccagtcacgctggaatagcggactgcggggattgtcctggcgcgtggacgggaaatcacaatcgcgacattctgcccagattcacacgccggtggccatcattgaactggaactgggcaaatacggacaagaatcagagttcttgtgcctggagtttgatgaagttaaggtcaaccaaatcctcaagaccctcagcgaagtggaagaaagcatcagcaccctcatctctcagccgaac

SEQ ID NO: 243779 - DNA, 570 bp, Artificial Sequence
  derived and/or modified sequence
atggcagcgggggagttggagggtgggaaaccccttagcggtctgttaaatgccctggcccaggatacgtttcatggatacccgggcattaccgaggagttattgcgcagccagttgtatcctgaagtaccacctgaggagttcaggcccttccttgccaagatgagaggcatcctgaagtccatcgctagcgccgacatggacttcaaccagttggaagctttcttgactgcccagacaaaaaaacagggtggtattacttctgatcaggcagcagttatcagtaagttctggaaatcacataaaacaaagatacgcgagagtctgatgaaccaaagtagatggaatagcgggctgcgcggattgtcatggagggtcgacggcaagtcgcagtcacgccatagcgctcagatccacacacctgtggccataattgaacttgagttggggaagtacggccaggagtctgaattcctctgcctggaattcgacgaagtaaaagtgaatcagattctcaaaactttgtctgaggttgaggaatccatttctacgctcatttcacagcccaac

SEQ ID NO: 243780 - DNA, 570 bp, Artificial Sequence
  derived and/or modified sequence
atggcggcgggggagctggagggaggcaagccgcttagcgggctcttgaacgccctggcgcaggataccttccatggatacccgggaatcactgaggagctgctgagatcacagctctacccagaggtgccacccgaggaatttcgcccgttcctcgcgaagatgcggggaatccttaaatccatcgctagcgccgatatggatttcaaccaactcgaggcattccttaccgcgcaaactaagaagcaaggcggaatcacttcagaccaggccgccgtgatctcgaaattctggaagtcgcacaagaccaagatccgggagtcgctgatgaaccaatcccgctggaatagcggactccgcggactgtcttggcgcgtcgacgggaaatcccagtctcggcacagcgcacaaatccatactcccgtcgcgatcatcgaactcgaactcggcaagtacggacaagagtcggagtttctctgtttggagttcgatgaagtgaaggtgaaccaaatcctgaaaacccttagcgaagtggaggagtcgatctccaccctgatctcccagcctaat

SEQ ID NO: 243781 - DNA, 570 bp, Artificial Sequence
  derived and/or modified sequence
atggcagcaggcgaacttgagggaggcaaaccgctttcaggactgttgaatgcactggcacaggacaccttccacggataccccggtattaccgaagaactgttgcgaagccaactgtacccggaagtgcctccagaagaatttcgcccttttcttgctaaaatgaggggaatactgaagtcaatagcaagcgcagacatggactttaaccagctcgaagcatttctcactgctcagactaaaaagcaaggcggcattacttcggatcaggcagcagtcatttccaaattctggaaatcacataagaccaagatacgggagagcctcatgaatcagtcccgctggaattcggggctccgcggtctgtcatggagggtggacgggaagtcgcagtcgcgccatagcgcgcaaattcatacgccagtggcgattattgaacttgaactcggtaaatacggacaagagtcggaatttctctgcctggagtttgatgaggtcaaggtcaatcagatccttaagacgctgagcgaagtggaggagagcatctccactttgatttcgcaacctaac

SEQ ID NO: 243782 - DNA, 570 bp, Artificial Sequence
  derived and/or modified sequence
atggcagcaggcgagctcgaggggggtaaacctctgtccgggcttctgaacgcactggcacaagatacctttcacggataccctggaatcaccgaagaactgcttcgatcgcagctttaccccgaggtgccccccgaagaattccggcctttccttgcaaagatgcgaggtatcctcaagtccatcgcaagcgcagacatggatttcaatcagctggaggcttttcttaccgcccagaccaagaagcagggaggaattacctcagatcaagcagcagtcatttcgaagttttggaagagccataagaccaaaatccgcgaatctctgatgaaccagagtaggtggaattcaggcctgagaggcctttcgtggagggtcgatggaaagtcccaaagtagacattcagcacaaattcacacgccagtggcgataatagaactcgagcttggcaagtacggacaggagtcggagttcctgtgcctcgaattcgacgaagtgaaagtgaaccaaattctcaagactctgtcagaagtcgaggagtccatctccactttgatttcccaacctaac

SEQ ID NO: 243783 - DNA, 570 bp, Artificial Sequence
  derived and/or modified sequence
atggcagcaggcgagcttgagggaggcaagccactcagtggcctcctaaacgctctggctcaagatacctttcacggctaccctggcataacagaagagctcctgcgatcccagctgtacccagaggtgccccccgaagagttcagaccattccttgcgaaaatgcgggggatcctgaaaagcattgcatccgctgacatggatttcaaccaactggaggcgttcctgaccgcacaaacaaagaaacagggaggtatcaccagcgaccaagctgcagtcatttcgaaattttggaaatcccataagacgaaaataagagaaagtctcatgaatcagagtagatggaatagcggtctgcggggcctaagttggcgagtggatggaaagtctcaaagccgccacagtgctcagatccacacaccagttgccatcatagagttggagctaggcaagtacggccaggaaagcgagtttctttgccttgaattcgacgaagtcaaggtaaaccagattctaaaaaccctgagcgaagtggaagagagcatttccacgcttatttcccaacctaac

SEQ ID NO: 243784 - DNA, 570 bp, Artificial Sequence
  derived and/or modified sequence
atggctgctggggagcttgagggcggcaaaccactgagcggtctgctcaatgctttggctcaggatacctttcatggataccctggaatcacagaggagctattacgctcccagttgtatcccgaagtgccccctgaggagttccggccttttctggctaagatgcgcgggatcttaaaatccatcgccagcgcagatatggattttaaccaactcgaggccttcctgaccgcccagactaagaaacagggcgggattacctctgaccaggccgcggtcatctcaaaattctggaagtcgcataaaactaaaattagggaaagtctaatgaatcagtcccggtggaattctggactgaggggactgtcctggagggttgacggaaagtcccaaagtagacactctgcccagattcatacccctgtcgccattatcgagctcgaactgggcaagtatggccaggagagtgagttcctgtgtctggaattcgacgaggtaaaggtcaaccagattctgaagactttgtctgaagttgaagaaagtattagtacattaatctcgcagcccaat

SEQ ID NO: 243785 - DNA, 570 bp, Artificial Sequence
  derived and/or modified sequence
atggctgctggggagctggagggaggcaagccactatctggcctccttaacgcacttgcacaggacacgttccacggttatccaggtatcactgaggagctactccgaagccagttgtatcctgaggttcctccagaagagtttcgtccatttctagctaagatgcgggggatcctaaagagcattgccagtgccgatatggacttcaaccagctcgaggcattcttgaccgcccagacaaagaagcaaggcggtatcacttccgaccaagccgccgtgattagtaagttttggaagagtcataaaactaagatccgtgagtcactcatgaatcaatcgcgttggaacagcggactgcgtggattgagttggcgggtcgatggcaagtcacaatcacggcatagcgcacagattcatacccctgtcgcgataattgagctcgaactgggcaagtatggccaggagtctgagttcctctgccttgaattcgatgaagtcaaagtaaatcaaattctgaaaacgcttagcgaagttgaggagtcgatcagcacgctcatctcccaaccgaac

SEQ ID NO: 243786 - DNA, 570 bp, Artificial Sequence
  derived and/or modified sequence
atggccgcgggagaactggaaggcggaaaaccactgtcaggactcttgaacgccctggcccaagacacttttcatggctacccaggtataaccgaggagctgctccgctcccaactgtaccctgaagtcccgcctgaagagttcagacccttcctcgccaagatgcgcggaatcctgaagtcaatcgcatctgcggacatggacttcaaccagctggaagcgttcctgacggcccagaccaagaaacaggggggtatcacctcggaccaggctgccgtcatttcgaagttttggaagagccacaagacgaagattcgtgaaagcctgatgaatcaatcccggtggaactcgggccttcggggcctgtcctggagggtggatggaaagagtcagtcgcgccattcggctcagatccacactccggtggcaataatcgaactcgaattgggaaagtacgggcaggagtccgaattcctttgccttgagttcgatgaggtgaaggtgaatcagattctgaaaaccctttccgaggtggaggaatcgatctcgactcttatcagtcaaccgaac

SEQ ID NO: 243787 - DNA, 570 bp, Artificial Sequence
  derived and/or modified sequence
atggcagcaggtgaattggagggcgggaagccactttcgggactgcttaacgcgctggctcaggatactttccatgggtaccccggaattacggaagagttgctgagatctcaactgtaccctgaggtcccacctgaagaatttcgacccttcttggccaaaatgcggggtattctcaagtcaatcgcgagcgcagatatggactttaatcaactggaagcatttcttactgcacagacgaagaaacaaggtggaattacttcagaccaagcagccgtgattagcaaattctggaaaagccacaaaaccaagattagagagtcactgatgaaccagtcacggtggaactcgggacttcgagggttgtcttggcgggtggatgggaaatcgcagtcgagacactcggctcagatccatacgcctgtggccattatcgaacttgaacttggaaagtacggacaagaaagcgaatttctgtgtctggaatttgatgaagtcaaggttaaccaaatactcaagaccctctccgaggtggaagagtcaataagcactctgatcagccagccgaat

SEQ ID NO: 243788 - DNA, 570 bp, Artificial Sequence
  derived and/or modified sequence
atggccgctggggagcttgagggtggaaagccactgtccggtcttctgaacgcgctggcccaagacacgtttcatggctaccctggcattacggaggagctgctgagaagccagctctaccccgaagtgccccctgaggaattccgtcccttcctcgcgaagatgagggggatcctgaaaagcatagcttcagctgacatggattttaaccagttagaggccttcttaacagcccagaccaaaaagcagggcggaatcacaagtgaccaggccgccgttatctcgaaattctggaaatcacacaaaacgaaaatccgagagtctctaatgaatcagtcacggtggaactcgggacttagaggattgagctggcgtgtggatgggaagagtcaatctaggcactccgcacagatccataccccagtggctatcattgagttggaactaggcaagtacgggcaggagtctgaattcctgtgtcttgaattcgatgaggtaaaggtaaaccagatcctcaagaccctgtctgaggtcgaggaaagcatctccacactgatctcacagcctaac

SEQ ID NO: 243789 - DNA, 570 bp, Artificial Sequence
  derived and/or modified sequence
atggcggctggtgagctagagggtggcaagccacttagcggcctactgaacgcactggcacaggacaccttccacgggtaccccggcatcaccgaagaactcttgcggtcacaactgtaccccgaggtgcctcctgaggaattccgtccattcttagcaaagatgcgcggaatcctaaagagcattgctagcgctgatatggacttcaaccagttggaggctttcctgaccgcacagactaagaagcaaggcgggatcacttcagatcaggccgccgtaattagcaagttctggaagtcacacaagactaagatacgtgagtccctgatgaaccagagtcggtggaattctggccttcgtggtctttcctggagggtggacggaaaaagtcaaagtcgtcattcagctcagattcacactcctgtggcaatcattgaactcgaactgggaaagtacgggcaggaatcggaatttctgtgcttggaatttgatgaggtgaaggtgaatcagattctgaagaccctgtctgaggtggaggagagtatcagcactctgatatctcagcccaat

SEQ ID NO: 243790 - DNA, 570 bp, Artificial Sequence
  derived and/or modified sequence
atggccgccggggagctggagggcggaaaacccctgtcgggtttattgaatgcactggcacaggacacttttcatggctacccaggcatcacagaggagcttctgagatcacaactgtaccccgaagtgccccccgaagagttccgcccatttctggctaaaatgaggggaatccttaagagtatcgccagcgcggatatggatttcaatcaactggaggccttccttaccgcccaaaccaaaaaacaggggggaatcacctcagaccaggccgccgtgatttctaagttttggaaaagccacaagaccaaaatcagagaatcactgatgaaccaatcccgctggaattcagggttgcgagggctgtcttggcgggtggatggtaaatcgcagagcaggcactcagctcagatccacactcctgtggctattatagaacttgaactgggtaagtatggccaggaaagcgaatttctatgcctagaatttgacgaggtcaaggtgaaccagattctaaagactctttctgaggtggaagaatccatcagtactctgattagccaacccaat

SEQ ID NO: 243791 - DNA, 570 bp, Artificial Sequence
  derived and/or modified sequence
atggcggcgggagagctcgaagggggtaagcctctgtctggattgctgaacgcgctggcccaggacaccttccatggatacccggggatcaccgaagagctcctcagatcgcaactgtaccccgaggttccaccagaagagttccgcccgtttctcgcaaagatgcgcggaatcctcaaatccatcgcttcggccgacatggatttcaaccagctcgaagccttcctgaccgcgcaaaccaaaaaacagggcgggattacgtccgaccaagccgccgtgatttccaagttctggaagtcccacaagaccaagatcagagaatcactcatgaaccaatcacgatggaactcgggtctgcggggcctgtcctggcgggttgacggaaagtcccagtcgcgccattcagcgcagatccacacccctgtcgcaattatcgaactcgaactgggcaagtacggacaggaaagcgagttcctctgtcttgagttcgacgaggtgaaggtcaatcaaattctgaaaaccctctccgaggtcgaagagtccatttcgactctgatctcgcaaccaaat

SEQ ID NO: 243792 - DNA, 570 bp, Artificial Sequence
  derived and/or modified sequence
atggccgccggcgagctggagggcggcaagcccctgagcggcctgctgaacgccctggcccaggacaccttccacggctaccccggcatcaccgaggagctgctgcgcagccagctgtaccccgaggtgccccccgaggagttccgccccttcctggccaagatgcgcggcatcctgaagagcatcgccagcgccgacatggacttcaaccagctggaggccttcctgaccgcccagaccaagaagcagggcggcatcaccagcgaccaggccgccgtgatcagcaagttctggaagagccacaagaccaagatccgcgagagcctgatgaaccagagccgctggaacagcggcctgcgcggcctgagctggcgcgtggacggcaagagccagagccgccacagcgcccagatccacacccccgtggccatcatcgagctggagctgggcaagtacggccaggagagcgagttcctgtgcctggagttcgacgaggtgaaggtgaaccagatcctgaagaccctgagcgaggtggaggagagcatcagcaccctgatcagccagcccaac

SEQ ID NO: 243793 - DNA, 573 bp, Artificial Sequence
  derived and/or modified sequence
atggccgccggcgagctggagggcggcaagcccctgagcggcctgctgaacgccctggcccaggacaccttccacggctaccccggcatcaccgaggagctgctgagaagccagctgtaccccgaggtgccccccgaggagttcagacccttcctggccaagatgagaggcatcctgaagagcatcgccagcgccgacatggacttcaaccagctggaggccttcctgaccgcccagaccaagaagcagggcggcatcaccagcgaccaggccgccgtgatcagcaagttctggaagagccacaagaccaagatcagagagagcctgatgaaccagagcagatggaacagcggcctgagaggcctgagctggagagtggacggcaagagccagagcagacacagcgcccagatccacacccccgtggccatcatcgagctggagctgggcaagtacggccaggagagcgagttcctgtgcctggagttcgacgaggtgaaggtgaaccagatcctgaagaccctgagcgaggtggaggagagcatcagcaccctgatcagccagcccaactag

SEQ ID NO: 243794 - DNA, 736 bp, Artificial Sequence
  derived and/or modified sequence
gggaaataagagagaaaagaagagtaagaagaaatataagagccaccatggcggcgggcgagcttgagggtggcaaacccctgagcgggctgctgaatgcgctggcccaggacactttccacgggtaccccggcatcacagaggagctgctacggagccagctatatccagaggtgccacccgaggagttccgcccctttctggcaaagatgagggggattcttaagtctattgcgtctgcagacatggatttcaaccagctggaggcattcttgactgctcaaaccaaaaagcaaggtgggatcacatctgaccaagctgctgtcatttccaaattctggaagagccacaagacaaaaatccgtgagagcctcatgaaccagagccgctggaatagcgggcttcggggcctgagctggagagttgatggcaagtctcagtcaaggcactcagctcaaatacacacacctgttgccattatagagctggaattaggcaaatatggacaggaatctgaatttctgtgtttggaatttgatgaggtcaaagtcaaccaaattctgaagacgctgtcagaggtagaagaaagtatcagcacactgatcagccagcctaactgataataggctggagcctcggtggccatgcttcttgccccttgggcctccccccagcccctcctccccttcctgcacccgtacccccgtggtctttgaataaagtctgagtgggcggc

SEQ ID NO: 243795 - DNA, 573 bp, Artificial Sequence
  derived and/or modified sequence
atggctgcaggcgagctggagggtggtaagcccttgtctggcctcctgaatgcacttgctcaggatactttccacggctaccctggaatcacggaagagttattgcgtagtcaattatacccagaggtgcccccagaggagttcagaccgttccttgccaaaatgcggggaatcctgaaaagtatagccagcgccgacatggattttaaccagctcgaggcgtttctaacagcccagaccaaaaagcagggcggaatcacgtccgatcaggccgctgtgatatcaaaattctggaaaagccataagacgaagatccgtgaatccctgatgaatcagtcccgctggaactccggacttaggggactgagctggcgcgtagacggcaagtcacagagtcgccactctgcacaaattcacacccccgttgccataatcgagcttgaactaggaaagtacggacaggaaagtgaatttctttgtcttgagtttgatgaagtgaaggtgaatcaaattttgaaaaccctgagcgaggtcgaggagtcaatctcaaccctgatatctcaaccaaactag

SEQ ID NO: 243796 - DNA, 573 bp, Artificial Sequence
  derived and/or modified sequence
atggctgctggggagctggagggcggcaagcccctgagcggcctgctgaatgccctggcccaggacaccttccacggctacccaggcatcacagaggagctgctgcggagccagctgtacccagaggtgcccccagaggagttccggcccttcctggccaagatgaggggcatcctgaagagcatcgccagcgctgacatggacttcaaccagctggaggccttcctgacagcccagaccaagaagcagggcggcatcaccagtgaccaggccgccgtcatcagcaagttctggaagagccacaagaccaagatccgggagagcctgatgaaccagagccgctggaacagcggcctgcggggcctgtcctggagggtggatggcaagagccagagccgccacagcgcccagatccacacccctgtggccatcatcgagctggagctgggcaagtatggccaggagagcgagttcctgtgcctggagtttgatgaggtgaaggtgaaccagatcctgaagaccctgtctgaggtggaggagagcatcagcaccctcatcagccagcccaactag

SEQ ID NO: 243797 - DNA, 911 bp, Artificial Sequence
  derived and/or modified sequence
tcagctgttgcggggcggggccttcgcagagcatggcggcgggcgagcttgagggtggcaaacccctgagcgggctgctgaatgcgctggcccaggacactttccacgggtaccccggcatcacagaggagctgctacggagccagctatatccagaggtgccacccgaggagttccgcccctttctggcaaagatgagggggattcttaagtctattgcgtctgcagacatggatttcaaccagctggaggcattcttgactgctcaaaccaaaaagcaaggtgggatcacatctgaccaagctgctgtcatttccaaattctggaagagccacaagacaaaaatccgtgagagcctcatgaaccagagccgctggaatagcgggcttcggggcctgagctggagagttgatggcaagtctcagtcaaggcactcagctcaaatacacacacctgttgccattatagagctggaattaggcaaatatggacaggaatctgaatttctgtgtttggaatttgatgaggtcaaagtcaaccaaattctgaagacgctgtcagaggtagaagaaagtatcagcacactgatcagccagcctaactgaagatgatgtatgaaggagttggagttgttgaaaccaaggtgtccatgatccctccccactgaccttttctaagaaaattcttgtgcccgcattggtattaaatcctcgcattcagtcttcctgcctctacttgctcagatttctttttttctagctttcatttagtcttacatttgttccagtgcagaggttctcacccttcagtgtgcataaatgttataaggggtacttgtaaaagcattcacttttttgttgttattattaaattcggagtgttgctctgttgcccaggctggagtgcagtgg

SEQ ID NO: 243798 - DNA, 573 bp, Artificial Sequence
  derived and/or modified sequence
atggccgccggcgagctggagggcggcaagcccctgagcggcctgctgaatgccctggcccaggacacatttcatggttatccgggaattaccgaggagcttttacgtagccaactgtatccggaggtgcctcccgaggaatttaggccgttcctggctaagatgcgagggattcttaaatctatcgctagtgcagacatggattttaatcagctggaagctttcctgaccgcccagactaagaaacaaggcggcatcacaagcgaccaggccgccgtgatcagcaaattttggaagagccataagaccaagattcgcgagtctctgatgaatcagtctcggtggaatagtgggctgcgcggactgagttggagagtggacggcaagtctcagtcccgacatagcgcccagattcacactccagttgctatcatcgagctggagcttgggaagtacgggcaggagagcgagttcctctgcctggagtttgatgaagtgaaagtcaatcagattctgaagactctgagtgaggtggaggagtcaatcagcaccttaatctcacagccaaactag

SEQ ID NO: 243799 - DNA, 573 bp, Artificial Sequence
  derived and/or modified sequence
atggccgcaggcgagctagagggcggtaagcctctgagcggcttgcttaacgccctagctcaggataccttccacgggtatccgggaataaccgaggaattgctccgcagtcagctgtaccccgaagttcctcccgaggagtttaggcccttcttagccaagatgcggggtatcctcaaaagcattgcgagcgcagatatggatttcaaccagctagaagcctttctgacggcacagacaaagaagcagggcggtatcacaagtgaccaggccgctgtgattagcaagttctggaaatcgcacaaaactaagatccgggagtctctgatgaaccagtccagatggaattctggtttgcggggactgtcttggcgtgttgacggcaaatctcaaagtcgtcattccgcccaaatacacaccccagtcgcgattatcgaactggaactgggaaaatacggccaggaaagcgagtttctgtgtctcgaattcgacgaagtgaaagtaaatcagatcctgaagaccctgtctgaagtcgaggaaagcatcagtacactcatctcccaacccaactag

SEQ ID NO: 243800 - DNA, 759 bp, Artificial Sequence
  derived and/or modified sequence
taatacgactcactatagggaaataagagagaaaagaagagtaagaagaaatataagagccaccatggcggcgggcgagcttgagggtggcaaacccctgagcgggctgctgaatgcgctggcccaggacactttccacgggtaccccggcatcacagaggagctgctacggagccagctatatccagaggtgccacccgaggagttccgcccctttctggcaaagatgagggggattcttaagtctattgcgtctgcagacatggatttcaaccagctggaggcattcttgactgctcaaaccaaaaagcaaggtgggatcacatctgaccaagctgctgtcatttccaaattctggaagagccacaagacaaaaatccgtgagagcctcatgaaccagagccgctggaatagcgggcttcggggcctgagctggagagttgatggcaagtctcagtcaaggcactcagctcaaatacacacacctgttgccattatagagctggaattaggcaaatatggacaggaatctgaatttctgtgtttggaatttgatgaggtcaaagtcaaccaaattctgaagacgctgtcagaggtagaagaaagtatcagcacactgatcagccagcctaactgataataggctggagcctcggtggccatgcttcttgccccttgggcctccccccagcccctcctccccttcctgcacccgtacccccgtggtctttgaataaagtctgagtgggcggctctaga

SEQ ID NO: 243801 - RNA, 736 nt, Artificial Sequence
  derived and/or modified sequence
gggaaauaagagagaaaagaagaguaagaagaaauauaagagccaccauggcggcgggcgagcuugaggguggcaaaccccugagcgggcugcugaaugcgcuggcccaggacacuuuccacggguaccccggcaucacagaggagcugcuacggagccagcuauauccagaggugccacccgaggaguuccgccccuuucuggcaaagaugagggggauucuuaagucuauugcgucugcagacauggauuucaaccagcuggaggcauucuugacugcucaaaccaaaaagcaaggugggaucacaucugaccaagcugcugucauuuccaaauucuggaagagccacaagacaaaaauccgugagagccucaugaaccagagccgcuggaauagcgggcuucggggccugagcuggagaguugauggcaagucucagucaaggcacucagcucaaauacacacaccuguugccauuauagagcuggaauuaggcaaauauggacaggaaucugaauuucuguguuuggaauuugaugaggucaaagucaaccaaauucugaagacgcugucagagguagaagaaaguaucagcacacugaucagccagccuaacugauaauaggcuggagccucgguggccaugcuucuugccccuugggccuccccccagccccuccuccccuuccugcacccguacccccguggucuuugaauaaagucugagugggcggc

SEQ ID NO: 243802 - protein, 471 aa, Artificial Sequence
  derived and/or modified sequence
MNMANFLRGFEEKGIKNDRPEDQLSKEKKKILFSFCEVCNIQLNSAAQAQVHSNGKSHRKRVKQLSDGQPPPPAQASPSSNSSTGSTCHTTTLPALVRTPTLMMQPSLDIKPFMSFPVDSSSAVGLFPNFNTMDPVQKAVINHTFGVSIPPKKKQVISCNVCQLRFNSDSQAEAHYKGSKHAKKVKALDATKNKPKMVPSKDSAKANPSCSITPITGNNSDKSEDKGKLKASSSSQPSSSESGSFLLKSGTTPLPPGAATSPSKSTNGAPGTVVESEEEKAKKLLYCSLCKVAVNSLSQLEAHNTGSKHKTMVEARNGAGPIKSYPRPGSRLKMQNGSKGSGLQNKTFHCEICDVHVNSEIQLKQHISSRRHKDRVAGKPLKPKYSPYNKLQRSPSILAAKLAFQKDMMKPLAPAFLSSPLAAAAAVSSALSLPPRPSASLFQAPAIPPALLRPGHGPIRATPASILFAPY

SEQ ID NO: 243803 - protein, 75 aa, Artificial Sequence
  derived and/or modified sequence
MNMANFLRGFEEKGIKNDRPEDQLSKEKKKILFSFCEVCNIQLNSAAQAQVHSNGKSHRKRVKQLSDGQPPPPAQ

SEQ ID NO: 243804 - DNA, 1416 bp, Artificial Sequence
  derived and/or modified sequence
atgaacatggccaacttcctgagaggcttcgaggagaagggcatcaagaacgacagacccgaggaccagctgagcaaggagaagaagaagatcctgttcagcttctgcgaggtgtgcaacatccagctgaacagcgccgcccaggcccaggtgcacagcaacggcaagagccacagaaagagagtgaagcagctgagcgacggccagccccccccccccgcccaggccagccccagcagcaacagcagcaccggcagcacctgccacaccaccaccctgcccgccctggtgagaacccccaccctgatgatgcagcccagcctggacatcaagcccttcatgagcttccccgtggacagcagcagcgccgtgggcctgttccccaacttcaacaccatggaccccgtgcagaaggccgtgatcaaccacaccttcggcgtgagcatcccccccaagaagaagcaggtgatcagctgcaacgtgtgccagctgagattcaacagcgacagccaggccgaggcccactacaagggcagcaagcacgccaagaaggtgaaggccctggacgccaccaagaacaagcccaagatggtgcccagcaaggacagcgccaaggccaaccccagctgcagcatcacccccatcaccggcaacaacagcgacaagagcgaggacaagggcaagctgaaggccagcagcagcagccagcccagcagcagcgagagcggcagcttcctgctgaagagcggcaccacccccctgccccccggcgccgccaccagccccagcaagagcaccaacggcgcccccggcaccgtggtggagagcgaggaggagaaggccaagaagctgctgtactgcagcctgtgcaaggtggccgtgaacagcctgagccagctggaggcccacaacaccggcagcaagcacaagaccatggtggaggccagaaacggcgccggccccatcaagagctaccccagacccggcagcagactgaagatgcagaacggcagcaagggcagcggcctgcagaacaagaccttccactgcgagatctgcgacgtgcacgtgaacagcgagatccagctgaagcagcacatcagcagcagaagacacaaggacagagtggccggcaagcccctgaagcccaagtacagcccctacaacaagctgcagagaagccccagcatcctggccgccaagctggccttccagaaggacatgatgaagcccctggcccccgccttcctgagcagccccctggccgccgccgccgccgtgagcagcgccctgagcctgccccccagacccagcgccagcctgttccaggcccccgccatcccccccgccctgctgagacccggccacggccccatcagagccacccccgccagcatcctgttcgccccctactag

SEQ ID NO: 243805 - DNA, 1416 bp, Artificial Sequence
  derived and/or modified sequence
atgaacatggctaacttccttcgaggttttgaagaaaagggcattaaaaatgatcggcctgaggatcaactcagcaaagagaaaaaaaaaatccttttttcattttgcgaggtatgcaatattcaactgaactccgccgcccaggctcaggtccacagcaatggcaagtcccatagaaagcgcgtcaagcaattgagtgacggccagcctccccctcccgcacaagcatcaccttcttctaacagcagcactggatccacctgtcacaccaccacactgcctgcgttagtgcgcactcctaccctaatgatgcagccaagcctggatatcaaaccgtttatgagcttcccagtggactcctcgtccgccgtggggctcttcccaaacttcaacactatggacccagtgcagaaagccgttatcaatcacacctttggcgtgagcatcccacctaagaagaaacaggtcatcagctgcaacgtgtgtcaacttagattcaattctgacagtcaggccgaagctcattacaaggggtctaaacacgcaaagaaggtgaaggccttggacgctaccaagaataagcccaaaatggtcccaagcaaggattccgccaaagcaaatccctcgtgctcaattaccccaattactgggaacaacagcgacaaatcagaagacaaaggcaagctgaaggcctcctcctccagtcagcccagctcatccgagtccggatccttcctcctcaaaagcggtacaacccccctgccaccaggggccgcgacatccccctccaaatctaccaatggtgcaccgggaactgtcgtagaatctgaggaggagaaagccaaaaagctgctctactgctccttatgcaaagtggcagtgaatagtctttctcaactggaggcccataacaccgggagcaaacacaagaccatggtcgaggctcgcaatggggccggccccattaagtcctacccgcgtcccggctctcgactgaaaatgcagaatggatctaaaggttctggactgcaaaacaagacctttcattgtgaaatctgtgatgtccatgtgaactcagagattcagctgaagcaacatatctcgtcccggcgtcataaggacagagtggccggcaagccattgaagcctaagtacagtccctacaataaattgcagagaagccccagtatcttagcggctaaactggcatttcagaaagatatgatgaagcccctcgcccctgcctttctgtcatctcccctcgccgccgcagcggccgtgtctagcgctttgtctcttccgcctaggcccagcgcctccctgtttcaggcacctgctatccctcctgccttgcttaggcccggccacgggcccatcagggcgacgcctgccagcattctcttcgcaccctattag

SEQ ID NO: 243806 - DNA, 1416 bp, Artificial Sequence
  derived and/or modified sequence
atgaacatggccaacttcctgcggggctttgaggagaagggcatcaagaatgacaggcctgaggaccagctgagcaaggagaagaagaagatcctcttctccttctgtgaggtgtgcaacatccagctgaacagcgctgcccaggcccaggtgcacagcaatggcaagagccacaggaagagggtgaagcagctgagtgatggccagcccccacctccagcccaggccagccccagcagcaacagcagcacaggcagcacctgccacaccaccaccctgcctgccctggtgaggacccccaccctgatgatgcagcccagcctggacatcaagcccttcatgtccttccctgtggacagcagcagcgctgtgggcctcttccccaacttcaacaccatggaccctgtgcagaaggctgtgatcaaccacacctttggagtgtccatcccccccaagaagaagcaggtgatcagctgcaatgtgtgccagctgcgcttcaacagcgacagccaggccgaggcccactacaagggcagcaagcacgccaagaaggtgaaggccctggatgccaccaagaacaagcccaagatggtgcccagcaaggacagcgccaaggccaaccccagctgcagcatcacccccatcaccggcaacaacagcgacaagtctgaggacaagggcaagctgaaggccagcagcagcagccagcccagcagcagcgagagcggcagcttcctgctgaagagcggcaccacccccctgcccccaggggccgccaccagccccagcaagagcaccaatggagcccctggcaccgtggtggagagcgaggaggagaaggccaagaagctgctgtactgcagcctgtgcaaggtggccgtgaacagcctgagccagctggaggcccacaacacaggcagcaagcacaagaccatggtggaggccagaaatggagctggccccatcaagagctacccccggcccggcagccggctgaagatgcagaatggcagcaaaggaagtggcctgcagaacaagaccttccactgtgagatctgtgatgtgcacgtgaacagcgagatccagctgaagcagcacatcagcagccgccgccacaaggacagagtggccggcaagcccctgaagcccaagtacagcccctacaacaagctgcagaggagccccagcatcctggccgccaagctggccttccagaaggacatgatgaagcccctggccccagccttcctgagcagccccctggccgctgctgctgctgtgtcctctgccctgagcctgcccccccggcccagcgccagcctcttccaggccccagccatccccccagccctgctgcggcccggccacggccccatccgggccaccccagccagcatcctgtttgccccctactag

SEQ ID NO: 243807 - DNA, 1416 bp, Artificial Sequence
  derived and/or modified sequence
atgaacatggccaacttcctgcggggcttcgaggagaagggcatcaaaaatgaccgcccagaggaccagctctccaaggagaagaagaagatcttattcagtttctgtgaggtctgtaacatccagctgaatagtgcagcgcaggcccaggtgcatagtaatggcaagtcacaccgcaaacgtgttaagcagctgtccgacggacagccccctcctcctgcgcaggcctcacccagtagcaattcatctaccggcagtacctgccacaccacgacactgcctgcgttggtgaggactcccaccttgatgatgcaaccttctctggacattaagcctttcatgtcttttccagtggactcaagtagcgccgtggggctgtttcccaactttaataccatggaccctgttcagaaggctgtgattaatcatacctttggcgtttccatcccccccaaaaaaaagcaggtaatctcttgtaatgtttgtcagctgaggttcaattctgattctcaggctgaggctcactacaagggaagtaagcacgccaaaaaggttaaggctctggacgctacaaagaataaacccaagatggtgccaagcaaggactctgccaaggccaacccttcttgctccatcacccctatcaccgggaacaattctgataagtctgaggacaaagggaaattgaaagctagttcctctagccagcccagttcgagtgagagcggaagcttcttactgaaatcaggcacaacccccttaccgccaggagctgcaacatccccgtcaaaatcaactaacggcgctcccggaacagtcgtcgaaagtgaggaagagaaagccaagaaactcttgtactgtagcctgtgtaaggtggccgtgaattctttatcccaactggaggctcacaacactggatctaagcacaagaccatggtagaagctcggaacggagccggccccattaaatcatatcctcggcctggtagtaggctcaagatgcagaatggctctaaaggctccgggctccagaacaaaaccttccactgtgagatttgcgatgtccacgtgaactccgaaattcagttgaagcagcacatttcctcccgccgccacaaggatagagttgccggaaagccattgaagccaaagtactccccctataacaagttgcagcgatctcctagcatcctcgcagctaaacttgcctttcagaaggacatgatgaaaccactggcgcccgcattcctctcctctcctctggctgccgcagccgccgtgagttcagcccttagccttcctcctcggccatctgcatctctcttccaggccccggctatcccccctgctctgttgcgtccgggacatggccccataagagcaactcctgcttccatcttgtttgcgccctattag

SEQ ID NO: 243808 - DNA, 1416 bp, Artificial Sequence
  derived and/or modified sequence
atgaacatggccaacttcctgcgtgggtttgaagaaaaaggaataaaaaacgatagaccggaggatcagctctctaaggagaaaaaaaagattctcttctcgttttgtgaagtgtgtaacattcaacttaacagcgcagcccaggcccaagtgcattccaatggcaaaagccatcggaagagagtgaagcagcttagcgacggacaacctccccctcccgctcaggcgtctccctccagcaacagtagcacaggttcaacctgccacaccacaacacttcccgcattggtgcgcactccaactctaatgatgcaaccttccttggatataaagccgttcatgtcctttcccgtggatagtagcagtgcggtagggctgtttcccaatttcaatactatggatccagtgcagaaagctgttatcaatcataccttcggtgtgtccattcctcccaagaaaaagcaggtaatcagctgcaatgtatgccagttaaggtttaacagtgattcccaggcagaggcccactataaaggaagtaagcatgccaagaaggtgaaggctcttgacgccaccaaaaataagcctaaaatggtgccatctaaagactccgccaaggccaaccctagttgcagcatcactccaattacagggaataactccgataaatccgaagacaaggggaaactcaaggcctccagttcctctcaacccagctcctccgaatccggatcatttctactcaaaagtggtactactcctttacctccgggtgctgctacctctccatctaagtccaccaacggagcccctggcacagtcgtcgaaagcgaggaggagaaagcaaagaaattgctatactgcagtctctgcaaagttgctgttaacagcctctcacagctggaagcgcacaatacaggctccaagcacaagaccatggtagaagctcgaaacggggctgggccaataaagagctaccctcgccctggcagtagacttaagatgcagaatgggagtaagggatccggcttacagaacaaaacgtttcactgtgagatttgcgatgtacacgtcaacagtgaaattcagctcaagcagcatataagttctcgtcgtcacaaggacagggtcgccggaaaacccctgaagcctaagtattcaccatacaacaaactccagcgctcaccctctattttggccgcaaagctggccttccaaaaggatatgatgaagccgctcgcccctgctttcctgagcagcccgttggccgctgcagctgccgtgtcttcagcgctgtctctgccacctcgaccatcagctagtcttttccaggcccctgctataccacctgccctgcttcggccagggcacgggcctataagagctactccggctagtattctcttcgcgccatattag

SEQ ID NO: 243809 - protein, 1143 aa, Artificial Sequence
  derived and/or modified sequence
MKVTVCFGRTGIVVPCKEGQLRVGELTQQALQRYLKTREKGPGYWVKIHHLEYTDGGILDPDDVLADVVEDKDKLIAVFEEQEPLHKIESPSGNPADRQSPDAFETEVAAQLAAFKPIGGEIEVTPSALKLGTPLLVRRSSDPVPGPPADTQPSASHPGGQSLKLVVPDSTQNLEDREVLNGVQTELLTSPRTKDTLSDMTRTVEISGEGGPLGIHVVPFFSSLSGRILGLFIRGIEDNSRSKREGLFHENECIVKINNVDLVDKTFAQAQDVFRQAMKSPSVLLHVLPPQNREQYEKSVIGSLNIFGNNDGVLKTKVPPPVHGKSGLKTANLTGTDSPETDASASLQQNKSPRVPRLGGKPSSPSLSPLMGFGSNKNAKKIKIDLKKGPEGLGFTVVTRDSSIHGPGPIFVKNILPKGAAIKDGRLQSGDRILEVNGRDVTGRTQEELVAMLRSTKQGETASLVIARQEGHFLPRELDGRLRMNDQLIAVNGESLLGKSNHEAMETLRRSMSMEGNIRGMIQLVILRRPERPMEDPAECGAFSKPCFENCQNAVTTSRRNDNSILHPLGTCSPQDKQKGLLLPNDGWAESEVPPSPTPHSALGLGLEDYSHSSGVDSAVYFPDQHINFRSVTPARQPESINLKASKSMDLVPDESKVHSLAGQKSESPSKDFGPTLGLKKSSSLESLQTAVAEVRKNDLPFHRPRPHMVRGRGCNESFRAAIDKSYDGPEEIEADGLSDKSSHSGQGALNCESAPQGNSELEDMENKARKVKKTKEKEKKKEKGKLKVKEKKRKEENEDPERKIKKKGFGAMLRFGKKKEDKGGKAEQKGTLKHGGLREEELEKMKEERERIGAKHQELREKQARGLLDYATGAIGSVYDMDDDEMDPNYARVNHFREPCTSANVFRSPSPPRAGPFGYPRDGHPLSPERDHLEGLYAKVNKPYHPLVPADSGRPTGGSTDRIQKLRKEYYQARREGFPLYEDDEGRARPSEYDLLWVPGRGPDGNAHNLRFEGMERQYASLPRGGPADPVDYLPAAPRGLYKERELPYYPGAHPMHPPKGSYPRPTELRVADLRYPQHYPPPPAPQHKGPFRQDVPPSPPQHQRMPAYQETGRPGPRGGSPDQYPYRTQDSRQKNPMTAAV

SEQ ID NO: 243810 - DNA, 3432 bp, Artificial Sequence
  derived and/or modified sequence
atgaaggtgaccgtgtgcttcggcagaaccggcatcgtggtgccctgcaaggagggccagctgagagtgggcgagctgacccagcaggccctgcagagatacctgaagaccagagagaagggccccggctactgggtgaagatccaccacctggagtacaccgacggcggcatcctggaccccgacgacgtgctggccgacgtggtggaggacaaggacaagctgatcgccgtgttcgaggagcaggagcccctgcacaagatcgagagccccagcggcaaccccgccgacagacagagccccgacgccttcgagaccgaggtggccgcccagctggccgccttcaagcccatcggcggcgagatcgaggtgacccccagcgccctgaagctgggcacccccctgctggtgagaagaagcagcgaccccgtgcccggcccccccgccgacacccagcccagcgccagccaccccggcggccagagcctgaagctggtggtgcccgacagcacccagaacctggaggacagagaggtgctgaacggcgtgcagaccgagctgctgaccagccccagaaccaaggacaccctgagcgacatgaccagaaccgtggagatcagcggcgagggcggccccctgggcatccacgtggtgcccttcttcagcagcctgagcggcagaatcctgggcctgttcatcagaggcatcgaggacaacagcagaagcaagagagagggcctgttccacgagaacgagtgcatcgtgaagatcaacaacgtggacctggtggacaagaccttcgcccaggcccaggacgtgttcagacaggccatgaagagccccagcgtgctgctgcacgtgctgcccccccagaacagagagcagtacgagaagagcgtgatcggcagcctgaacatcttcggcaacaacgacggcgtgctgaagaccaaggtgcccccccccgtgcacggcaagagcggcctgaagaccgccaacctgaccggcaccgacagccccgagaccgacgccagcgccagcctgcagcagaacaagagccccagagtgcccagactgggcggcaagcccagcagccccagcctgagccccctgatgggcttcggcagcaacaagaacgccaagaagatcaagatcgacctgaagaagggccccgagggcctgggcttcaccgtggtgaccagagacagcagcatccacggccccggccccatcttcgtgaagaacatcctgcccaagggcgccgccatcaaggacggcagactgcagagcggcgacagaatcctggaggtgaacggcagagacgtgaccggcagaacccaggaggagctggtggccatgctgagaagcaccaagcagggcgagaccgccagcctggtgatcgccagacaggagggccacttcctgcccagagagctggacggcagactgagaatgaacgaccagctgatcgccgtgaacggcgagagcctgctgggcaagagcaaccacgaggccatggagaccctgagaagaagcatgagcatggagggcaacatcagaggcatgatccagctggtgatcctgagaagacccgagagacccatggaggaccccgccgagtgcggcgccttcagcaagccctgcttcgagaactgccagaacgccgtgaccaccagcagaagaaacgacaacagcatcctgcaccccctgggcacctgcagcccccaggacaagcagaagggcctgctgctgcccaacgacggctgggccgagagcgaggtgccccccagccccaccccccacagcgccctgggcctgggcctggaggactacagccacagcagcggcgtggacagcgccgtgtacttccccgaccagcacatcaacttcagaagcgtgacccccgccagacagcccgagagcatcaacctgaaggccagcaagagcatggacctggtgcccgacgagagcaaggtgcacagcctggccggccagaagagcgagagccccagcaaggacttcggccccaccctgggcctgaagaagagcagcagcctggagagcctgcagaccgccgtggccgaggtgagaaagaacgacctgcccttccacagacccagaccccacatggtgagaggcagaggctgcaacgagagcttcagagccgccatcgacaagagctacgacggccccgaggagatcgaggccgacggcctgagcgacaagagcagccacagcggccagggcgccctgaactgcgagagcgccccccagggcaacagcgagctggaggacatggagaacaaggccagaaaggtgaagaagaccaaggagaaggagaagaagaaggagaagggcaagctgaaggtgaaggagaagaagagaaaggaggagaacgaggaccccgagagaaagatcaagaagaagggcttcggcgccatgctgagattcggcaagaagaaggaggacaagggcggcaaggccgagcagaagggcaccctgaagcacggcggcctgagagaggaggagctggagaagatgaaggaggagagagagagaatcggcgccaagcaccaggagctgagagagaagcaggccagaggcctgctggactacgccaccggcgccatcggcagcgtgtacgacatggacgacgacgagatggaccccaactacgccagagtgaaccacttcagagagccctgcaccagcgccaacgtgttcagaagccccagcccccccagagccggccccttcggctaccccagagacggccaccccctgagccccgagagagaccacctggagggcctgtacgccaaggtgaacaagccctaccaccccctggtgcccgccgacagcggcagacccaccggcggcagcaccgacagaatccagaagctgagaaaggagtactaccaggccagaagagagggcttccccctgtacgaggacgacgagggcagagccagacccagcgagtacgacctgctgtgggtgcccggcagaggccccgacggcaacgcccacaacctgagattcgagggcatggagagacagtacgccagcctgcccagaggcggccccgccgaccccgtggactacctgcccgccgcccccagaggcctgtacaaggagagagagctgccctactaccccggcgcccaccccatgcacccccccaagggcagctaccccagacccaccgagctgagagtggccgacctgagatacccccagcactacccccccccccccgccccccagcacaagggccccttcagacaggacgtgccccccagccccccccagcaccagagaatgcccgcctaccaggagaccggcagacccggccccagaggcggcagccccgaccagtacccctacagaacccaggacagcagacagaagaaccccatgaccgccgccgtgtag

SEQ ID NO: 243811 - DNA, 3432 bp, Artificial Sequence
  derived and/or modified sequence
atgaaggtaacagtatgcttcggcaggaccggcattgttgttccttgtaaggagggtcagcttagggtgggggagctcacgcagcaggccctgcaaaggtatttgaagacccgagagaagggcccaggatattgggtgaaaatacaccatctcgagtatacagacggcgggatcctggacccggacgatgtgctggctgacgtggtggaggataaggacaagctcatcgccgtatttgaggagcaggagccgcttcacaagattgagtcaccgagcggaaaccccgcagataggcagagccctgacgcattcgagactgaagtggctgctcaactggctgccttcaaacccatcggtggtgagatagaggtcactccatcagctctgaaactgggcacacccctcctcgtccgacggagctctgaccccgttcctgggccgcccgctgatacacagccttctgcgtcacacccagggggtcagtccctgaagttggtcgtgccagattctacacagaacctggaagacagagaggttttgaacggagtgcaaaccgagctgcttacatcacctagaaccaaagataccctgagtgatatgacgaggacagtagagatatccggagagggaggtcctctggggatccatgtggtcccattcttttcttctctaagcgggcggatcctgggactgtttatcaggggaattgaagataactctcgctctaaaagagagggcctgtttcatgagaatgagtgcatcgtgaagatcaataacgtcgacttggtggataagacgtttgcgcaggctcaagatgtatttcgtcaagcaatgaaatcaccaagtgtcttgctgcatgtgctgccaccacagaatcgagagcagtacgaaaaatcggttattggcagcctaaacatatttgggaataacgatggtgtcctgaagactaaagttcctcctcccgtccatggaaaatccggcctcaagacagccaacctcacaggtacagacagccccgaaaccgacgccagcgcttccttgcagcagaacaaaagtccacgcgtcccacggctcggggggaaaccttcgtccccatcattaagtccgctaatgggattcgggtcgaataagaatgctaaaaaaattaagatcgacctcaagaagggacctgaagggctcggcttcacagtcgtgaccagagacagcagtatacatgggcctggaccgatctttgtgaaaaatatattgccaaaaggcgcagccatcaaagacggccggctgcagagcggcgaccgcatcttggaagtgaacggtcgtgacgtcaccgggcggacgcaggaagagctggttgcaatgctgcggagcacaaaacagggagaaacagcgagcctggtaattgctcgccaggaggggcacttcttgcctcgcgaattggacggcaggctcagaatgaatgaccagctcattgcagtgaacggggagtccctcttgggaaaatcaaaccacgaagccatggagactctgcggcggtccatgtctatggagggaaatattcgtggtatgatacagttagtgatccttcgcaggcccgagcgtcctatggaggacccggctgagtgtggcgccttctccaagccctgtttcgagaactgtcagaatgcggtaaccacctccagacgaaacgacaattcgatcctgcacccattgggcacttgttcaccacaggacaaacagaagggcctgctgctccccaacgacggctgggcggaaagtgaagtgcctccttcccctacaccccatagtgctctgggtctcgggctggaagactattcacatagttcgggtgtggattctgccgtatactttccagaccagcatataaattttcgttctgttacgccagcacggcagccggagtcgatcaacctgaaggcgtctaagagcatggatctcgtccccgacgaatccaaggtccattccctggctggacaaaagtctgaatcccccagcaaagattttggtcccacgctgggtctgaagaagagcagcagtctcgagtcgctccagactgctgtggctgaagtacgcaagaacgacttgcctttccaccgcccgaggcctcatatggtacgcggccgcggttgcaatgagtcttttagggctgctattgacaagtcctacgacggccccgaagagatcgaagctgatggcttatctgacaagtcttcacacagcgggcagggggctcttaattgcgaaagtgccccacagggcaactcagaattagaggatatggaaaacaaggcccgaaaagtcaaaaaaactaaagaaaaagagaagaagaaggagaagggtaaacttaaggtgaaggaaaagaagcgcaaagaggaaaatgaagaccccgagcgaaaaattaagaaaaagggcttcggggcgatgctgagatttggtaagaagaaggaggacaaggggggcaaggctgagcagaagggaactctaaaacacggaggcctgagagaggaggaattagaaaagatgaaagaggagagagagagaataggtgccaagcaccaagagctccgggaaaagcaggccagagggctgctggactacgcgaccggcgctatcgggtccgtctacgatatggacgacgatgagatggacccaaattacgcccgggtgaatcatttcagggagccatgcactagcgcgaacgttttccggtcaccttcccccccacgcgccggacccttcgggtaccctagagacggtcatcccctgagccctgagcgagatcacttagaaggcctgtatgccaaggtgaataagccataccatcccctggtgcctgccgacagcggccggcccacaggtggatcgacagatcgcattcagaagctgaggaaggagtattatcaggctcggcgggagggcttcccattgtacgaggatgatgaaggcagggcaagaccatctgaatacgacctcctgtgggtgccaggaagaggccccgatggtaatgctcacaatctgagatttgaaggaatggagagacagtatgcctctctgccaagggggggcccagcagatcctgttgattatctgcccgccgccccacgaggtctgtataaggaaagggaactcccctactatcctggagctcaccccatgcatcctcctaagggttcctatccccgcccaaccgaactgcgcgttgccgacttgcgctaccctcagcactatccccccccccccgctccacaacacaaaggccccttccgccaggacgtgcctccaagccctcctcaacaccaaagaatgccagcttaccaggagaccgggcgcccagggccccggggggggtctcccgatcagtatccctaccgcacccaggacagcagacagaaaaaccctatgacggcagcagtgtag

SEQ ID NO: 243812 - DNA, 3432 bp, Artificial Sequence
  derived and/or modified sequence
atgaaggtgacagtgtgctttggaagaacaggcatcgtggtgccctgcaaggagggccagctgcgggtgggggagctgacccagcaggccctgcagcgctacctgaagacccgggagaagggccctggctactgggtgaagatccaccacctggagtacacagatggcggcatcctggaccctgatgatgtgctggctgatgtggtggaggacaaggacaagctgattgctgtgtttgaggagcaggagcccctgcacaagattgagagccccagcggcaacccagctgaccggcagagcccagatgcctttgaaacagaggtggccgcccagctggccgccttcaagcccatcggcggggagattgaggtgaccccatctgccctgaagctgggcacccccctgctggtgcggcgcagcagtgaccctgtgcccggccccccagctgacacccagcccagcgccagccaccctgggggccagagcctgaagctggtggtgcctgacagcacccagaacctggaggaccgggaggtgctgaatggagtgcagacagagctgctgaccagccccaggaccaaggacaccctgagtgacatgaccaggacagtggagatctctggagagggcggccccctgggcatccacgtggtgcccttcttcagcagcctgagcggccgcatcctgggcctcttcatccggggcatcgaggacaacagccgcagcaagcgggagggcctcttccatgaaaatgaatgcatcgtgaagatcaacaacgtggacctggtggacaagacctttgcccaggcccaggatgtgttccggcaggccatgaagagccccagcgtgctgctgcacgtgctgcccccccagaaccgggagcagtatgagaagtctgtgattggcagcctgaacatctttggaaataatgatggagtgctgaagaccaaggtgcccccacctgtgcacggcaagagcggcctgaagacagccaacctgaccggcacagacagccctgagacagatgccagcgccagcctgcagcagaacaagagcccccgggtgccccggctgggcggcaagcccagcagccccagcctgagccccctgatgggcttcggcagcaacaagaatgccaagaagatcaagattgacctgaagaagggccctgagggcctgggcttcaccgtggtgacccgggacagcagcatccacggccctggccccatctttgtgaagaacatcctgcccaagggggccgccatcaaggatggccgcctgcagagcggggaccgcatcctggaggtgaatggaagagatgtgacaggccgcacccaggaggagctggtggccatgctgcggagcaccaagcagggcgagacagccagcctggtgattgcccggcaggagggccacttcctgccccgggagctggatggccgcctgaggatgaatgaccagctgattgctgtgaatggagagagcctgctgggcaagagcaaccacgaggccatggagaccctgcggcgctccatgtccatggagggcaacatccggggcatgatccagctggtgatcctgcggcggcctgagcggcccatggaggaccctgcagaatgtggggccttcagcaagccctgctttgagaactgccagaatgctgtgaccaccagcagaagaaatgacaacagcatcctgcaccccctgggcacctgcagcccccaggacaagcagaagggcctgctgctgcccaatgatggctgggccgagagcgaggtgccccccagccccaccccccacagcgccctgggcctgggcctggaggactacagccacagcagcggcgtggacagcgctgtgtacttcccagaccagcacatcaacttccgctctgtgaccccagcccggcagcctgagagcatcaacctgaaggccagcaagtccatggacctggtgcctgatgagagcaaggtgcacagcctggccggccagaagtctgagagccccagcaaggactttggccccaccctgggcctgaagaagagcagcagcctggagagcctgcagacagctgtggccgaggtgaggaagaatgacctgcccttccaccggccccggccccacatggtgcggggccggggctgcaatgaaagcttccgggccgccatcgacaagagctatgatggccctgaggagattgaagcagatggcctgagtgacaagagcagccacagcggccagggcgccctgaactgtgagagcgccccccagggcaacagcgagctggaggacatggagaacaaggccaggaaggtgaagaagaccaaggagaaggagaagaagaaggagaagggcaagctgaaggtgaaggagaagaagaggaaggaggagaatgaagatcctgagaggaagatcaagaagaagggctttggagccatgctgcgctttgggaagaagaaggaggacaagggcggcaaggccgagcagaagggcaccctgaagcatggaggcctgcgggaggaggagctggagaagatgaaggaggagcgggagagaattggagccaagcaccaggagctgcgggagaagcaggcccggggcctgctggactatgccactggagccatcggctctgtgtatgacatggatgatgatgagatggaccccaactatgcccgggtgaaccacttccgggagccctgcaccagcgccaacgtgttccgcagccccagcccccccagggctggccccttcggctaccccagagatggccaccccctgagccctgagcgggaccacctggagggcctgtatgccaaggtgaacaagccctaccaccccctggtgcctgctgacagcggccggcccactggaggcagcacagaccgcatccagaagctgaggaaggagtactaccaggcccggcgggagggcttccccctgtatgaagatgatgagggccgggcccggcccagtgaatatgacctgctgtgggtgcccggccggggcccagatggaaatgcccacaacctgcgctttgagggcatggagcggcagtatgccagcctgccccggggcggccctgctgaccctgtggactacctgcctgctgccccccggggcctgtacaaggagcgggagctgccctactacccaggggcccaccccatgcacccccccaagggcagctacccccggcccacagagctgcgggtggccgacctgcgctacccccagcactacccacctcctccagccccccagcacaagggccccttccggcaggatgtgccccccagccccccccagcaccagaggatgcctgcctaccaggagaccggccggcccggcccccggggcggcagcccagaccagtacccctaccgcacccaggacagccggcagaagaaccccatgacagctgctgtgtag

SEQ ID NO: 243813 - DNA, 3432 bp, Artificial Sequence
  derived and/or modified sequence
atgaaggtgaccgtgtgcttcggccggaccggcatcgtggtgccctgcaaggaaggacagctccgagtgggagagctgacacagcaggctctgcagcggtacctgaaaactcgcgagaaggggcccggatattgggtgaagattcaccacctcgaatatactgacgggggtatcctagaccctgatgacgttctcgcagatgtggtcgaagataaagacaagctaatcgccgtcttcgaagaacaagagcctctccataagatagaatcaccctcgggcaatcccgctgatagacagtcccctgacgcatttgaaaccgaagtagctgctcagctggccgcattcaagcccatcggcggggaaatcgaggtgacacccagtgcccttaagctgggaaccccattactagtgagacggtcttctgacccagtccccggcccacctgctgacacgcagccatcagcttcacatcccggtgggcagtccctgaaacttgttgtccctgattcgacccagaatcttgaagatagggaggtgctgaacggggtacagacagagctcttgacgagcccccgcaccaaggatactctgagtgacatgacgcgcaccgtcgaaatcagcggagagggcgggccactgggaatccatgttgtgccattcttctcgtccttatctggacgaattcttggcctttttataagaggcatcgaggataactcgaggtctaaacgcgaaggtttgttccatgagaacgaatgcatcgtgaagattaacaacgtagacctcgttgacaagacgtttgctcaggcccaggatgtattccgtcaggccatgaaatctccaagcgtgctgctgcacgtcttgcccccccagaacagggaacaatacgaaaaatctgtcattggatcactgaatattttcggtaataatgacggcgtcctgaagacgaaggttcccccacccgtgcatggaaagtcaggattaaagacggccaatcttacagggacagacagccctgagaccgacgcttccgcctcactgcagcagaacaagtccccgagagtgccccgcctaggtggaaagccaagtagccctagcctttctcccctgatggggttcggcagcaacaagaacgcaaaaaagatcaaaatcgatcttaagaaaggccctgaaggtctgggtttcaccgtggtgactcgagacagttctattcacggaccgggacccatcttcgttaagaacattttgcccaagggggcggcaattaaggacggtcgactgcagagtggtgatcggattctggaggtgaacggacgggacgtgaccggaaggacccaggaagagctggttgcaatgctgcgcagcacaaaacaaggtgagaccgcctccctcgtcatagctcggcaggagggacacttccttcccagggaactggacgggaggttacggatgaatgatcaactgattgccgtgaatggagaatctctgttaggcaagtcgaaccacgaggcgatggagaccctacggcggtctatgagtatggaaggaaacataaggggcatgatccaattagtcatcctacggaggcctgagcgacccatggaagatcccgcagaatgcggagccttttctaaaccatgtttcgagaattgccagaatgccgtcacaacctctaggagaaatgataactccatccttcaccccctgggcacttgctccccacaggacaagcagaagggcctccttctcccaaatgacggttgggccgagtctgaggttccccctagccctacaccgcattcggctctggggctcggcctggaagattactctcatagcagcggggtggactccgccgtgtacttccccgaccagcacatcaatttccgcagcgtaacccccgcccgccagcccgaaagtattaatctgaaggcctccaagagcatggacttggttcccgacgagtccaaggtacactcactagccggacagaagagcgaatccccctcgaaggattttggccctaccttagggctgaagaaaagctcctctctggaatccctccaaaccgctgttgccgaggtgcggaaaaatgatcttcccttccaccgcccccgtccccacatggtgcgcgggcggggatgcaacgaatctttcagagcggccattgacaagagttacgacggtccagaagagatcgaggcagacggtttatccgataaaagctcacatagtggccaaggcgcccttaactgtgagtcagctcctcaggggaacagcgagctggaggatatggaaaataaagcccgcaaggttaagaaaactaaagagaaggagaagaagaaggagaaagggaagcttaaagtaaaggaaaagaaacgtaaggaggagaacgaggacccagaacgaaaaattaaaaaaaagggtttcggagccatgctcaggttcggaaagaaaaaagaggataaaggagggaaagccgagcagaagggcactttgaaacacgggggcttgagggaggaggagctagagaagatgaaagaggagcgcgaaagaatcggcgcgaagcaccaggaactccgggaaaaacaggcaagaggcctgctggattatgcgactggagcgattggcagtgtctacgacatggacgacgatgaaatggatcccaattatgcccgagtaaatcattttcgtgaaccatgcacatcagctaatgtcttcagatcaccctcccccccacgtgcaggcccgtttgggtacccgagggatggccacccacttagcccggagcgcgatcacctagaggggctatacgctaaggtgaacaagccataccaccctctggtcccagctgactccggacgccctactgggggtagcactgataggatccaaaaattaagaaaagaatactatcaggcaaggcgggagggatttccactttatgaggacgatgaaggacgggcgcggccctccgagtatgatctgctgtgggttccaggacggggacccgatggcaatgctcataatttgaggttcgagggcatggaaagacagtacgcaagtcttccacggggaggcccagcagacccagtggattacctcccagcagcgccccggggtctgtataaggagagagaactgccatattatcccggagcccatcctatgcacccccctaagggttcctaccccagacccacagagcttcgtgtggctgacctccgatacccccaacactaccccccccctccagcacctcaacacaagggccccttcagacaggatgttccacccagcccgcctcagcatcaaaggatgccagcctaccaggaaacgggccgaccagggcctagaggcgggagtccagaccagtacccttacaggactcaggattcccgacagaagaaccctatgacggcagcagtttag

SEQ ID NO: 243814 - DNA, 3432 bp, Artificial Sequence
  derived and/or modified sequence
atgaaagtgaccgtgtgcttcggcaggacgggcatcgtggtgccctgcaaggagggccagctgcgcgtcggcgagctcacccagcaggcgctgcagcggtacctgaagacccgggagaagggtcctggttactgggtgaagattcatcacttagaatatacagatggaggaatcctggatccagatgatgtcttggcagatgttgttgaagataaagacaagctgattgctgtgtttgaagaacaagaaccactccacaagattgagagccccagtggaaaccctgcagatcggcagagcccagatgcttttgagacagaagtggccgcccaactggccgcatttaagccaattggtggggagattgaagtaaccccttctgctctaaaactaggcactccactgctggtgaggagaagcagtgacccagtgccaggcccacctgctgatacccagccaagcgcttcacaccctggtggccagagtctgaaactggttgttccagattccacgcagaacttggaagacagagaagttttgaatggtgtacagacagaactactaacttcgccaagaactaaggacacattgagtgatatgacaagaacagtggagatttctggggaaggaggcccattgggaatacatgtagtgcccttcttttcatctctgagtggaaggattctaggactcttcatccgaggcattgaagacaacagcaggtccaagcgggagggactatttcacgaaaatgaatgtattgtaaaaatcaacaatgtggatctcgtagacaaaacctttgctcaggctcaagatgtcttccgccaggcaatgaaatctccaagtgtgctcctccacgtgcttcctccacaaaaccgtgaacagtatgaaaagtcagtcattggctctcttaacatttttggtaataatgatggcgttttgaaaaccaaagtgccgcctcctgtccatggaaaatcgggactaaagacagcaaatctcacaggaaccgatagtcctgaaacagatgcatcagcttccctgcaacaaaacaagagtccccgagtaccaaggctgggaggaaaaccatcctctccctcactctcgcctctcatgggatttggcagcaataaaaatgcaaagaaaattaagattgacctaaagaaaggccctgaaggacttggtttcactgtggttaccagagactcttccatacatggtcccggtcccatttttgtaaaaaacattttaccaaagggagcagcaataaaagatggccgcctacaatcaggggacagaattttggaggtaaatgggagagatgtcaccggacgaacccaggaagagcttgtggccatgctcaggagcaccaagcagggggagacagcatcgctggtcattgcccgccaagaaggacattttctgccccgagagttggatggtcgtctgcgaatgaatgaccagctgattgcagttaatggggaatctcttttgggaaagtccaaccacgaagctatggaaacacttaggcggtcaatgtccatggagggaaacatccgagggatgatccagttggtgattctgaggaggccagagagaccaatggaggatcctgcagagtgtggggcattttccaagccatgctttgagaactgtcaaaatgctgtaaccacctctaggcgaaatgataatagtatcctgcatccacttggcacttgcagtccacaagacaaacagaaaggtctattgctgcccaatgacggatgggccgagagtgaagttccaccttctccaacaccacattctgctctgggattgggcctcgaagattacagccacagctctggggtggattcagcagtatattttccagatcagcacatcaacttcagatctgtgacaccggccaggcagcctgaatcaattaatttgaaagcctcgaagagcatggaccttgtgccagatgaaagcaaggttcactcattggctggacaaaaatcggaatctccaagcaaagattttggtccaactctgggtttgaaaaagtccagctccttggagagtctgcagactgcagtggccgaggtcaggaagaatgaccttccctttcacaggccccggccgcacatggttcgaggccgaggctgcaatgagagctttagagcagccattgacaaatcctacgatggacctgaagaaatagaagctgacggtctgtctgataagagctctcactctggccaaggagctctgaattgtgagtctgcccctcaggggaattcggagctagaggacatggaaaataaagccaggaaagtcaaaaaaacgaaagagaaggagaagaaaaaggaaaagggcaaattgaaagtcaaggagaaaaagcgcaaagaggagaatgaagatccagaaaggaaaataaagaagaagggcttcggcgccatgctgagatttggaaagaagaaagaggataagggtggaaaggctgagcagaaaggtactctgaaacatggtggcctgagagaagaagagctggagaaaatgaaagaagagcgtgaaaggattggagcaaaacatcaggagctaagggaaaagcaggcaagaggtcttcttgattatgctactggtgcaattggatcagtgtatgatatggatgatgatgaaatggaccccaattatgccagagtgaaccactttcgggaaccatgcacatcagcaaatgtctttagatctccatctccccctcgagctggaccatttggttaccctcgggatggccatccactgtctccagaaagagaccacttagagggtctctatgccaaggtcaacaagccataccatccactggttccagctgacagtggccgtcctacgggtggaagcactgaccgtatccagaagttgcggaaagagtattatcaggctcggagggaaggtttccctttatatgaagacgacgaaggaagagcaaggccatctgagtatgacctactctgggtgcctggaaggggtccagatgggaatgcacacaacctccgctttgaagggatggagaggcagtacgcatccttacccaggggaggacccgcagatcctgtagactatctgccagcagcacctcgggggctctacaaggaaagggagcttccctattatccaggggctcatcctatgcaccctcccaaagggagctatccccgccccacagagctcagggtggcagatctccggtatcctcagcactacccacccccgccagctccccagcacaaaggaccctttcgacaagacgttccgccttcccctccccagcaccaaagaatgccagcctatcaggaaacaggcagaccagggccccgtgggggcagcccagaccagtacccttaccgaacccaggattcccggcagaagaaccccatgactgcagccgtatag

SEQ ID NO: 243815 - DNA, 3432 bp, Artificial Sequence
  derived and/or modified sequence
atgaaggtcacagtatgcttcggacgcacaggcatcgtggtgccatgtaaagaggggcagctgcgggtcggggagttaacccagcaggccctgcaaagatatctgaagacacgagaaaaaggccctgggtactgggtgaagatccaccatctagagtataccgacggcggtatcctggatcctgatgatgtcctggctgatgtggttgaggataaggacaagctgatcgccgttttcgaggaacaggaacccctacacaaaatcgaaagtccatccgggaatcctgcagaccggcagtccccagacgcattcgagaccgaagtcgccgcacaattggccgcatttaagccaatcggtggcgagatcgaggtcacaccctctgccctcaaactggggaccccattactcgttcggcgaagctcagaccccgtgccgggacctccagccgacacccaaccaagtgcaagccaccccggaggccagtcacttaagctcgtggtcccagattctacacagaatctcgaggatcgggaagtactgaatggggtgcaaaccgaactgctgacgagcccaagaacaaaggacacactgtccgatatgacccggactgtggagatttctggagaaggcggaccgctgggtatccacgtggtcccgttcttctcatcgctttcaggcaggatactcggtctgttcatccgcggaatcgaggacaacagccgctcgaagagggaaggattgttccacgagaatgagtgcatcgtcaaaattaacaacgtggacctcgtagacaaaacgtttgcccaagcgcaggatgtctttagacaggcaatgaagagcccttcagtgctgttgcacgtcctgccgccacagaatagagagcagtacgagaagtctgtcatcgggagcctcaatattttcggcaacaacgacggcgtgctgaaaaccaaggtgccacctccagttcatggaaaatctggcctcaagacagccaatttaactggtaccgactcccctgaaacggatgcctccgcatctcttcagcaaaataaatcgccaagagtccccaggctaggcggaaaaccgtcaagtccctcactatcccctctgatgggtttcggcagtaataaaaacgcaaagaaaattaagatagatctcaagaagggtccagaagggctcgggttcaccgtggtgacgcgggactccagcatccacggcccaggccctatctttgtgaagaatatactgcccaagggtgcggcaatcaaagacggccgactgcaatcgggcgataggattttggaagtaaatgggagggacgttaccggcaggactcaggaagaactcgtcgcgatgctgcgctcaactaaacagggcgaaactgcgtcactggtgatcgcgaggcaggaaggccacttccttcctcgggagctggacggaaggttgaggatgaacgatcaactgatagctgtgaacggcgagtccttacttggtaagagtaatcatgaggcgatggagacactcaggcgatctatgtctatggaaggaaacattcggggtatgatccagcttgtaatcctccgtaggccagagcggccaatggaggatcccgctgaatgtggcgctttttctaaaccgtgtttcgagaattgtcagaacgctgtcaccactagtcgacggaatgataatagcattctccacccactgggcacttgtagcccccaggacaagcagaaaggtctgctcctccctaatgacggatgggcggagagcgaggtgccaccttctcctactccccactcagcacttggcttgggactggaagattatagccattccagcggggtggacagtgccgtttattttcccgatcagcacataaattttcggagtgtgactcccgcaagacaaccagagagcattaatctcaaggcctcaaagtccatggatttggttcctgatgagtcaaaagtgcactcactggctggccaaaaaagcgagtctccatcgaaggatttcggccctacattaggtctgaagaagtcaagtagcctggaaagcctgcagacggctgttgcagaggtgaggaagaatgatctcccctttcacagacctaggcctcacatggtcaggggaagaggttgcaacgagagctttcgagccgcaatcgacaagtcttatgatgggccagaggaaattgaggcagatggcttatctgataaatcttcacacagtgggcaaggggcactgaactgcgagtcggctcctcagggcaattccgagctggaagacatggagaataaggccaggaaggtcaaaaagaccaaggaaaaggagaagaagaaggagaaaggcaaactgaaagtgaaggagaagaaacggaaggaagagaatgaagaccctgagagaaagattaaaaaaaaaggatttggggctatgcttcgtttcggcaagaagaaagaggataaaggaggcaaagccgagcagaaaggcaccctgaaacacgggggactgcgggaagaggaactcgagaagatgaaagaggagagggagagaatcggcgctaagcaccaggagctgagggagaagcaggcacgaggcttgctcgactacgccactggagctatcggcagtgtgtatgacatggacgacgacgaaatggatccaaactatgcgcgagtgaatcacttccgagaaccttgtacgtcagccaatgtgtttaggagcccttcaccgccaagggcgggacccttcggttatccccgtgacggacaccccctaagccctgagcgggatcatcttgaggggctgtatgctaaagtcaataaaccttatcacccattagtgccagctgactccggccgtcccaccggcggtagtaccgacagaattcagaagcttagaaaagagtactaccaggcacgaagagagggctttcccctgtacgaagacgacgaagggagggcgcgacccagtgagtatgatctcctctgggtgccgggtagaggacctgatggaaacgcccataacctgagatttgaaggaatggaacgccaatacgcctccttgcccaggggtggtcctgccgatcccgtggactacttacccgctgccccaagagggctatataaggaacgggagctgccctattatccaggtgcccacccaatgcaccctcctaaagggtcctaccctcgacccacagaactaagagtggctgacttgaggtatcctcagcattaccccccacctcccgcacctcagcataaagggccattccggcaagatgtgcctccgagtccaccgcagcaccagcgtatgcctgcctaccaagagacaggcaggcctggaccacggggaggttcacccgaccagtacccatatcgaactcaggactcaaggcagaagaatccgatgactgccgcagtgtag

SEQ ID NO: 243816 - protein, 870 aa, Artificial Sequence
  derived and/or modified sequence
MNSNLPAENLTIAVNMTKTLPTAVTHGFNSTNDPPSMSITRLFPALLECFGIVLCGYIAGRANVITSTQAKGLGNFVSRFALPALLFKNMVVLNFSNVDWSFLYSILIAKASVFFIVCVLTLLVASPDSRFSKAGLFPIFATQSNDFALGYPIVEALYQTTYPEYLQYIYLVAPISLMMLNPIGFIFCEIQKWKDTQNASQNKIKIVGLGLLRVLQNPIVFMVFIGIAFNFILDRKVPVYVENFLDGLGNSFSGSALFYLGLTMVGKIKRLKKSAFVVLILLITAKLLVLPLLCREMVELLDKGDSVVNHTSLSNYAFLYGVFPVAPGVAIFATQFNMEVEIITSGMVISTFVSAPIMYVSAWLLTFPTMDPKPLAYAIQNVSFDISIVSLISLIWSLAILLLSKKYKQLPHMLTTNLLIAQSIVCAGMMIWNFVKEKNFVGQILVFVLLYSSLYSTYLWTGLLAISLFLLKKRERVQIPVGIIIISGWGIPALLVGVLLITGKHNGDSIDSAFFYGKEQMITTAVTLFCSILIAGISLMCMNQTAQAGSYEGFDQSQSHKVVEPGNTAFEESPAPVNEPELFTSSIPETSCCSCSMGNGELHCPSIEPIANTSTSEPVIPSFEKNNHCVSRCNSQSCILAQEEEQYLQSGDQQLTRHVLLCLLLIIGLFANLSSCLWWLFNQEPGRLYVELQFFCAVFNFGQGFISFGIFGLDKHLIILPFKRRLEFLWNNKDTAENRDSPVSEEIKMTCQQFIHYHRDLCIRNIVKERRCGAKTSAGTFCGCDLVSWLIEVGLASDRGEAVIYGDRLVQGGVIQHITNEYEFRDEYLFYRFLQKSPEQSPPAINANTLQQERYKEIEHSSPPSHSPKT

SEQ ID NO: 243817 - protein, 264 aa, Artificial Sequence
  derived and/or modified sequence
MITTAVTLFCSILIAGISLMCMNQTAQAGSYEGFDQSQSHKVVEPGNTAFEESPAPVNEPELFTSSIPETSCCSCSMGNGELHCPSIEPIANTSTSEPVIPSFEKNNHCVSRCNSQSCILAQEEEQYLQSGDQQLTRHVLLCLLLIIGLFANLSSCLWWLFNQEPGRLYVELQFFCAVFNFGQGFISFGIFGLDKHLIILPFKRRLEFLWNNKDTAENRDSPVSEEIKMTCQQFIHYHRDLCIRNIVKERRCGAKTSAGTFCGC

SEQ ID NO: 243818 - DNA, 2613 bp, Artificial Sequence
  derived and/or modified sequence
atgaacagcaacctgcccgccgagaacctgaccatcgccgtgaacatgaccaagaccctgcccaccgccgtgacccacggcttcaacagcaccaacgacccccccagcatgagcatcaccagactgttccccgccctgctggagtgcttcggcatcgtgctgtgcggctacatcgccggcagagccaacgtgatcaccagcacccaggccaagggcctgggcaacttcgtgagcagattcgccctgcccgccctgctgttcaagaacatggtggtgctgaacttcagcaacgtggactggagcttcctgtacagcatcctgatcgccaaggccagcgtgttcttcatcgtgtgcgtgctgaccctgctggtggccagccccgacagcagattcagcaaggccggcctgttccccatcttcgccacccagagcaacgacttcgccctgggctaccccatcgtggaggccctgtaccagaccacctaccccgagtacctgcagtacatctacctggtggcccccatcagcctgatgatgctgaaccccatcggcttcatcttctgcgagatccagaagtggaaggacacccagaacgccagccagaacaagatcaagatcgtgggcctgggcctgctgagagtgctgcagaaccccatcgtgttcatggtgttcatcggcatcgccttcaacttcatcctggacagaaaggtgcccgtgtacgtggagaacttcctggacggcctgggcaacagcttcagcggcagcgccctgttctacctgggcctgaccatggtgggcaagatcaagagactgaagaagagcgccttcgtggtgctgatcctgctgatcaccgccaagctgctggtgctgcccctgctgtgcagagagatggtggagctgctggacaagggcgacagcgtggtgaaccacaccagcctgagcaactacgccttcctgtacggcgtgttccccgtggcccccggcgtggccatcttcgccacccagttcaacatggaggtggagatcatcaccagcggcatggtgatcagcaccttcgtgagcgcccccatcatgtacgtgagcgcctggctgctgaccttccccaccatggaccccaagcccctggcctacgccatccagaacgtgagcttcgacatcagcatcgtgagcctgatcagcctgatctggagcctggccatcctgctgctgagcaagaagtacaagcagctgccccacatgctgaccaccaacctgctgatcgcccagagcatcgtgtgcgccggcatgatgatctggaacttcgtgaaggagaagaacttcgtgggccagatcctggtgttcgtgctgctgtacagcagcctgtacagcacctacctgtggaccggcctgctggccatcagcctgttcctgctgaagaagagagagagagtgcagatccccgtgggcatcatcatcatcagcggctggggcatccccgccctgctggtgggcgtgctgctgatcaccggcaagcacaacggcgacagcatcgacagcgccttcttctacggcaaggagcagatgatcaccaccgccgtgaccctgttctgcagcatcctgatcgccggcatcagcctgatgtgcatgaaccagaccgcccaggccggcagctacgagggcttcgaccagagccagagccacaaggtggtggagcccggcaacaccgccttcgaggagagccccgcccccgtgaacgagcccgagctgttcaccagcagcatccccgagaccagctgctgcagctgcagcatgggcaacggcgagctgcactgccccagcatcgagcccatcgccaacaccagcaccagcgagcccgtgatccccagcttcgagaagaacaaccactgcgtgagcagatgcaacagccagagctgcatcctggcccaggaggaggagcagtacctgcagagcggcgaccagcagctgaccagacacgtgctgctgtgcctgctgctgatcatcggcctgttcgccaacctgagcagctgcctgtggtggctgttcaaccaggagcccggcagactgtacgtggagctgcagttcttctgcgccgtgttcaacttcggccagggcttcatcagcttcggcatcttcggcctggacaagcacctgatcatcctgcccttcaagagaagactggagttcctgtggaacaacaaggacaccgccgagaacagagacagccccgtgagcgaggagatcaagatgacctgccagcagttcatccactaccacagagacctgtgcatcagaaacatcgtgaaggagagaagatgcggcgccaagaccagcgccggcaccttctgcggctgcgacctggtgagctggctgatcgaggtgggcctggccagcgacagaggcgaggccgtgatctacggcgacagactggtgcagggcggcgtgatccagcacatcaccaacgagtacgagttcagagacgagtacctgttctacagattcctgcagaagagccccgagcagagcccccccgccatcaacgccaacaccctgcagcaggagagatacaaggagatcgagcacagcagcccccccagccacagccccaagacctag

SEQ ID NO: 243819 - DNA, 3930 bp, Artificial Sequence
  derived and/or modified sequence
cccaccttactttatcggaacgtgcctaagctgctgcagctggcacccggttgcgctcggcgaagagggctgggggcgggagatgacggtggtcttctccctgcttggcaccctgcgagcaccagctcccttctcctcgccactccaaggttgcagacgaagcaggtactgtcctagatgttaaggacacaacattgagcaaaaacatgcatagtccctgcttccgtgacacttgagtgaactgaatgtgcaaagtccctgtggcacaaagtccctggggccagtgtgtgtggcgggtgtagaaggagctaaagagatctggttggagttggagggtgagagaaaatgaattctaatttacctgcagagaacttaaccattgcagtcaatatgaccaagactttgcctacagcagtaacgcatggatttaattccactaatgacccaccttcaatgtcaattacaaggctttttccagccttactggaatgctttggcattgtcctttgtggctacatagcaggaagggccaatgtcataacatcaacccaggccaaaggactaggaaattttgtctccagatttgcacttccagctttattattcaaaaacatggttgtacttaatttttccaatgtggactggtccttcctatatagtatcttaattgccaaagcttctgtatttttcattgtatgtgtattaaccttattggttgccagtcctgatagtcgatttagcaaagctggactattccctatttttgctacacaaagtaatgactttgcattgggataccctatagttgaagctttatatcaaactacatacccagaatatctccagtacatttatttggtggcaccaatatctcttatgatgttaaaccctatagggtttattttctgtgaaatccaaaagtggaaagacactcaaaatgcttctcaaaataaaataaaaattgtgggactcggactcctgcgtgtattacagaacccaatagtatttatggtcttcattggcatcgccttcaattttattcttgatcgaaaggtacctgtatatgtcgaaaattttcttgatggacttggaaattctttttctggatcagccctattttatcttggtctcacgatggtgggaaaaataaagagactgaagaagtcggcatttgtagtactaattcttctcatcacagctaaacttctggtgctgccacttctgtgcagagaaatggtggaactcttggacaagggcgacagtgtggtgaaccatacaagtttatcaaattatgcatttctgtatggtgtatttcctgtagcaccaggagtggctatctttgcaacacaattcaacatggaagtagaaattataacctcagggatggtgataagcacatttgtgtctgctcccatcatgtacgtttctgcctggttactgacctttcccactatggaccctaagccattggcatatgccatccagaatgttagttttgatataagtattgtcagcctgatctccttgatctggtctctggctattcttcttttgagtaagaaatataaacagcttcctcatatgcttacaactaatttactcattgctcagtctattgtctgtgctggaatgatgatatggaattttgttaaagaaaaaaattttgttggacaaattttggtgtttgttctattgtacagctccctctatagcacctacctgtggacaggccttctagcaatttctttgtttcttttgaaaaagcgagagagggtacaaattcctgttggaataatcataatatctggctggggaattcctgctctccttgttggtgttcttttgataactggaaaacacaatggagatagcattgactcagccttcttttatggaaaagaacagatgatcaccacagcagtcaccctgttctgcagcatcctgatagctggcatatccctcatgtgcatgaaccagactgcccaagcaggaagctatgaaggtttcgatcagtctcagagccacaaagtggtggagcctggaaatactgcttttgaggagagtccagcaccagtaaatgaaccagaactttttacaagctctattccagaaacaagttgctgctcctgctccatgggaaatggtgaattacactgcccatcaatagagccaatagcaaacacaagcaccagtgagcctgtgattccttcgtttgagaaaaacaatcattgtgtgagtcgctgtaactcccagagctgcatattagcccaggaagaagaacagtatctacagagtggagaccagcaactgacccgacatgtgttgctgtgtttacttctcatcattggcctgttcgctaatctttccagttgtttatggtggctattcaaccaagagcctggaagactttatgttgagttacagtttttctgtgccgtgtttaactttggtcagggatttatttcctttggaatctttggattagataaacatttaatcatcctgcctttcaaaagaagacttgaattcctatggaacaataaagacacagcagaaaacagggattctcctgtttcagaggaaataaaaatgacctgtcaacaatttatccattatcaccgtgacctctgtatccgaaacattgtcaaagaaagaaggtgtggtgcaaagacttctgctggaactttctgtggctgtgacctggtgagctggctaattgaagtcggccttgcctccgaccgtggtgaagctgtgatatacggagacaggctggtacaagggggagtcatccaacatattaccaacgagtatgaattccgggatgagtacttgttttacagatttcttcaaaagagtcctgaacagagtcctcctgctattaatgcaaacactctccaacaggaaagatataaagaaattgagcattcatccccaccctcacattcccctaagacctaaattatgcaggggagaaccctacatggaatcatattctagccgcgtattcattagtttttagctgggtgaccttgggcaagttaacagaggcaacctctctgagcctcagttgtctcttctgtaaaatgtgaaaagatgtgctcccaccacatgcgcagggtctgtgattttacatgtatgtaaaacacataggaagctgacttaggaaaaagagaaaaccaaattaaagttctgataatgaatataatatagtcatcctttagtatccaaggggattggttccaggactcctgaagatcccaaaatctgaggatactcaagtcccttatataaaatggtgtaggccgggcatggtggctcacgcctgtaatcccagtactttgggaggccgagtcaggtggatcacctgaggtcaggagttcaagaccagcctggccaacatggcgaaaccccgtctctactataaaatacaaaaaattagttgggtgtggtggcgggtgcctgtaatcccagctactcaggaggctgaggcaggagaatcgcttgaatctgggaggcagaggttgctgtgagccgagatcgtgccactgcactccagcctgagcaacagagcaagactctatctcaaaaataaaataaaataaaataaaataattaataaaatggtgtagtatttgcatataacctatgcacattctcccatatagtttaatcatctttagatacttataatgcctaatacaatgtaaatgctatgtaaatagttgttgttatactgtattgtttagggaataacaataagaaaaacagtctgtacatgttcactacagatgcaaccattgttaagcctgactacatctttttatctgcggttgattgaatctatggatgtggaacctgtgcatatggagggtcaactgtactataaataatacgaatatgccaacattatataatcattgctttctgcaa

SEQ ID NO: 243820 - DNA, 4876 bp, Artificial Sequence
  derived and/or modified sequence
gggggcggggcctcgcggccggcgaggggctgagctgacagggccgcatcggcttaccccaccttactttatcggaacgtgcctaagctgctgcagctggcacccggttgcgctcggcgaagagggctgggggcgggagatgacggtggtcttctccctgcttggcaccctgcgagcaccagctcccttctcctcgccactccaaggttgcagacgaagcagatgtgattataaagacttcagtggaataatcgcaagttcccatgtgagatctggttggagttggagggtgagagaaaatgaattctaatttacctgcagagaacttaaccattgcagtcaatatgaccaagactttgcctacagcagtaacgcatggatttaattccactaatgacccaccttcaatgtcaattacaaggctttttccagccttactggaatgctttggcattgtcctttgtggctacatagcaggaagggccaatgtcataacatcaacccaggccaaaggactaggaaattttgtctccagatttgcacttccagctttattattcaaaaacatggttgtacttaatttttccaatgtggactggtccttcctatatagtatcttaattgccaaagcttctgtatttttcattgtatgtgtattaaccttattggttgccagtcctgatagtcgatttagcaaagctggactattccctatttttgctacacaaagtaatgactttgcattgggataccctatagttgaagctttatatcaaactacatacccagaatatctccagtacatttatttggtggcaccaatatctcttatgatgttaaaccctatagggtttattttctgtgaaatccaaaagtggaaagacactcaaaatgcttctcaaaataaaataaaaattgtgggactcggactcctgcgtgtattacagaacccaatagtatttatggtcttcattggcatcgccttcaattttattcttgatcgaaaggtacctgtatatgtcgaaaattttcttgatggacttggaaattctttttctggatcagccctattttatcttggtctcacgatggtgggaaaaataaagagactgaagaagtcggcatttgtagtactaattcttctcatcacagctaaacttctggtgctgccacttctgtgcagagaaatggtggaactcttggacaagggcgacagtgtggtgaaccatacaagtttatcaaattatgcatttctgtatggtgtatttcctgtagcaccaggagtggctatctttgcaacacaattcaacatggaagtagaaattataacctcagggatggtgataagcacatttgtgtctgctcccatcatgtacgtttctgcctggttactgacctttcccactatggaccctaagccattggcatatgccatccagaatgttagttttgatataagtattgtcagcctgatctccttgatctggtctctggctattcttcttttgagtaagaaatataaacagcttcctcatatgcttacaactaatttactcattgctcagtctattgtctgtgctggaatgatgatatggaattttgttaaagaaaaaaattttgttggacaaattttggtgtttgttctattgtacagctccctctatagcacctacctgtggacaggccttctagcaatttctttgtttcttttgaaaaagcgagagagggtacaaattcctgttggaataatcataatatctggctggggaattcctgctctccttgttggtgttcttttgataactggaaaacacaatggagatagcattgactcagccttcttttatggaaaagaacagatgatcaccacagcagtcaccctgttctgcagcatcctgatagctggcatatccctcatgtgcatgaaccagactgcccaagcaggaagctatgaaggtttcgatcagtctcagagccacaaagtggtggagcctggaaatactgcttttgaggagagtccagcaccagtaaatgaaccagaactttttacaagctctattccagaaacaagttgctgctcctgctccatgggaaatggtgaattacactgcccatcaatagagccaatagcaaacacaagcaccagtgagcctgtgattccttcgtttgagaaaaacaatcattgtgtgagtcgctgtaactcccagagctgcatattagcccaggaagaagaacagtatctacagagtggagaccagcaactgacccgacatgtgttgctgtgtttacttctcatcattggcctgttcgctaatctttccagttgtttatggtggctattcaaccaagagcctggaagactttatgttgagttacagtttttctgtgccgtgtttaactttggtcagggatttatttcctttggaatctttggattagataaacatttaatcatcctgcctttcaaaagaagacttgaattcctatggaacaataaagacacagcagaaaacagggattctcctgtttcagaggaaataaaaatgacctgtcaacaatttatccattatcaccgtgacctctgtatccgaaacattgtcaaagaaagaaggtgtggtgcaaagacttctgctggaactttctgtggctgtgacctggtgagctggctaattgaagtcggccttgcctccgaccgtggtgaagctgtgatatacggagacaggctggtacaagggggagtcatccaacatattaccaacgagtatgaattccgggatgagtacttgttttacagatttcttcaaaagagtcctgaacagagtcctcctgctattaatgcaaacactctccaacaggaaagatataaagaaattgagcattcatccccaccctcacattcccctaagacctaaattatgcaggggagaaccctacatggaatcatattctagccgcgtattcattagtttttagctgggtgaccttgggcaagttaacagaggcaacctctctgagcctcagttgtctcttctgtaaaatgtgaaaagatgtgctcccaccacatgcgcagggtctgtgattttacatgtatgtaaaacacataggaagctgacttaggaaaaagagaaaaccaaattaaagttctgataatgaatataatatagtcatcctttagtatccaaggggattggttccaggactcctgaagatcccaaaatctgaggatactcaagtcccttatataaaatggtgtaggccgggcatggtggctcacgcctgtaatcccagtactttgggaggccgagtcaggtggatcacctgaggtcaggagttcaagaccagcctggccaacatggcgaaaccccgtctctactataaaatacaaaaaattagttgggtgtggtggcgggtgcctgtaatcccagctactcaggaggctgaggcaggagaatcgcttgaatctgggaggcagaggttgctgtgagccgagatcgtgccactgcactccagcctgagcaacagagcaagactctatctcaaaaataaaataaaataaaataaaataattaataaaatggtgtagtatttgcatataacctatgcacattctcccatatagtttaatcatctttagatacttataatgcctaatacaatgtaaatgctatgtaaatagttgttgttatactgtattgtttagggaataacaataagaaaaacagtctgtacatgttcactacagatgcaaccattgttaagcctgactacatctttttatctgcggttgattgaatctatggatgtggaacctgtgcatatggagggtcaactgtactataaataatacgaatatgccaacattatataatcattgctttctgcaactgtttactataatttcaaaattaatatcctattaactgttcctataaattatcaaatttggcaagtgtattactagcaggagatggaccttaaattatgacaactttatattttttgatagcatctcttgaaaaagaattttaatgattctaataagaggttctttttcttttttccatttccttgacaaatagtactcatttaaaaactagagggctaggcttagtggctcacgcctgtaatctcagcactttgggaggctgaggcgggcagatcgcttgaggtcaggagttcaagaccagcccgggcaacgtggtgaaacccggtctgtactaaaaaaaaaaaaaaagaaaaagaaaaagaaaaaagaatacccaggtgtggtagtgcatgcctgtagtcccagctactttggagactgaggtgggagtaccccttgagcctgggaggcgcaggttgcagtgaaccaagatcacatcactgcacttcaacctgggtgacagagcaagaccctgtctcaaaaacaaaaaacaagcaaaaaaaacctagaggcactatttttttttaaagtttgtcttttcttttctacccaaattactaatctatgccattaaggaaaggaataagaacctccatatgtattattatctccacagtcctgcagaagtacaatctgatctttaactttcatgctacaaataataatttgagtagattaatttgaattttatcaacaaaattattgccatatgatgtatcatttctgtgtttgaacaaagcatcgtaatgcaggataacttctactttattccctgtagttaaaaaaaaaaaaactatatagttcaagccaatatttaaaaattctaaacctaggctgggcatggtgactcatacctgtaatcccagcactttgggaggccgaggcaggtgaattgcttcagcccaggagttcgagaccagcctggccaatgtggtgaaaccccatctctac

SEQ ID NO: 243821 - DNA, 6730 bp, Artificial Sequence
  derived and/or modified sequence
gcggccggcgaggggctgagctgacagggccgcatcggcttaccccaccttactttatcggaacgtgcctaagctgctgcagctggcacccggttgcgctcggcgaagagggctgggggcgggagatgacggtggtcttctccctgcttggcaccctgcgagcaccagctcccttctcctcgccactccaaggttgcagacgaagcagagatctggttggagttggagggtgagagaaaatgaattctaatttacctgcagagaacttaaccattgcagtcaatatgaccaagactttgcctacagcagtaacgcatggatttaattccactaatgacccaccttcaatgtcaattacaaggctttttccagccttactggaatgctttggcattgtcctttgtggctacatagcaggaagggccaatgtcataacatcaacccaggccaaaggactaggaaattttgtctccagatttgcacttccagctttattattcaaaaacatggttgtacttaatttttccaatgtggactggtccttcctatatagtatcttaattgccaaagcttctgtatttttcattgtatgtgtattaaccttattggttgccagtcctgatagtcgatttagcaaagctggactattccctatttttgctacacaaagtaatgactttgcattgggataccctatagttgaagctttatatcaaactacatacccagaatatctccagtacatttatttggtggcaccaatatctcttatgatgttaaaccctatagggtttattttctgtgaaatccaaaagtggaaagacactcaaaatgcttctcaaaataaaataaaaattgtgggactcggactcctgcgtgtattacagaacccaatagtatttatggtcttcattggcatcgccttcaattttattcttgatcgaaaggtacctgtatatgtcgaaaattttcttgatggacttggaaattctttttctggatcagccctattttatcttggtctcacgatggtgggaaaaataaagagactgaagaagtcggcatttgtagtactaattcttctcatcacagctaaacttctggtgctgccacttctgtgcagagaaatggtggaactcttggacaagggcgacagtgtggtgaaccatacaagtttatcaaattatgcatttctgtatggtgtatttcctgtagcaccaggagtggctatctttgcaacacaattcaacatggaagtagaaattataacctcagggatggtgataagcacatttgtgtctgctcccatcatgtacgtttctgcctggttactgacctttcccactatggaccctaagccattggcatatgccatccagaatgttagttttgatataagtattgtcagcctgatctccttgatctggtctctggctattcttcttttgagtaagaaatataaacagcttcctcatatgcttacaactaatttactcattgctcagtctattgtctgtgctggaatgatgatatggaattttgttaaagaaaaaaattttgttggacaaattttggtgtttgttctattgtacagctccctctatagcacctacctgtggacaggccttctagcaatttctttgtttcttttgaaaaagcgagagagggtacaaattcctgttggaataatcataatatctggctggggaattcctgctctccttgttggtgttcttttgataactggaaaacacaatggagatagcattgactcagccttcttttatggaaaagaacagatgatcaccacagcagtcaccctgttctgcagcatcctgatagctggcatatccctcatgtgcatgaaccagactgcccaagcaggaagctatgaaggtttcgatcagtctcagagccacaaagtggtggagcctggaaatactgcttttgaggagagtccagcaccagtaaatgaaccagaactttttacaagctctattccagaaacaagttgctgctcctgctccatgggaaatggtgaattacactgcccatcaatagagccaatagcaaacacaagcaccagtgagcctgtgattccttcgtttgagaaaaacaatcattgtgtgagtcgctgtaactcccagagctgcatattagcccaggaagaagaacagtatctacagagtggagaccagcaactgacccgacatgtgttgctgtgtttacttctcatcattggcctgttcgctaatctttccagttgtttatggtggctattcaaccaagagcctggaagactttatgttgagttacagtttttctgtgccgtgtttaactttggtcagggatttatttcctttggaatctttggattagataaacatttaatcatcctgcctttcaaaagaagacttgaattcctatggaacaataaagacacagcagaaaacagggattctcctgtttcagaggaaataaaaatgacctgtcaacaatttatccattatcaccgtgacctctgtatccgaaacattgtcaaagaaagaaggtgtggtgcaaagacttctgctggaactttctgtggctgtgacctggtgagctggctaattgaagtcggccttgcctccgaccgtggtgaagctgtgatatacggagacaggctggtacaagggggagtcatccaacatattaccaacgagtatgaattccgggatgagtacttgttttacagatttcttcaaaagagtcctgaacagagtcctcctgctattaatgcaaacactctccaacaggaaagatataaagaaattgagcattcatccccaccctcacattcccctaagacctaaattatgcaggggagaaccctacatggaatcatattctagccgcgtattcattagtttttagctgggtgaccttgggcaagttaacagaggcaacctctctgagcctcagttgtctcttctgtaaaatgtgaaaagatgtgctcccaccacatgcgcagggtctgtgattttacatgtatgtaaaacacataggaagctgacttaggaaaaagagaaaaccaaattaaagttctgataatgaatataatatagtcatcctttagtatccaaggggattggttccaggactcctgaagatcccaaaatctgaggatactcaagtcccttatataaaatggtgtaggccgggcatggtggctcacgcctgtaatcccagtactttgggaggccgagtcaggtggatcacctgaggtcaggagttcaagaccagcctggccaacatggcgaaaccccgtctctactataaaatacaaaaaattagttgggtgtggtggcgggtgcctgtaatcccagctactcaggaggctgaggcaggagaatcgcttgaatctgggaggcagaggttgctgtgagccgagatcgtgccactgcactccagcctgagcaacagagcaagactctatctcaaaaataaaataaaataaaataaaataattaataaaatggtgtagtatttgcatataacctatgcacattctcccatatagtttaatcatctttagatacttataatgcctaatacaatgtaaatgctatgtaaatagttgttgttatactgtattgtttagggaataacaataagaaaaacagtctgtacatgttcactacagatgcaaccattgttaagcctgactacatctttttatctgcggttgattgaatctatggatgtggaacctgtgcatatggagggtcaactgtactataaataatacgaatatgccaacattatataatcattgctttctgcaactgtttactataatttcaaaattaatatcctattaactgttcctataaattatcaaatttggcaagtgtattactagcaggagatggaccttaaattatgacaactttatattttttgatagcatctcttgaaaaagaattttaatgattctaataagaggttctttttcttttttccatttccttgacaaatagtactcatttaaaaactagagggctaggcttagtggctcacgcctgtaatctcagcactttgggaggctgaggcgggcagatcgcttgaggtcaggagttcaagaccagcccgggcaacgtggtgaaacccggtctgtactaaaaaaaaaaaaaaagaaaaagaaaaagaaaaaagaatacccaggtgtggtagtgcatgcctgtagtcccagctactttggagactgaggtgggagtaccccttgagcctgggaggcgcaggttgcagtgaaccaagatcacatcactgcacttcaacctgggtgacagagcaagaccctgtctcaaaaacaaaaaacaagcaaaaaaaacctagaggcactatttttttttaaagtttgtcttttcttttctacccaaattactaatctatgccattaaggaaaggaataagaacctccatatgtattattatctccacagtcctgcagaagtacaatctgatctttaactttcatgctacaaataataatttgagtagattaatttgaattttatcaacaaaattattgccatatgatgtatcatttctgtgtttgaacaaagcatcgtaatgcaggataacttctactttattccctgtagttaaaaaaaaaaaaactatatagttcaagccaatatttaaaaattctaaacctaggctgggcatggtgactcatacctgtaatcccagcactttgggaggccgaggcaggtgaattgcttcagcccaggagttcgagaccagcctggccaatgtggtgaaaccccatctctactaaaaaaaaaaaaaaaaaaaaaaattagccaggtgtggtggtgtgcacctgtaatcccagctacccaggaggctgaggcaggaaaattgcttgaaaccaggaggcagaggttgcagtgagctgagatcgtgccactgcactccagcctgagtgtcagagtgagactctgtctcagaaaaaaaaaaaaaaattctaaagattacatttagaatttagtctttttaaagtgtccatgtataaaaatatataatttttaaaattactaaatgttgccttttctcttagtctaatattttagctactaaaacaaaatataaactggatagcttataaacaacataaacttatttctcacagttttggaggctgtgaagtccaagattaaggcactaacagatctagtgtctggtaaggcaaatttctggctcatagatggtaccttcttgctgtgtccccacatggtagatgggaagaactggtctcattggccccttataaggacattaattccactcaataggctccaccctcatgatctaataacctctcaaaggccctacctcctaatactaacacattgaggatgtgacttcaactttacatttctacaggcagagaagtggggctgtgtaaattcttcccatcagtacttgaatgttcatttaacaaataacttatcgagcatctagcatgttccagacacaatctgaacactgagcacacaacagttggaacaaatatgattcctatcctcatggagcttctattctcctgtgaaaaacagatgttaaacatgattgaggattaggtttcaacataagaattctaggaggacacagacatttagaccatagcatcttcaggtaaactttatcttcagtaaattaaagagatctatttagatgacctttgagcatcttaattattagatgtcagtgctagtttaacttattttaaacgtttcagatatttatttaattatactttaagtgtctcatgtaaaaaagttatttataaaataatttatagggttagagtcattgcccttttaatgcaacaaataaacagttttttaaaaacctgcatgggggccaggcgcggtggttcatacctgcaatcccagcactttgggaggtcgaggctggcggatcacgaggtcaggagatcgagaccaccctgattaatgcggtgaaatcccgtctctactaaaaatacaaaaaattagccagacgtggtggtgggcacctatagtcccagctactcgggaggctgaggcaggagaatggcatgaacccggaaggcggagcttgcagtgaaccaagatcgcgccactgcactccagcctgggcgacagagtgagactccatcgcaaaaaaaaaaaaaaaaaaacctgcatggaagcctagtatatttattaataacaaataaattatactttagtgtactattaacctataccaattttaagttgtgattagggaatggggatgtttttaagctgaattgtcttgctgcggaactttccttttttaataagaccatattatgactctgaatgctcaagggtaagtctaaggcctcattgctgttaccaggagatttttctagttacagtaataaagatgttaattcacatgcatgcagacaactgaaactcaagtggagaatttgtttgtgaacaagtcatactacttctgttatttgcatgaatggaatctgcaatatctttttccatgggagaccctaaaagaaaaccctggatcagaatgatctgcagtttcagataataaaggcttttaagagacatttttagaattaaaaatatgctaattttattaaatgaaaatatttgtaactgttaactttctcactgacaaagcaagtttctcaataaaatacctattttaacttgca

SEQ ID NO: 243822 - DNA, 2613 bp, Artificial Sequence
  derived and/or modified sequence
atgaactctaacttacccgccgagaatctcacaattgcggtcaacatgacaaagactttgccaacggccgtgacccatggttttaactccacaaatgaccccccctctatgtccattactcgcctgttccctgccctcctggaatgtttcgggatagtgctgtgtggatatattgccggccgggcaaatgtgattacctcaacccaggccaaaggtttaggcaattttgtgagcagattcgcattgcccgctttactgtttaagaacatggtggtcctgaacttttccaatgtggattggagcttcctttatagcatactgatcgccaaagcctcagtgttcttcatcgtgtgcgttctgacgctcttggtcgcatctcctgacagccggttctccaaggcgggcttgttcccaatattcgccactcaatccaacgacttcgctctggggtatcctatcgtggaagccctctaccaaaccacctaccctgagtatctccagtacatctatttggtggcacctatttccctaatgatgctaaaccctatcggatttatcttctgcgagatccagaagtggaaggacactcaaaacgccagccagaataaaattaaaatcgtgggcttggggctcctgcgagtcctacagaatccgatcgtgtttatggtgttcatagggattgcgttcaacttcatccttgaccgcaaagtgcccgtgtatgtcgaaaattttttagatggtctcggaaactcctttagcgggtctgctctgttctacctcgggctcactatggtgggtaaaatcaaacgccttaagaaaagtgcctttgtcgtactgatcctcctgattaccgccaaacttcttgtgctcccactgctgtgtcgtgaaatggtcgagctgctcgataaaggagactcagtggtgaatcacaccagcctgtctaactacgcctttctctacggggtgtttccagtcgctcctggagtcgccattttcgcaacacagtttaacatggaagtagaaatcattacctcgggtatggtcatttcaacttttgtgtccgccccaattatgtacgtaagcgcttggctgctcaccttccccactatggacccaaaacccttagcctatgctatccagaacgttagctttgacatctcaatcgtaagtctcatatcacttatttggagcttggccatcctgctcttgtctaaaaaatacaaacagctcccacatatgctgactactaacttgctgatcgctcagtcaatagtgtgtgccggcatgatgatatggaacttcgtaaaagagaagaatttcgtggggcagatcttagtattcgttctgctgtactctagtctttattctacctacttgtggaccggcttgctggccatttcactatttcttcttaagaagcgggagcgggtccagatcccagtcggaatcattatcatatccggctgggggatccctgcccttctggtgggtgtactgttaattactggtaagcacaacggcgactccatcgattctgcctttttctatggcaaggaacaaatgattactactgcggtgacattgttctgtagcatcctcatcgctggaatctctctaatgtgcatgaaccaaaccgctcaggcgggtagttatgagggatttgaccaatcacaatcccacaaagtcgttgagcccgggaataccgcgtttgaggaaagtccggcaccagtcaacgagcctgaactttttacatccagtatacctgagacctcttgttgtagttgtagcatgggtaatggcgagttgcactgtccttccatcgagcccattgctaacacttctaccagtgagccggtgatcccatccttcgaaaagaacaatcactgcgttagccgctgcaactcacagagctgcattcttgcccaggaggaagaacagtacctgcagtcaggagaccagcagctcactcgccacgtactgctctgtttgttgctgataattggactattcgccaatctttccagttgtctgtggtggcttttcaaccaagaaccgggccgtctctatgtcgagcttcaatttttctgtgcagtttttaacttcggccagggttttatcagcttcgggatcttcgggttggacaaacacctcataattttacccttcaaacgccggctggagtttctatggaataataaggatacagcagaaaacagagactcccccgtcagcgaagaaattaagatgacatgccagcagttcattcattatcatcgagatctgtgcattcgcaatatagtcaaggagcgacggtgcggcgccaaaacttctgccggaactttttgtggctgcgatctggtgagctggcttatcgaagtgggactggcctcagaccggggtgaggctgtgatctacggcgaccgtctggtgcaggggggagtgatccagcacatcacgaacgagtacgagttccgagatgaatatcttttctaccgctttctgcagaaatctcctgaacagtcacctcccgctattaacgccaataccctgcagcaggaacggtacaaagagatagaacactcaagcccaccgtcccacagtccaaagacttag
